United States Patent Application Publication US 2008/0114160 A1 - sequence listing, part 30

SEQ ID NO: 8362 - DNA, 35762 bp, Oryza sativa
  unsure (1)..(35762): unsure at all n locations
gctcctttctcttgctcacctaccctcctgctctgtcccccctcaccatcaaagagtcaaggagggcgctgccaatatcagatctggagatacctagggcctttccatcattggatccgcttgagccatgtcagtgatgaggtgatggatcgcactagcccccgtggcctccacctcggtgtcatgccgttggggaggatgccgatcgatgcgaatcctcctcccacgctactgttagtggtgatggaggggaaacaaatgaaggtgctagatctgaagtttcgattgacaatcgacgtggtgctgcagacattggctgcttgttgacattgtgcgcaggtatgtcgtgtgtgcggcatatcaccatggcttagctggtacctacaagtaccaggcacggtacctgtggtaatgtggtatcatggttgatacctacacagggctggtacctgtggtatcatggttgatacctacaggtactagacctggtgccaatggtatcatggttgatacctacaggtttcagatctggtacctgtggtatcatggttgatacctacaggtttcagacctggtacctatggtatcatggttgatgtctcgggtaccagctgatacctataggtgctaaccgataacccataggtactaagtacgaggtatcaaggtatcgggagagaacgtacgttgttgcctcttggctgggtggtgagccatctaccaccagcgttttgtctcgtcttctccttccattcctttcactatcaccatcctttttcttctcaatgtggtgttgatacaagggtcatcatgctattgcagggaccaactttgtcacctaatccactattagtgtcgtgtccttgttctagcgcctcacgcgtgctctttcaccggctgtggcgtgagcgtgtagggcggtgctaaatcgtggactcatgagtggataaagctgaggcggagctgacatcatcaatataaagtatcttgtttggacgggataccgtaccctagcacacctcttactgnggggggtgtgcctctactcccctcccccccgctctatccattccaaccgcgcacagtattattgggcctggcttggagcttatgggcctctagatatgattacaactggcccatagctttcctgtgcaattggtgtgcatcttcgtatatgtagataggggcatgctgccgctccccccccatatatatatatatatatgtatcgaatacatataactagatatatactctcaatttgaaaattttgaaaaaattgggcgaatttgtgtattgccccatatgagtgtcctatatatatatatgtaatatatatatatatatatatatatatatatatatatatatatatatatatatatatatatatatatatatatatataactggtgctacatggagtatgggctccaagattcaaattgagtatatacccaatttgaatgagtatgaaatttttttaaatgtttagatatgaacattaacttctttactaacaagtttgaactgagtttgaactttttttttgttagattttggttctaggtatataacatccaaacatataattcgttaggtatataataatgaattgtgaaataaagttgagtttgagttgttttgttgttaggtatttgtatgaatcgaattcatacaaatgaatttgagtttgagttgttttgataccatggtgcccgggcaccatggtgccccatatgggtattatatatatagtagttttgacgaagtcgcggctgacatgagcctgacgaatggcgtgagagctcctcgccctctgcagcatcatcgacgcccctccatcggctgcggtgaagaggatggtacgcctcgccatgaagaccccggtgcaacgcctggccaaggccaaacgaagcatctccttgggcagcaaggccatggcgcgccatggccttgctgcggttgctcgaaggcgcgcgctcgtggcggcggctagggtttaggctcgagggggaggagagcaacgaggaaaaaagagatatcccgtccgtatatatatgggtgccaacttcacgggccagactgggccgtctgtatcttctgtcttcgactgggccgcttttcccagcaaattcccctcgtttcctaaaaggaataagttcactttgactcccttaactagtgacaaaatctgattcataaccttgaaccacaactattaaaagggtgtaacttgactccctcgacggtcttagagagtgattttgcttatgtggcgcctaggtggcggtgttgaccttgtcttagttacacgtggcgttgatgtggcgcttatgtgtcattaaaattaaaaatatatgtgtgggacccatttgtcatcttctctcattcccttcttcctcatccctctctcttccttctccctctcttgtgcttcaatagggaaattttatgctaagctaacgaccttaaccaggtatgagcagggaccggatcgacggcggcggcggcgggttacgaccaccaccaagccgataaggaggaggacgacgactacggttgtgactacctctttaggtcatccgttgcgacaaggatgatctcatctcgcggttcatggacgtcgccatgtgcgacagtcgagacgctgccactatcacctcaactcttgacgacagcctcaacgaagtcgttggcctttacttcgcggccgctgcggagaaactcatccgcccgtccttcgtgaggctgagtggccaccgtcctagacgctgatcgccgccccttgttcgactgcagcccggtgagagctcgccaccatccaccgctgctactaccctcgtcctcctgctgccgtgagcctccatgaggctgagccaccaccgtcctccttggctctgtcgtcctagccgcacgaccgcgacccttggttctgctgtgtcctagtggaagctcgcctccaaccgccgccgctccgctattccttctgctgccattgatctggtccccgctcccccacgtactccctccatcccaaaaaacacaacctaggatgggatgggacatattcatattctagtacaacgtatctggacatagatacgttatactagattatgtcccatcccatcctaggttgtgttttttttaggacggagggagtaggtctgaaggggaagagaaaggggatagaaaaatgaggagagaggagggaagaggaagaaaggaaggagagaggattatatgtgggccccacatgttagtgtgtcccacaatattttgtagtgtgaatgataaatgtgtcacacatatatattttagttctaatgtcatataatcgctacatcaatgccacgtagaacaatgaccaggtcaacaccatcacataggcaccacgtcagcgaaaccatcctccaaaactaccgagagagttatattgcaccgattttaacaattgaggcgtcaacatattcggtattgtggtttaggaatatgaattagatttggccacaagttaagagagtcgaagtgaacttattccttcctaaaataaaacgatcgtcgatttgtatggtttataccttttgctcaagcatcatctacatacagaagtattttttttcttttttttcctttaagttcagtatagtatagtgttgattcagcgttcagttgcatcatttcatttcgctttaccagttaagattgtcgatgcctgttctgcaaatattgagcaaacagtgaaacaaacgccatatttaccatcccacgttctgaggaacgccaacaatacatggaaaagttgctagtacaaatcaaacatcttgcacatattagacgtgcagtgatatactaacaggataattatgcctttgattccacagtagccaaaatggcgagcaccagcaaattaaaaggcagtaaaataaaagagaaaatagtgtgagtagttaaagtggtcctccaagttttatccgagactcagtttaatccttgatgttttaatctatccatattagttcttcaggttttcattttagttcaaacttatccttagacccacttagaagccatatggctaaacataaccaacaactctcttgataaatgacacttatatcccccatttacatatataagagaaaaaattacatgcaatgggtttttttatagataatacatagtaatttatgtaaagcaaaaataaattatgtacttgcaagtgtatatgatagctattgtttaagttttatgtgcacatattgaaataatgggaattacatatgcaatgttgtttattcatcttgattttctctttttctagtgtatacttgtatacaaattaagggcaaaagggacattttctaatataaatattgactagaaatagtcatatagaatattatgttgggccaagatgattttaagccaaaataaatacttaggggatatatgtggacaaaataaaatatagagaaccaaattgtgcctccagtgaaaattgaggactaatctagctattcacccaaaataaaacccaacttttccagtcaaaatacagcagtatctgaaggcactaacattggctagagaacaaggccgtgtttagttccaaaataatttttcaatctttcaacttttccatcacatcaaaacttttctacacatataaactttcaattttttcgtcacgtcgttccaatttcaaccaaacttttttaattttaatgtgaaactaaacacagcccaagaaaattttgaaattgcaagtcaatctgctgcggagagcggggtcgtctcgcctgccatcctggtgtctagctctactggcatcgcgtttctggataagaggccatgtttaattccaaaaaaaaaacttcacgctgacacatcgaatatttgatacatacatgaagtatttaatataggaaaaaaatcaattatacatattgcgtgtaaattgcgagacgaatcttttaagtctaattgcgccatgatttgacaatgtgatgctacaataaatatatgctaatgacgaattaattaggcttaataaactcgtctcatagtttactggcagaatatgtaatttatttttgttattaaactacgtttaatattttaaatatgtatccgtatattcgatatgacaattaaacacgaaaattttctccaactaaacgaggtataaatacacagagcacaatctaccctatgccccttgattttgcttgacggaggtcgccagaatatgttaatgagatcttcaggaccctgttcaggaaaaaaaaaagttctcaactgcaggaaaaacaaagcttcctgtccatactcgaagactcatgaaatgatacatacccgtgcagcggttactacgaaattgaagagaataagggcctcatcgaatggctatatgcagaaaatttggcatattagcaaaataaaataatttgtgattaaaatttttacatttatgtttgtaacgacttaaatcataatattgtaaaagaaaactatgataaaaaaatcaaatataaatttaaaattaagtttaaaaaattaaattttgacattggtatatgttgattgggccaaaagatgagagccttacataggagccaatcaccagaaggaacagcagatcaaaagtaacacttgcaccctgcgaattggagaaacaagtcaaagaatgtatgaggttatttcaatgtgttgatatcttacggaagtccctttgaaatgaattatctcttactggtaagcaattcgtaaaggaatgcattagcagaatattataatatgaaacaagaagtcacaaagcagggcatatgctttccaaaataagcttaggtcctatttagaccctggcaaaatttttcgccttatcacatcaaatgttatgacacataaatagggtattaaatataaaaaaaaactaactaaacagattgcgtgtaaattatgaaatgaatcttttaagcctaattgttctatgatccgacaatgtggtgctacagtaaacatttgctaatgacgaattaattaggcttaataaattcgtctcaaagtttacaggcggattctataatttgatttgttattagtctacgtttaatactttaaatatgtatccgtatattcaatgtgacacgccaaaattttatacctatggatctaaatacagccttattagaccattccgttgtgagatttgattattctacccaaactgaacaaatgacacaaagcttacacgcttacctgatatgggcgacacttcggtgcatagtataatactaccggtagaactaatctgaaccctttatttttatttaaggataggctagcaaaagtgcccgtacgttgcaccgggaagcgcatatatcaaaaaaatatacaattaattaaaatacaaattcactgaaatatttggtatttttaagtaggtatgtgtataattaaataaatttacaagtaaagcaagtgtgagaaataaaatgacattgttaaatttaattttattaaattctcaatgattagttacgctctttgaaattttattagaattttcagagcttaattgctaattttaataatacaaacatcatttaataattatttaattggaaaaagaaagaaaatcctttcttttaggtttgcttagaaataaacacattcaataattgtaaatgcttctgaaggcccgagggacctaatatagacttatttccgtcccttgccggtcggcccacggccttatcaaaacccgaatccaaaaagcagagtcgccgcttcctcatccgcgactccggccaacggttgcgcttgtaggagtatatcgcgttcccttccgccgacggcgaaactctccggcgccccctctccttccgttcctcttcgcctcctccattaatcggcgtcaacccacttctccgccgtgtgtgcgtacgtgcaggagcgactgctgtggagagcgcgactccggccgctggcgttggatgcgcgcgcagtgccttccgcgtgcgcccgatttgcgtcggcagcgcccacttcggaggccgctctgacgaattccggcgccgccttcacgatccccgtccgcgtgcggccgagacctgcggcggcgccaacctcggaggccgattcgttccattcctgtgcaagtctcgtgcgcacgacgagtactgcgaagaacaacccttgccatcacatcctcaggtttgctgtccggttttttattgatttgccttatattcgtttaacattgtttacctgctaagataattgcaaggccaacagtgagttgcttgggattagctctgcatttttaggtgaaggaaatctgtgtttcatttgagaacaattaatcccaaactttggttgcagcatgtagcgatggtagttttatagtatattagttttggcagtctgatcacagtgtgtattgaaaatatttggttaaatttttcaccaattaacgttccatttttttttcacaaattcttattttcaacccaagttcatgttcgaatagcaatgtagtgtgagcataaatccttggtaatgagcagacatttgttttcttcttatgcacgaactgattcagtttctatgcttagatagctctgaaaagacctatatatgatcaattgtgatgtacactgggatattataccttgattcttttattaaccttatttaagaaactatatatgataaagatttagacaggggacactttgtgaaggatgcaatttcagtcatctcaagtattgagcttcagttgtgatgtatcctcaagccataaatgatgttactttgctaacagtatctgggggcggacgctccaggcagtgaagctgggactgggagcagccgccggcgaatgcttctccaagagcaccaagattcacagatcgtagtggttctggaaaaaaaaagtcctatatggcgaatgtctgaagctagtggttgatggaaaacaacagtcctatgtgtgaagctggtgagaatattcagagatgctcgtgtatagattattatcagttagtactctgtttgtgatctatttactccctccgtccaaaaaaaaaaactcaaccaaggaaaggagtgttttttgggatggatggagtattatgcaaggtaagggcttgtttagttggtgaaataaaaatttttggatgtcacatcagacgtttaaccagatgttggaaggggttttcggacacgaatgaaaaaactaatttcataactcgcctggaaaccgcgagatgaatcttttgagcctaattaaaccgttattagcacatgtgggttactatagcatttatagctaattatggactaattaggctcaaaagatttgtctcgtgatttacatgcaaactgtgcaattagttttttatctatatttaatgctctatacatgtgtccaaagattcggtgtgatgttttttacgaaaagtttttagggaactaaacatgtcctaaatggtatgatctgtaattgtaagcgagatgcttgttcatttccacgtttcggcttgcaaaatgagatagtgctgaacatgccctgtggactgtgtttgactgtgattgtcctgcacctgaaaatggtggaacctcccggaatatgcatatttttaactgtacgtggagttctcatatttacacgcccattctttagaacacaggttaataacggcaaggctgctacatgctcaaactgacagcggttgacagatctatcaatactacgtaataagatggctgcgatcctgttcgttcctcttgtcaaaatttgtgtactgcttactgtatcagtataaccaccagaaaagatggtttcatttaagaaacatgagctctgcactctacagctgaacatatcgattccatttaagagcaaggctaataatacaaccgacttgttggctataaggccattcctaacacaatgactaggatagtatccatagcattaaataaattatcacctaggatgaaaaatgatgtggcaagtgaataaatgaggaaagagaaggaaaccatgtcttgtatgagacatggtttctacacaacatccaatacatcatgtgagataagtagtattaaatttaagtatggaatagtggtgtttgtattggaagggtagtgtctagtactagttttttgatgatgtgaagtttatggaaaccatgtctagtgtcttggggttgggaatggcctaaggtttttttcagccttctcttagcccacacatataatagttagctatttacaattaatatatgaccacttatctctctcacagaaattcttggttcttgcgtccaagtcagttgtaagtttacagcccgctactcctctctctcctatcttctctcctccacctaagcatttagccgacatacagcctcctattatacttgttctaagaaactagcaacataggcggtggaatcgccgaggttaggggaggcggcttaggcgggaagggagggggacaggcgacggaagtgagttggaagcggttcgttttgggcggcggcaaaatccatcgacaaaagtggttgctagggttcatgagcgataaattacgattataccccgtgcatacttttttcttagataatactacccctccacgtttctactactgttaattatggtggtagtagaaataaacctcaaccatttgattaaagaaaaagtacgaattaaccccccagactattacgatagtatgaattatacccttaaaccacaaaaccagacattttataccctgaactatctatactagatgaataacccccttcgatccaatccaaagcagtattgtcctacgtggtatgcaagtggcaatctagttagcatttctttttaaaaaatggtggggccacctgtcatactctccgacctctctctcctcccctcttcctcccaatctctctctctctctctctcttcccctcttcctctcaatctctatgtcacagatgtggagcggcgagttggtggccggcgatgggcgtggcgggggcgcggcgagcgtgatggagaggtgggcgacgtccggcgggcggcggacgccgtcgccctcgcacaccaccgggagcagctccaactccacgcgcggtcgagctcctgctccacgcgcgccacgggcacggtggggcgcgaggcggcgttggcggcatcgtcgtcgcccacctccttgcgcggtcgagctccagctccacgcgtgcgctcgaggactccgtcttgaccacctccagcacgctctccagctccgccacgtcgcccagccgcgcccgccgccgccgcagccgcctccgcgtttctgggattctcagtccacatcatgaagaaagtctgttcactactagaattacattatccattaacttcttcagaataagaaaaaggtgaattgaaggagtaaatcagtgcaaatctgatgccaacaaaatggaaaaatattcagcaaacagtgcaacttttggattcaaatgtgcttttgtttgcacctccactgttctactgttatagagcttttttggctccttgcaaggtgaagctgtgtatcagctgcgtcaggctttcatacgaggagcctcctttctccatggctctgcgagctttctccccgtactccttcgccttcctcctctcgccggcgtgctcgccgccgtccatcagcgccatcaccgcccgcgcgacgtcaccccgggtgacaggtgaccgccatggcctcgtcgccgagcagcagcacgggcgtcgtcacgccgacgccgagcacgtcgacgacgagccgctcgttcaggaactggtcggagaagtgcggccacgccacgaccagcacgccatgggcgatggactctagcatcaagacctccagtggatttatgatgttgtactcgcgagcctgattctcgctgggtctcttctgttctgtagttctgtgaaggactatcaacatacaaatgcacaataatcctggaagctcaaaccggtttggtgaattatgcccatttaatcgacagagtgcatttttaattgcagattttgaccagtggtttgggtgccttaagttccatataactattgttcaatgataatggaaatgcttttaagtattatgtaagatcaagttaagcggtgtctttgtcagttattagttgcttgtgagtgaaactattattcatctaaactaaattatttctgtctgaatggatgcatgctttgtatggtaaaaaacgagcagggttattgagcgggtcttcctgctccttcaatttatttgtcatatgctgagaaatgttcttgttccatcctttatcttccgttgagaaatcatcttgtttcttctgttagaggatgaaaaatattatgtcaacaattttatttgttgattatatgttgacaatgctcttgttttttcattaatcttatttcttgtattcacaaatcctcttgtttcttcagttaaaaagattattaagaattatgtgcaacattgttcataaccatcgtatctcgtcctattgttaaaaaaagggttaattacagtcatgtcattataatttttacagttttgaaacatatcattactattcatctattcggaaccatgccactataacttcacagctattttaaatataggttaattggatccataccatcataaatttgttggtgttaaaaaatatcactactatttatatatttggagccatgccattacaatttcataacttttgaagatataccactacttacccattagatgtgtttataattttctttggaccaaattaccctcgtcttctttcttcatccctctttccctcccctctcaacctctatcctctgtctcactggcggcggaacgatggatggagcagggtgaagctcttggagcgcgacagcacggaaggcatccgccacctagctatgacgcgagaactttcttgtgctcgaagcagcaatagaggcagacacgcctaggaaactgttatcaaggatttttcttctgttttgtccctatgaatttacaggaacatttttggtctataagggtaggggagaggggcacgagagggataaaaagtttggattttgttcacatcgaataccagatttccaatccattccccccactttctcgagcaacagcaatcccgggtgattttcttggatttgtcccctttctcgtgttagcttggcatgagcaagagggagctcggggtgatggattgattgattcgcacctatttgtgccgctgttgctcgcctgcatcgtcctcagctacctactcgacgagaaccgaaggttcgatggttgcacgatttttttttcttttttttttgaaaacttgaacgagttcatcactgttgtgttgggtgttcccatggaaaaagagatggaaaggaagaagataggataatttggtaaaaaaaaatataaacacatccaatagataagtagtggtatatctccaatagttataaaattgtaatggcattgcttcaaatatgtgaacagtaatgatattttttaaaaccaacaaatttgtaatggcatggatccaattaaccctcttaatataccactacttaccttttcattgctttttctaaatcttttggaccatattacccctatcttctccattcatcccatactctcccacccacgttcatgttctccatggagctgcagctctaagcaaaagcagcggcggtggcagggcgccgagcaggtggcatcaagtatccaacattctaacctcgttgcatccatgaggaggacacggctcagagagcaaagaatttccccacgattttttttcctgtttattttttttgttttttctttgaattctttccttacgatttttgctcctgctctagttcttgtttgattaatttggtcaaatctttgtgatgatttttgctcctggtttttatggggttgctctttgattttttttttctcctggttgagttctttgatttgtcgggttaaatcttggtgaggagcgccgcacgggagagtttcctcaagatccagccttcccccctgttgaggttgtcagcaaggcagggactattgtcgccggtgagcttgtggacgacagaggaagttgagcttatggatggcgacaacgatggatggcaccagcccaatgctgtcgatcccatcccattcgtcactacctcgcctcaaggtccctacccctgcccgtcccgcccccatcctcgccacaggaggtggctgctcctcctaccgcccccatcctcgcgtcctggacgacggagttggccgggaggatatgtgcggcgttgttcaggtggtcgtggtctccagatccgccagaacttcattgttcgctgccatgccccatgccgtcgccggtggcctgaccacattgcttgctgctatgacctgagttgctgcttctaggaggataagggtggggagaagatgaacgggagagaggaagaagacaagggcacttcggtcaaaatatttgagaaaataccctgaaggggtaagtagtggcacatattgaaagcggtgaaattataatgtcatggttttaaatagttgaatagtaatggtatatatcaaaaccataaaagttgtaatggcatgtatccaattaaccattaaaaatatattttttttggttatttgatttttattacaaaatatcaccgtagcgtttagcacgagcatattactagtggatctataagttgaaatctggaagtaatagtccttgttttgtgtgtgtgtgtgtgtgtgtgtgttaaaaggtgaatgaaactaggagaagctatcagattctaggatgatgtctggataggggagatgccattaaaaactcaatttccttatatttatagcatctgttctgaccctaacagtattgtaaaacaaatgttgatagagggggaatgggagatcaatctgagaagaactctgggtcaaaatgaattggttgaatggatggagctgcaagagaggcttgctccaatccagttgacaacagaaaaagatagtatggtttggaagctgactcagtcaggacaatttaccacaaagtctccttacagagaaattgtttttgggggagtcaaagatgtttgatcttctgaatttaattcagaaccagaggggagttgaaaacaaaaccttgtggtattattttgctgcaggggcttaggcgatttggcttgtgagaaacgactgggtgttcaattgacttgtgaaaaatattgtatctttgccttataaagctttatcgtttgtgaaagtggaaaagcttgtcaccaattgagttaaggggcgagatagagagagcacagggattgttgtttgccagtatccgcgcgacagaaggttcaagttaggcctctttaatcgcatgattgagaaaacgtaggaataggaaaaacgtaggattttgataagaatgtaagtgtaaaacagaggattgcaaaacgcaggaaaaacacaggaatgaccgtttgattgaaacataggaaaaacacaggaattggatgagagatatagactcaaaggaaagttagcaagaggatgaaactctggctaaatttcctccaaaatccctttaggattgtccattttatagtaatttcaaaggattatatatgattcaattctttatttcaaagagtttcatagaaaattttcctatagaattgaaatcctctaaaatttctatgtttttcctccaaatcaaagggccttaatgtcgccgttctgatcaatcccctttctgacattgcttctcctttttggacttgtatgcttgctgttccctgtgctgtgccagcagcgttagtccttttttctgtctttctagactgtaagcgcttggcctgtatagctggtaatcccagcattctgttcgaactcttatgctttgttaaaaagctgggcttatgccttttctccaaaaaaacgatgagcatgtttgtttaacaatttatttagatttgttgcaaaggcacatgcacttcgctagtttcagagaaagaagacattgacaattcgaacatagacgaacaagagaattggttatgacagcaagcgaactcgctaaccattagcactagagaacacatcggtatcgttttcttaaaatatgaaaaaaaaaaaagaggaaaagataacatggtgatatttagcctccgcaccatggggatccacaccgttagataacttattcttcgaacgagcagggcccccatttcagaggtgagatataaaatggccctgagcgacgatgatgataccactcaaaataatggacacaggtaggacgtatcgattggccaagtttttcgtatcagcaccggacctgcagcccacaagatgaacttaatataagataaatataagttcaagcaaaaggtaaatagttcgtagagcctacttacaaggtaccattatctcgcgtctcagcacggaattgccgaagcagcctcagtatggctttgttctcctcggcacttttttcacacgagccattgtgaagatccatctgaagtagcagacggaacagctcgtctttcttctcctgcactagcgtctcaagacttgcaggatctatgttgttatgaaccttggcatctgcggcaggatttgggcaaggcaaacgatgctgaaaatacaaagaacaccgtgaattgcattatgaaaaggaaaccaaatagtaacacaaaacgcatgaggaaacaagtacagtggtaaaactggttggttggataagaagaagctttaaagtttgaacagtgtcaatgtcacttttacatcaagctttaggcagaatttggaaaacaatattgcgtgaaagtacatccaaatatgaacccataataattggaccaattgctggtaaaaatctatggccttcaacttttttcaagataatacatgctctatattatgagggagatttgacacaaatgtgaggtaaaagaaaaccgaattttcaactacatggtctaagggtctcatcggttaccaaagacttattataagccacaacggcttttattagtgataaaaaagtaattttttgtctaaaacatttacaatgtgttcttagcaacttaaaagccaatgctgaaaaagaaactatgttgaaaatatcttaaaatcaacttcaaattgagtttgaaaaattaaaaaaaaaagactttggttgaattctttttaggcctaccaatgggctaaaattgtcgataaagcataacaggttatggtcttgtggttacattgaattattggactggtcttgcccaacggactgtggagacctgtctaagagggacatcaatctattggagcaattttggttgtgtaactattgtagaagtgcctttgtaggctttactgaagccatgcagaaaacaaaatggaaaaatttacattgccgctacactaaatttacatacataaaaaaaaaaaagtggagcctacaggaaaaggggttaacttatagacattagccgaataaagatgcaaagaaaagttttgatacaaaaataattacatcggtgcatttaattaaggaaacctgagtatctcactataaaaaacaatataataaaagaaatgaatttaagtacatgtgctatgcattggaaaactgtaattaattaaagagaggttgatgctttactccagaaatcgatttattattgttggcaaggggtggttgaggagtagcggaggaactgaagtggcgggtatatgagatgtgaggcatctcgccacggataagcatgggcaacagcctccgctccgcctccaaagccggcgatgtgaccgccggatatacaacccgcggtcgctgtagtgcgcgaccgcagatcttccgcgccgcatagcgaagcgcagccatcgacaactacttcgctgacagtatatcggatcggagcggagcgtattttctcctcagaccagacctaatctctcgggaaggggctcccttctcgtcaaaatcgactcaacatatatagtatatacgagtacctaacaatcgaagatcggtattggaaataatcggaaacgggatcggtaggaagaatcggaaacggtttagggcacagttttaccttttctttatatacgaatccaatcgctctacaggcacctccccacctccgccttggcctttgtgtgttcccagcggaggcccttttatttatttagttttttttagtggctaacaccattcctgtccatggcggcggccgaaggtggacacagcacccccacggagaggagaggaaagggattatctcatctcagatgagagaggaggttcctatggagtactaaaagaaaagaggagcagcagctcgtgggcccagtaaagaccaaaatgttggcggaatcagcaacccgggaaagaaatacaagtccactatgactccctcggaatattggctgaatctcatcttttaccacaaaaccaaaaccatctcgctcggttgttttcgagaatggtttgttttttttttttgactgacgtgatgcccaaaaactttccgtaaaaacatcacatcaaatctttggacacatgtatgaagcactaaatatagataaaaaaactaattgcacagtaattagtctatgattagtcccgagacgaatcttttgagcctaattagtctatgattagccataagtgctacagtaactcacatgtgctaatgatggcttaattaggctcaaaagattcgtctcgcggtttccaggcgagttatgaaattagttttttcattcgtgtccaaaaacctcttccgacatccggtcaaacgtccgatgtgacaccaaaaaattttcatttcaccaacaaaacaggcccattaatatgggaacctacttctcctctgccaccttcccctctccgctttctgctcttccttctctctcctctccacaacggcctctgcttggggatgacactgtagggggcggagctttgtggcgcggtggagaagatgggacaatgggggatatcgtgatggcgctcttggcgaggcttagggcctgtttggagaacttaagattctgagaagcagctggttggtaaccatcttctgataatctaggggcctgttcactttgttgcaaaaaaaaaccttactaaattttggcattgccaaaattttggcatagttactaaaagtttggcaacttgccaaaattttggcatgatttcttatatagttagcaaaatttggcagcaaactaaatgtagccacttttttaacaactttaccaaaatttggtaaggttgaaaatagcatcaaagtgaacaggccctagaaaagttgggtttcccagcttctggcttgcttattttctggattctacaagtacagtttctcagaatctggaccaaaagctggactgtttaggggagcttctgatactgtgagaagttgcagcggctagaaactcctccaaacaggcccttaggctgtgttcgctactcctaggaacatatctccagcacacagaaaacggagcggtccattaacgtatgattaattaagtatttccttttttttcaaaaatagatcaatatgatttttaacaactttcgtatagatttttttaaaaaaaacgcatcgtttaatagtttgaaaagcgtgtacgtggaacacaagtgagatgggttgggaaacccatcctgccgaactaagcctaaggccgaggtactcatccttgaagaacatgccaaaggcgcttcatcgaggagagcgccaccctaagagcaagtataatagtgtgctataagtatactactttctccatttcaggttataatactttctagcattgcccatattcatataaatgttaatgaatctaggcacatgctaaaagtcttataacctgaaacggaggtagtacaaatttacgtggaggagagaggtaacaaaaaaaatcaagagtattggctctcatgcaagaactagcttaacacaagctctaaaacaaatacatgttgtttatgatagagaggaaaaaaaattgtagccaatctgatagctaatttattatatatgttggctttaagatgagctaatagtaggaagtgggctctactattatccttgctataaggctgagttcgtttctcaggttcctaaccctccatctcatttttcgcgcgcacgctttttaaactgctaaacatttttttaaaaaagtttctatacgaaggttgtttaaaaaatcatattgatctatttatgaaaaaaaaaaaggaaatgcttaattaatcacgcgctaatggactactccgtttttcccgtgtgcagggcatgggttccaaccgtgggaaacgaacacggcctaagtagggtaatggagaagaaatgagggtggaacaccgagagtgcaggaattaaatttaaaaaatatacctttatttttcataatttgtgtttatatatatgcatggagcggaattgcgaaaatatacctaacccacggtgcggcgatgcgggagcgacgcgtaaccgcagatcgaaggcgcgggaccagtggtcgtatcggtcacgcaggttggatgtgagggaccgacgtggtcccgcatattgcgcatgcggcatcggcgcacttccgctgggtagttcagcggcaccgcggtggtttgcgggaccgagcgacaccggctcggtcccgcggaatagatgtacgggacgggctgccacatattggaaacgcgggagcgctctccttcccggtaaaaccaaatccaatcactcctaaacttttgcaaacagttaaaactaatcaaccactcctatactttatgtccaatcactcctaaattttacacacagttaaagcaaataaacacagattcatgtgagttgggtgggaccccaccggtgcacgcgcgtggttgcgcagactggccaagcgggatcgacgcgctcccgcgcattgggactgtgggaccagtgcctactccctccgtcccaaaaaaaactcaattcttgtgtttttgtgttcaatgtttgactgtccgtcttatatgaaatatttttatgattagtattttcattgttgttagatgataaaacatgaataatactttatgcgtaacttatccttttaaaatttttttatttttttttaaataagacggatgatcaaacgttggacgcggaaacctacgaattgagttattttgggacggaggaagtatacatgaaaagagtgtgatcatgatctagagcagttaaaagaggtgcctatacatacgtggtagtgctttactgctgctgagataagatggttctaaattaatcaccgcaacagtccgtacaggactattattcaggtttattacagaggcacgagccatctgtcaacccaatgtgaagtgtcaattgtgcaactctttacaatgattaatagccctggacacaaattggcatatacgtgcaaccgaagcatcacagaataactgaattgttcagaagtataccgaagcatcggcttggtgccgcagattgaggctgcgggacgtctcggtcccgcgcctccgttctgcgcgatcggcggatcggcctggctgcccatagcacggaaccacctcggtgctgccgattggggctgcgggaccgtttcggtcccgcccgcatagccgcgccgtgggaccgactcggttccacacacccaattcgtgtgaccgagccgatcccacgcccccgctccacgcgaccgcgttcccgcgccaccaacctgcattaccaaatcgctctcgcgtttccagcgtgcggagaaggtatatttgtgccaaactttactgtccaggtatataaatgtaaattattgaaaaaaaaagtatattttcaaatttaattcaagagtgcagagcctcgatgacggtagaccatgcggagctaaccatcacgcgtggaggagataaggacatgggaatccacgggttctggttgatcaactaggggttctgggtgtggtcggtgtgcctaggagtgctcgggagccaagggcacgagtcaagtggtgattgtccgaggttgaagttggatgcaatattgagaggctgacatgtggtgcccacattgctttccacacgaacaagacatgttggctcttcacataggcaaaactgaaaatagttaaaaaaatatctatcttcagtggcaattttgtaaggtcccatttgaatgtgatggaatgatgaagattaagtgcgcacgcaaatgaataagttatttatacataattaattaagatttcattattaaaaacataaaaatggatttatttgatttttttatagttaagttttcgtgtaaaacatatcatttaacagtttgaaaaggaagccaagaaaaaaaattgtatcttgctggagtttagaatctaaaaagtacacgcggataattaccaaatgtagcagtggcaaatactagttaaattcctcgtgttaggtacgcaggcaggctagctaggtcggcctagcccactagggttagtgttgggccctaagagaaaaaagttttttggaaaagattttgctaacgattttgctaaacatcacgcgacagattacctgcagccgagaagcgacgactcgcgacgagcgaacactcgcgaaccagacacacccatcatcttattccacattaagcccagctataattgggctgggcataagcagatgtccaccatgttcgatagcagtgttcagattttacagttcgagcagttgcagaaaactctaagatttttttagtacaaagcacaacttcctgcctggctttagcttctttttgggactgaagtttgctgagctagcgctgcttccttcttaatctctttgttaattacttaatttcatgagaaagtgtagtgtagggcatcacatagtctaggaattggatttcaactctgcgtagtgggagtgccacaatgcaatgcaacctcaaactttgcttcattattatactatccatgcattttgaaactctgcacatcgtggaatttagtgcgcaagtctctgaaggccttctctgcatcttcatgcttcatcatgaaccactatatatatgctttggtggagtatattttaactagttagttaacatctggaactaactgaaagcgaagctgttaggagtagtttaatcttgatccacgtctacatgcacacagttgtgaataattcactattcttatcactgatagtggcgacggttgagtatcttatcatgaattcatgatcagactcaccagtcaccaatgcttgctagcttcaatgctttgcttgtggagatccatggagattttgatcgatcaattagcttttgatttgagaaaaaaaaaaagggctcatgtgtactcatgttattgcaactttacacgcgctggagctagaaatagtgatcaatcaatcaatcgacatctgcttcgatctgcgagagaaagtgcgtcatctgaagaaaagttgaaacttcgtggaggtttcaattagcttgcgcatcttgtggtccatgtgtgcaaacattttgtgagtagtggagatgataattacatgatagatacatttatatatatttattcagcctagctagctgaatgaatggccagaagaaataattaaaccgctaaaaaaagattaatgttaaatgagactaattaatatatttaatggactgtactacctaacgagaggggatatgatcagtctccacccttcagccacacaaccatagcatccaatgaactggtccctgaattgctttctgctgatacatccaaaatttctctcaagttgtcactgatattacgaactagattatctggggctaattataacatggtccactggtccatgcataattcttgtgcataatactgtagactgaatttagatccatttatatgatgatgatgattaatttctactaccattgccagtgctctcatatatatctcctgtccttctcttgtcactctcatatatgtgctctctgtcatacatccactcgattgcatgcactagtagtgttatttcagctagaagagtcaagcaactggacgaactgattgtaacaaaagggactggtcgatctacccatgttgtcaacacaacactactccagttgatagcactagcagcttgcatgcatgtgaaataatgccactgtatagtagctggcatatgcatatatacgcccctgcatcactaaaagctagctagtagctactctctccgtttcacaatgtaagtcattctatcatttcctatattcatattgatgttaatgaatctagacatatatatctatttaaattcattaacatcactatgaatatagaaaatgctagaatgacttacactgtgaaacggaggaagtacgagcctgcatatgcaatctagtacctcccgcaaaaactttattcctagctatgaatgaatttagacaaatatttaaccaattgtaaaatcagaaatgaatctttttgaaacagatgtagcaaatactaggagctagtatttatccagttgtatagtcgatcggaaatgatttcagacttcatcgtttcgcttattgacggaataagcgaaacggcatatttacaaataaaaaataatttataaataaaacttttatatatgtattcttagcaatctaaaaacaaagactaaaaaataaactacgatgaaaaacctcaaaattaactctaaatttaaatttaaaatttaaaattttaatttataagcataagtataaatcaaaagatgaggctagaagtattttgggggacagatcgagtagcagatatatataggtgcgaatgtactggccatttgcactgtactggtgatgcagtggattattttctcaaagatagatatcatgaaatcagggacaatcacttcgaaagctgcctcactatggtcttgtttagatctaaaaaattttcgccaaaaacatcacatcaaatatttgaacacatgtacgagacattaaatatggggaaaaaaccaattacacagtttgcatgtaaattgcgagaagaatcttttgagcctaattacgtcataatttaacaatgtgatgctacagtaaatatttgctaatgacgaattaattagacttaataaatttatctcgtagtttataggcggaatatataatttgttttgttattaatctacatttaatacttcaaatgtgtatccgtatcctttaaaaactttacactcaaaaaactaaaaaactaaagacaccctatacccatatactgcaccagtactgcaagcgcacacacgcagcatattactccctaacaaccctgcaccatcattaggtttttgttactttgtttagctctctgtttgtttgtgagtttgttgcgagactgttagtacacatgatatgatggcaaaacgcactagattaatctctgcttaattagtttgcatcatatatagctgtgaccccatgcatatatatctagatcccgggttgaaatttacagaacatgatcgagctagatgagctagcagcatgatccactatctttcttcttcatctacatgctgttgtgtttggatgtacatgtatgcatgcatgcatgtaggacgtttttagataatgatgcatgtaggggccagattgatttccattatctctcaaaaatctactagtacatgctgaaatgaattaaagttgtgtgtgaaacatggggggatgctgaggtcaagtcatggagaggacccatagtaaagaagagatgacgaatggaagaagaaaggtagctgcagagacgacatacgtacattgcatttgatagctaggcactggtgcagaagacatttgttgtgtgtgcttgtgtgtcattgatatgatacagtacactacttctagtcactactaggtggtatctagggcaggtagtggtggtttgtgcttttactccaaagttgcattgctgcattccactattctatagctgctgtttgtagtggtttacttgagcgcattatctcgtaaaaaaaatctcaaggttttactgcagagagagaacctgtagcagctaccacaattaattttaaacatgctagctgcttagtatgcttagtgaaatatactaaggctgttggtaattaagctacttctgggtcgttgacatgaaaaacgaggcatataggaattgggacaacagaaaaacgtctaagaatctttctgctagattcaaaggtggtggcttagtttgtttgaatttgaagtctcaccattttaattatttgatattagattcattcgtaatatttacgttttttttaattgtgacagcacacagcagacaacgcatagcgcaggactgtgaaaagtgaaccaggcaagacgtggcagtactatgcatactgtacaccaagtactccagctagcgtgcagtacagtggccgtgctgaccgtgcatgcatgcacaggctaaggctagtacagggatcagctggagtctggacgagcatgcaaaagagtgagacaacaagacaagatgatgcatctgtttgcagctgtagcaacagttgcaaccagtactgaggtattactccctcagtcccataatataaaggatattaagtttttgtttgaattatttaaccacctatcttatttaaaaaatttgtgcaaatataaaaaataaaaagttgtgcttaaagtgctttggataataaagtaagtcacaggaaaaaaaataattccaaaaaattttgaataagacaagtggtcaaacagtgcaagtaaaaactcaaaatttcttgcattatcgaacggagggagtagtagctgtgtggcagcgagtagctcacaaaatttaacaatttgacccttttacaaaaactatttttataaataaatcattaccaaaacttatttaaaaaatgactcttttattcagcaccaaatcatctggcgttgaacttagacacctcagcgccacgtcaactggcgctgaatgctgtgccaccgcggatgggaggctaagtcagtgtgccaacgcacattcatcgccatgctatttagcgctgatatgtctaagttcagcatcatacgatttggcgctgaaaaaaaaagatcatttttgaaataagttttggtagcggttcatttataaaaatagattttttttgcaaaggttccaattgtcaaaatttgtggcgagtagctagctgctttggttgcacgcatcgcattgcatggggagcagcgagtttggctgtgcgttggcacgtgaaatctatcggaccgtcaatggcaacaagaccacacatgcacaagacaccattgaattcaaagctgactaggaatacatcattttcggtccttgccattcatttgcatgcgtgcatatgcctcatccgttcatcgctattcacggcatataccctgttcgtttcaaaataaatattttctctattttaaaataaatatccctattaggtttatctattttaaaacgaacattgtatactgtagctatagcaccgacaatcttgtgacgacccgcgttgaatttttagtacatatatctgatattgagaatgaccatgtactagtatatatacaaatgtgtgtagtgtactgttccctctataaagaaaagttaggtgtatcacttttatcattaaaacaaaggagaaattaattcatcttgtgtataataaaaatcaagtagtctttgtatatatgaaactaatgggtatttatatgctttttgggttccaattaaatatttaatttatcttttcattatactaaatctcagatacatgaaactataaacatagctaacggataaaccaaaatataaaataagtttaatatttttggaacgtacgtagctgctccatgttgtccaaaacatgagtcaatcaatcaacacatgctgtacatacgcaacgtagggagggggaggcccttcccttgtcggatccacacacgcatatgcaaatgcatgcacttgtccattttgcagctttgactacttgtgtgtgtgtgtgtaatttgtttgaccgggtgttcagcagctggctgcatgcatggtatgcaggccggagatgtaccaacacgacgccatatattccgggttctcaggatctgcatccatctccagcaaataaagcaacatatagccaaaaggcacgtgctgtcgctgctcatatatgacgattattacttaattaaactgcctcttgcttactcctaagtattcacatacactggtggagaaaccatctttggtcggtcgcccgaaatccacaatagtctcggttccactaaaaaccgggactaaagatgatttttagtcccggttggtggctacagcgggcatatttgatctttagtctcggttggtgttaccaaccgggactaaaaatgatctttagtcccggttctaaatctgtcaggccttatcaggccccccgatatctttagtcccggttgataacaccaaccgggactaaagataggatatttagtcccggttggtgttaccaaccgggactaaagatcccagggatctttactcccggttgataatatcaaccgggaataaagcgtacgcaccagcccacgcacaagcgcatgcgtatatatatatatatatatatatatgcggtttgccgcttattttttctcatcacatcctccaataaccatgtaattgctccctccgttttatattataaatcgttttggacctttttttatcttaatcgaacttttttatatttaaataaatctatagaaaaatttagcaacgaccaaatcaatttaaatataatataaaatatattttaataatataattgttttgtgtcgaaaatattatatttttctataaactaagtcaaactttttaagtttgactggaaaaaaaatccatgataccagcgaaaatgacagtactctgtctcggagtcatcatgtgccatatctattgatatatttaagaccatgcatatatggccgattgatccaggtcaggtccaattcggtatgatacgatcgatcatctcttgatgatctgattaactcaatcaggggcaatatcgatcgatcgagcaagtggaacatgcagatgcagtgcaccaataatatcgacagcaacagcacctgactatttcttgtcctgtcgagatctgtaatccctcaattccttcgtctctgcatccggttaccctgtccgctagcttccggccggccggacctctctgtctatgtgggcccttgcacttggaaaaagaaaccacacaccgtcacaagtgttcagaaaaaggaaaggtccagcgccatggagcggcgaggctagaaattggtgctcaatttagcaaattaacctttgcatcgctttcgcacgctgtgtgtgttcgtttcagtgtcctgtctcctgtgcccggtcgtcgtctaagctagtactccctccatcccataatataaggaattttgagtttttacttacaacgtttgaccattcgtcttgttcaaaaaaaattttgaaattattatttattttatttgtgacttactttattatctacagtattttaagcacaacttttcgttttttatatttgaaaaaaaaattgaataagacgagtggtcaaacgttgcaatcaaaaactcaaaatcccttatactccctccgtttcgaaatgtttgacaccgttaactttttatcacatgtttgaccgatcgtcttattaaaaaatttaagtaattattaattcttttcctatcatttgattcattgttaaatatatttttatgtaggcatataattttacatatttcacaaaagtttttgaataagacgaatggtcaaacatatgctaaaaagtcaacggtgtcaaatattttgaaacggagggagtattatggaacggagggagtagctagttagctacaagagcttaatttgtactcccttcttccctaaatgtttgacaccgttgactttttaaacatatttgaccgttcgttttattcaaaaacttttgtgatatgtgtaaaactagatgtatacataaaagtatatttaacaataaatcaaatgatagaaaagaattaacaattacttaaattttttaataagacgaacggtcaaacattttttaaaaaaatcaacggcgtcaaacattttgagatgaaggtagtacaagctagccacagatcacgcgtcctaatcacgatcttgctggttaatttgacagcactagctaggacatgctgatctactttatattcaatcatggaggttcatcgaattgaatcgcaacaacaattttgtggtgaaaaagaaaacgtactttaagtttagtttatagatggattaattacatcgctgtacgatgcctatctacgctggaagtcaaaagatcagatttactctctaacattatttgataattggccattgaataatacacgttgagattcatgctgaccgttagagacaagcgccgagattcgtaccatgctgggaaacaaaaatcatgtgtgtgttcatatatctactgagctgccgcgggtttatatagttgcttataacttatgctattataattatatactacgtactagttatattgtaattatacttgatatttttaggatttttatgtcaatgttagttaggctatcccaagaaaaaaaatgataatattaagcatgactttatgttcgctcaatcgtgaatgcgtcaggcatcatggtgttcgacacaaactaatcaccgtccaattttagtggtgtgatttttcaaaacaaaagttgctttcccttttgatcccaatcaagccgttaacctgattggcactgcctgctcttttttttgccctttctgttagctggtaggcctctgatatggccgcatgcgcaaaaaggttcagatatactccctccatttcaaaatgtttgacaccgtttcactttttagtacgtgtttgaccatttgttttattgaaaaaattcaagtaattatttattcttttcatatcatttgattcattgttaaatatactttcatgtacacatatagttttacatatttcataaattttttttaataagacgaacggtcaaatatgtgctaaaaagtcaatggtgtcaaacattttgaaatggagggagtatttttcttagcatttttaaggctgtaaattaaaacaagctcggcccatccaatgtgtgatcatcagagtgagcatgcatttctgtcctcctcgattggccaccgtaccagcagcagtccatcatatacgtgcaacatatatatatatatatatatatatatatatatatatatatatatatatatattcccctcccttcccaaatataagtgccatctttgctaaaacataaacctttttaattaaattatttagtataaatattaaagttgaaaataaaaaaaagactttgacgacccatcccattaaacgaggatggttaagacaaaaaggtgattgatttacgaaatttaaatggaaactgattagtggaaaaagtggtattctgaacaatgctagacgtgaaaaactgcttatattttgatataaatttcaaatgctagacgtggtacattgtattttttaaaaaaataaagggagtatttccaggttgcttagtactccattcgtcctattttaagtgcaaccatgagattctatgtccaactttaaataattagtatttttaatgttataggatgatgaaacataaaacgtactttacgcgtgacttatgttttcaaatttttttcaaaaaatttaaataagacggacaatcaaaattaagcacgaaaaatcatggctgcacttaaaatgagacggagaaagtagagattacaatgaggagaaaagactatggtgtcgatcagtcgtccgtcattgattccgacattccgtgtgtttcattcgtcgagttgtcgtacagggtctagctagctgcatgtagaataagggctcactcggcttctacatgggaaaaaaaagaaagaggcgtgagctaagtgtttaggggatgtttagatcaaggggtgtaaagttttggcgtgtgtcacatcggctattatataggatattcgggaagtaataaaactaattgcataatccgacagtagacaacgagacgaatttattaattaagcctaattaatccatcattagcaaatattttctgtagcaccacattatcaaatcatggagcaattaggcttaaaagattcgtctcgcaaaggagtatttaatattttatgcagatattcaaacgttcgatgtgacatggtgtaaaatttttatgtgggaactaaacatggctttagtctgatacgaaattggtgtatataggaactcaatccaccagtccataggatttgatgttccaaatgccaatggtatgtatagaattacaatcctctatttttcctagggtgcaaattaaaggaggcctaaacgtacgtacgcaagcacggagggtggatatagtgatgtagacctgtaacgacgagtgcaacagatacgcatggttcgcacgcacgtacgcagccgatgatgaattcagggagggagagacaggagaagcacatacgcacgcatgaacatatcggccggtaaccaagacgtcgacatacacagagcacgtgcattacagataggcattaccgtcctaaaatataacaacttttaattagacgagacatataatctattttagcaggatatgttctgtccatcaaaaagttgctatatgagcactgcagtctgcaaaactaaaatggagctgaatttgtttgaaaactacaccctctactatattttctttagctcattttatttatcctaaataagttttttaagtaaccaatgtatttaagtttataaaagtgtaaaataattatattaggagtaaataaagtaagaaataattatagtgagatttgataaagtagagatatttttttttgtgttgtattgatatctgtaagataatgaaaaataaacttatttgaaacggagagagatggataaagtggtggggaggtgaaagaaatatagtgggaaaaataagaaagattcgcggagtgaaagcaaagcgaggcaaggcaagagggcggcgacaagacaagcaggggaattgaagaggagggaaggggagggacaggcggcggaccggcggtgaaaggcgaaagcgaaggtggtgggattctgtcctccccaaagggggaagaatatcatcatccatcgcaaaaaagccactttcccacaaaaataaaaaagcccactcacactcacgtccatcgtcgtccctaccctagctatgacatctctcatctcatcccatctcatctctctcatccccaggcccccacactatccatcatctactcgatcgtgtactcgtaacagcattgtattgtatgccaggttctcctaaattcgatccatcgctttctactctacgctcctaccatagtgctagtaggcaataaaatggcagtttcatgcaatatcatactccatgatcatcattcaggcaggcctagctagctcctgatcatctagcagtacacgttgcatgttccatcgccatcgatctcaacttgtcaacactcacacaaacacgcacatgtacacacaaaacaaacccacctcaccagtgcttgtagctatatatagcttgttgatcctgatattgctagcccacttaatctaattcagcccctgtcattttccaaccacgcacgcacgcagcttcagccactgacgccccaacttgcagcgcgtagcgtatgatcagcagcatatagctaggccaattcggtccgtacgatcaacgatcgatcgatgcatgtgtccgcgccatgcgtcgccgtgtacccaaaaccaaaagcgtacgtgcacgatcgtaaacgacgtcgtcctacacgacgtcgacggcgacatcgtgaccatcgggcggcggcagcggcgcgatgaggcgcttgcactcgtcgtcgtcgccttcggcggcggcggcgatcatctcgaggccggtgagcttcttggcgcggagggcctcgaggtgccagtcggtgcgccacacgacggcgaggaggaccagcgcgacgcaggcggcctgcgcggagaggaggccgtaccagaggccgccgaagccgacgcgggcgccgaacgccagggtgacggcgacgggggtgccgacgaggtagaaggagagcaggttgatgcgcgcgccgacggccggcctcgccgtgccgcgcagcacgccgcagcccgtggtctgcgggcagttgcccagctcgcacagccccaggatgggcatcgccgccgccgccagcctcaccaccgccgcctcccgcgtgaacagctccacccactcccggctgaacgccgccgtccacgccacgtgcaccaccccgatcaccaccgcgcaccccagcgccaccatcgccgccatcctcgccctcctcggcttccctccccccagttcattccccacctgcatcatcaccaatcaaacaaaattgaaagtttaattgaaattagaacgataaaagttgaaagtttatgcgtgtaggaaagtttcgatgtgataaaaaagttgaaagtttgaagaaaaagttgggaagtaaaccagatcaacattgcaactcctgattcaattctgcactgtacaacgcatgacaaattgacaattcacaaacagtggatgaacagcgacatcgcggtgtgcaaattctgtcttttctccgaacacctacagtgcagctgtgagcttcactggcacccagaggaagcactgttcgtgtgcactgtgctgacatgcacgagcaatgacaagaccaaccaccaatggccagaggaagaaacaaaccaaaaaaaaaaacccacaagctttgtcccgtttcgcatgcagtaaatagtgctactaaaatcgattctctgatagaaatggtatccggcaaccagcctttaaaagaagggggtgattctgtacaaaatcagcaaaaattcagaattttgtcgcttctctcgcttgctttgcccgttgattgatgtgtgtagggaagatgatgaacatgttcaagatttggttatatatccatgctataaaaaaaaagagagatgaatctgttgctacaatgttggtatctgttactactatacatcgaaaattcagtcttaggagtatctagctcatcaacacacacttagccacatgatttcgcgattgacgagtgtgtggcaggaagcaattaggataaacttgttgtgctaaggttgcacttatcttcttgtgccaagattgggacacaaatctgttcacgaagatatatatatctatcttgatagattcagtcgtttcgcttgtttgtatctgaacttgagctattctataagttcagataacagtgacaccagcaaacaagaaggaggattaaaaacatctagctcggcgcaaattatgctatatgcctagtactatatgatgatgttgcccagcactagctcataacaaactcgctcactgaattttctcgaaagtataacaaccctacccgttgacgaattaactccggcgatgtgaactcaaagcaaaatctcagcctgagctgttgacattcggattggcacgaatcaaaataaaagtggcaatgtgccaaatattcgtgtgtaaagatgttggcaagctgaccatggttgtggctttttagagcaaggttagtatagccaactactaactccaattcacctatagccatctaatagttaattcatacaatggttgcttactatattattagtatatggtttcactgttatacacacattgtcttttagagttcgtgctgcagctgacctaataatctgctattgtagctagaggattttagtttcgttttcacgaatcttgatgcaatacctttatttttttcccgttgggatgcagtgactgatatgagtgattagtgcaaattaagttggtgagtgatgagaggcgtacccgagtagagacacaggcggcgagcgccatgggcacggtgtacatgaggctcgtggtctggatgagcacgccggcggcgccgaccgcggcggcggggtccggcaggtacccggcgagcacggtgaccacctcgtaccaccaccactcgaggcagacgccgacgcagctgggcacggcgaggcggacgaggccggcgaggccgctcgccacggcggcggggcgcgcccagcccttccacgtggcgtcgcaggcgcgcgaccagcggatgtaggcgaggaggaagaggaccatgttggtgttggtgagcgcctgcgcggccgcgacgccgcgcacgccgaagccgaggccgaacacgaggagcacgttgagcgggacgtggagcgcgacggcgatggcggagcaggcggccatgggcttggtgatcccctgcgagcggaggtagacgcgcagcggctggagcacggcgctggcggcgaggtccgggagcgcgtaggcggcgtacgcggcggcggaggcggagatggtggggtcctggccgagcgcgacgaggatggggccgacgtgaagccagagcagcgcgatgggcagcgcggcgagggtgagcagcaggacggcgcgctgga

SEQ ID NO: 8363 - DNA, 84458 bp, Oryza sativa
cacctgtgacggtccgacgtttgcgagtccgtcacaggtgaggttacctgtgacggatgtttcttccgaaccgtcactgatgagttgattccagaaaaaaaataaatgataaatattggctagcctcaggaattgctagccatgccctctgaaaaacagaaacatcacaggtgccagtcaccccccctccatatcacatattccccaactgcccaacatcacagatgcatcacatatcacagatccatcacaaagcaacaatttacaacatcacatatgcaacaatttaatttattatagcacacaattcataccccatgaaagtcctcaaatgatttccaaaatttcttgtattctgttcgttgtgaacctccacaacctgtcaataagggaaaaaaaaggagaaaacagatgaatggtacaacataaatcgtagttgatcaaatgtgatgacaatttagtaaagtaccataaatattgcacatatgaaagtaaattacattgcactctataaaaacataattttttacatcgccagaaattataaaaacatcttttttacatcacaataaattatctagccaagttcatgagtctatttggcatgaaaacgtcctttcttgttcattatttctgcaagaataaaggcgcacacttcgcctctgatagcggggggggggggggttgatgggtgagatcttgaagccagctctacctttctgtttaataaataagaggttaattagcacgttttgaatagcaatgtagatattgaaatgagcttattcgccattagcaacaacctcagggtcgaaatctttcacctctcttagaagtgttgacatgttgtggcacacgtggaaaccacattggtctccgatctgttgtgcgcatgcaaacttggtgtcatgataaagtttgttcttgccctccttgtgcctaccacccttttccacatataggccccaagccatatttaaggccttggtgatttcactgaaatcataatctttggacttattggagttaaggtaggtaaccctactccacttaggtacgatgactaggagaatccaatgtcgcctgcgcagtggttatgtagcgttagtactaagaaccttaacttcaaaaacaatatacacgaagggtattgtcctcttactcttggttatgtgcgcacatgatgtactccttgtcttgatgggcccataaacaccggttgacatagtcaaccacctcagtgaagctctgtcgtaaattaacctcattcaccatggatggatcaagaaacccaacctgattaccatggcgacgactctcgatccaacacaaccttaaaatatttacgtattagaactaatttaattaggagatatagtccagtcatatcacaagtatagaaggtatgcacttacaaggagtagcattttagaagaccagtgtctaacttccggatcctgaaaaggtcgaagaggtcatcaaaacctatagttatataggcaggcgatgataggaatggctggtggtcgtgatgtccaactatggatgactccctcattttccgcttggcattgcttagctccatgtattgcttatgtagctctcggcaagcaatacccatcacagctaacacattgtcctccaccaatggcatgcctagctcaaattgggctggcgccctcacgaccttccccgatttgctcaccggcatcgacgtcgcagccttgcccctttttggctccggcgccaactccccgaccttccccttgccgcgttcacgcttctggcccttgacaagtggtggggagctatcggcctttcttgtggtctttattggagccaagctttgagctatatctgccaagtccatatcagctccaccgggagaatgaggtactgacaatgccggtccacggggagcctcaattgatagcttagacttgggaggtgtaagctccgtcggtcgacttggacgaggagtcatcttcacaactatgtcttctttgggccattgtatgaacgtcttgcgcgcatcgcccaaagtcatgatttcatcatttgggggcacgggcagcggatagcctgaccaggtgtcctttactgtatcgatggacaccttggcatacccagctagcaggtctgcgccgtggaccttgtctgtaaccgagggcttgaaagccatgccctcagcgacttcaggagcgaaagttggatggactctcgctagtaggacacactgtgctgcgccctgcataaggtgaaagtttgaatttaatattggaatgtgtacatgtcttttattagatatggatcggataacaacaattacctcgatgtggtccactgcagctagtggtgcgatcgggagaccaggggccggcacctctgtggatgcacaactactcctatgctgtgacggactcgcgtcgtgttgtacacgaggagttggttgcacagcaggtgttgtgactcggggtatattcatgtcggcgaggaccttgttaaccctttcttccacccttgcattcatgctagcttctagttcttgaatgacctcaaccttaagttcggccttcaaacgagcgtccctctcttccttggagactttccgtttcctgtattgggagctgtactgagggagtccatgcttccagggcacatcgctactaattctccgagttcggccaggatgttctttggttccgagcgcctttgtgaggatgtcatcttcgcgcctcttcgacgcggactcaacctcgctttgtgaagcttgttcagcaaccaagcccaactagaaaagaagatagtcgtttatacgaacttgtactttatacgaacggaaattagttaggttaagtagtgaactcaccagttcctgatagacgacggcatcacttttgttctcaaatgtgacagagccgtccgggttgaccttaccccttgcccgcgcccagttgcgagctctttgttcagggatgtctgaaaacggggcagggacattcgctgctgcagcggctgcatcttcttgggcccatattgcctccttgccgatgtaccctgcggtgcccagccgatgcgggtgctcattccgctgttgcagtacgcgatgtgcctcgcttgattccctaaactcttgggtggtcttgagagagcagaattcctcccacaccgcttcggttatttgagggtattgatcgaacggcgtatgattgccgggcgggttgacaaactcggtgaagagctttgacttccaattcatccaagctttgcccatcttttggaatgccttccgcttgagcctatcctttgcttcggctggaaatgtgaaccatttctccattgccgtccaagctcgctctttctcggcttctgtgaccttcccgatatctttatggaggatcccgaagttctcacgtgccgctagcccgcagcagttagaccatcttccaatgacagtcctgggcgccgtgggcctaccactagcgtcaacctctcttataacttgcactgtggttggccatatattttgtgaccgcggatttctactagacctacttgcacttgtcccgcccgacatcgacgtatgttgttcctgcggcaattctgcagcacaaacagaaggcaatatttgctaaggggtgctagctaaaatttatgtggtcatgtggtgaaaatttatcctataaattaccatgaattttgggttgttggaccgccgttgtcgcgggatgaccttcggcaactgcctctgtggctgggtttgcttcttcctggatcctcgcaggtgttggggagggcgggtttgcgccgggcgttgacatggtttaactttcgcgaaaaagattataaatttcctaccattagactaaatagcattagatccaatgtaatacggggtatactatgaaagatatggcctcagttttgctgagaaatatgcatcaattacaatcatttgcatgaagggataaaaagaggaaatcagctactaggaggaaaaagcaacccaaagaaaatagaacaagtgtagttcatctgttcttatccataaaatagaacaagtgtagttcatatgttcttatccataaagaaaagagcaagtacaggaaattagagcagtagcaacagcatggccatataatagcagcaataagagcagtagcagggccatataacagcagtaggggtatatatgccacaggggcagcaacagcagggggagattcacataaacaacaacagcagggtggaaattcacataaacagcaacagcagagggaaattcacatagacagcaagggtatataaatcaacaagtgtagataatctgttcttatccataaagaaaagaacaggtatagatagaatgttattaagcaattcatccttggccatttaacaagaagtacaggggcaacaacagcagtggtatataaatcatgcatatattattgtagataaaaaaatgaacaagtgcagaaaatctgttcttatgcataaaaaaagagcaagtgcacaaaatctgttcttatgcataaaaaaagaacaagtgtagaggtatataaccactgaatcaatcatgcaaatttaaaaaacagcagcagcaagggtacagaatttgcatgattgacataaaacagcagcaggaggagtatatatgccacaggggtagcaacagcaggggcaaattaactaaaacaacatgtctagatatactcctcttatcaatccagaagaaaagagcaagtgcagaaaatctgttcttatgcataaaaaaagagcaagtgcacaaaatctgttcttatgcataaaaaaagaacaagtgtagaggtatataaccactctacactggccatttaataaggaacaagtgaacaagtgtaggggcaaaaaaatgaacaagtgtagataatctgttcttattgagcaattcatcactggccatttaacaaggaacacattgggcagcagaagcaggggcaaagatactccacaggggcagcaacaacataaaacaaggaacaggtgtattaacaagtagcccacaataacagcagtagcaggggtgtagataaaaaaggagacagtactactaacttcatgtaaacagcaattcatccattcaattcaagcaagtctagataataaaacagcccacaatcattgtggcagcagcagcaagggtatataaatcatgtatataaacaacaattcatacaattgacctattcatagacaaaaagggtatataaatcaacaagtttagataatctgcaaagcctccttaatcatcaaattatgacagaaaacaaaatgcatggagaattttggtgtctaggtcggttccgtccatggactacactggcctatccaccaaaattccccatgcattttgtattctgtgatggtttgataacctcggaactacattaaatctgcggccaatctatcaattcttcccttgtaactagatttcaaaccctacacctaataaaggtccttaattatcaaagaattatagaaaacaaaatgcattgaaaattttggtgtgtaggttggttccgtccgtggactacactgaccaaaccaccaaaattccccatgcattttgtattttgtgatggtttgataacccttaactagctagcttaataaactatttctagctagctaccctacctagctagaaacactattgccaatctatcaatccatcctttttcagctaaatgtaaacatgatccacaaaattcaataggtctagcaaaagggaacaaaacaacatatatagcagtacacactccatgaatggttatatgtccaaatggcacttaaatccacatccaagttgcaaactagctacacattcaagttttaactaacagttgcaaccataggcagcagcatgggcaaacatagacagcaaggggcaagtgtagataataaaacagcccacaataatttatgtggcagcaacagcaggggtatataaatcatgtatataaacaacaattcaactattcatagacaacaagggtatataaatcaataagtgtagataatctgttcttatccataaagaaaagaacatccactgcagcaaaattcatgctaagatcctctattgatgctaagattcactgcaccaaaatcatgtatataaaatctagcccctacattcatccaaaacatccacagacaacaaatcacatttaattcatctatacagcagcaccaataatcgaaacaacaaatcacatttcattcatctaaacaatgcaattcatccatcggaaaaaaggaggaatgggggagggtgacggcatacttggagaagcggcgtacttggagacggcggcgcaggccgtagtcgtcctggatcctggtggcggcggcggagaggacgaccggcggtggtcggggatcccggcgtcggggaggtcagggtcggggaggtcggggaagtcgatggacggacggcggagaggacgaccggcggcgagggcggcggtggaggcggcggcggagagggcggagatggcggcagagagggcagcggagatggcggcggagagggaggaggagaggttgaggcggcgacggtggagatggcggtggagaggacggcggagatggcggcagagagggcagcggagatggcggcggagagggcggaggagaggttgaggcggcgacggtggagatggcggtggagaggacggcggcggtcgagagagtgagtgaggaggcggcggtggagaaggaggcggcgagggcggcggagagggcggagatggcggcagagaggacggcggcgaggagggcggtggagaggtcgaggcggcggcgaggagggtctggatcgagagagagagaggcgaggcggcggtcgagagagtgagtgagtgagagtgggtgccggatctggatcgatctagaagatgtccaaccctaggtcaaccctagtcaaactcacctgtgacgggcgccaactatgtggccgtcacaggtgaggtcacctgtgacgggcgccaaccgtggagccgtcacaggtaagaccacctgtgacgggcccaacactctgggccgtcacaggtgaggtcacctgtgacggccctacagatagagcccgtcacatgtgagtttgcctagagcaattttattttattttatttcacttagttcttttattttccttaacatattttcacatacactacatatttttttatacttaattattttatttcactaacagtagtaattgcacttcattattatactactttaattattttatttccaatgcttatacttgcttaattattttatttcacttctagtgggtgcttcacttaattattttatttgactatttcataagcaatatactattgatcattgcgaacatattagagtcatacagataacagacatgtagacataaactacgtacataaattacaaaaataatccttcctcatggtcgacacgtgcatattgaacttcatcttcttcttcctcctcttctagaggtatttcttgacctatgccgtggacgtgctggttgtaatcatcctcgtctgcaatgttgtccaatccaacaattctccttttcccttcacgaacaacatgtagtttcttgttacacgggtcaactatgtagaacacttgaacaacttgtttggcgagaacgaacggttcatccttatacgcgttgttagccaagttgacagtggtgaaaccttcattgtcaacttttacattgcgaagatcgacccatcgacaacgaaacaacgggactttgaacttcaagtaatctagctccaatatttgctcaactttaccatagtattgatcacgacgaccaccgtcactagcagcctcgatgcgtaacccactgttctgcactgtgcatttgctgtcttgctttaccgtgtgaaaggtgtatccatttatgtcatatccttgccaggtggtggcactccattcaggaccctgtgacaaccactgaagtgtttcactagacaagttctgcaacctggcaattcggttcttcagccactcgttgaaagaagacatgtccttattcctgacccaactctctgatcggcctgggttctcttgtcggataactgcaaggtgttcgtcaacgtacggcaccacctcagtcatatgctgtagtaccgtgaaatgagctttatcgtacaccttccgatccaacctaatagtctttcttccaacagtaccaacaccgtcaagcctcccttcgtgatgagatcgtggtaatccaattgaagatgtttctgacatgtagtccacacaaaattcgatggcctcttcggtggtgtaactctcgatgatactcccctcggggtgtgaacggttccgtacataacccttaaggatcccaggtacctttcgcaaggatacatctgcgtcatgaatgctggaccacagcactttgtttgcctcacaaggtgcaccggaagatgttccattatgtcaaagaaagttggaggaaagtacatctcaagatgacatagggttctcacaagttctgcctgtagttcatctagtccctcgggatcaatgatcttctggccgattgcatggaagaaggaacacaaccgctggatcgtgtgtcgcaccttaggaggcaaaatattccttattgcaacgggcaacagctgtgtgataagaacgtggcaatcatgcgacttcattccaaccaacttaagatcttgcagtgaaacgagcctactgattcttgatgagtaaccagatggaacctttataccactcaaacatgttagcaaatcaatcttctcttctttcgagagagtgtagcaggctggaggaaggtaaaccctgccggattccgtggttatgggatgtagctccgaccgaacacccatatcttccagatctcgtcgggcgttgagaccatcctttgtagtacctgggttaagcagtaatcccattaaactctcgcatacattcttctcgacatgcatcaaatctatgcagtggcgaacttcaagatccttccagtatggtagtctccaaaatattgacttttttttccacatgctcctctcttttgtcttttgtttttccacatgctcctctgttttttccttcgatgtgctcttctcttttcgctttccaactttcctcttttttccaaactcgttggttattcccatcactaagttgtgcacctctgtccctgttagctctgtcgggggtccggctgtatctctgtgtccattgaaattctttctcatattcctatacgggtgataccttgggagaaatctcctgtgacccatgtagaccgtcttgtgtgaatgcttcaaccatttgcttcttgtttccttcatacactccgaacacgcccatttccctttcacagtttggccagaaaggttgccaagggccggataatcgttgatggtacaaaacagcatcgcatggaggttgaaatactcttgtgcatatgcgtcccatgttcgtgtgccctcattccatagcctttcgaagtcatcgattatcggttcaaggaacacatcgatatcgttgccaggttgtctcggtccttgaatgagcatggcaagcataatgtactttcttttgaaacacaaccagggaggaaggttatagttaacaagcagaactggccatgtactgtgacgactgctcaaatcaccaaaaggattaatgccgtccgtacacattgcgaaacgcatgtttcttgggtcatctgagaattcctggtaaatcctatcgattgtcctccactgtactgaatctgctgggtgcctcagcatagtatcgactttccgttcttcggcatgccagcgcacaagcttagcttgttccttgttcgcaaacattctcttcatgcgctccgcaattgggagataccacaccacctttactgggcctcccctctttgacttacttccttcaccttcactctttgctcgtttgtatcttgatgtcccacagatagggcagacatccaagtcagcgtattccttgtaatacaaaatgcagtcgttcggacatgcatgaattcttctgacctccaggcccaacggacataatacttgcttcgcttcatatgtcgtctgaggtaaattgttcccctctggcaacagatcctttaacagctcaaggagttctgtaaaactcttgtccgaccagccattactagccttaagcttcatgagttccaacacgcatgacaacttgctgtgcttcgacttgcatccatcatacaacggcatctggcaatcttccaccaacttactaaacttctcataatctctgtcgttgtcctctgcgtcttcaatgtcatgcaacattgtagatagacattgagtgtccaaatctatggtctctccacctaaaggagaaggtacgaacatgccttctcgagctgcggcggtgttctctacatcctgatccaacacttcttcagctgcgacatcaggcacctcttgctctccatgcttggtccagcaggtatatttcttcatgaatccattcattatcaaatgagcatgcacttcatccttgtcttcgatcatctgttcattcttacagtccctacatgggcacaacatgtgcatgctcatcctactttttctgtcattatccgcaaatgtgacaaattcagtgaccccctctctatactcggtagacgaacgatgcgcatagtacatccatctacgatccatctgaaatcaacaacatacgaagaaaaataaatgatgatcgatatattgagaatgaatggagaataatgtgttttttaccttgaattttagcaaaaaatcgccccccttgccctcccaaccgatttgtgaacagtacaatggtcgggatggaaagcagttggcagtttgggggtatttatagacccaacacacctcaaacgggttagataaaaaaagcccgtcaaaggtattgctcatacctttgacgggcttctattcaacggcccgtcactggtatccgctcacctgtgacgggccagaaatgaaagccgtcacaggtggcggcccatcacctctgacggcttctaatgtatcggcccgtcacaggtgaggggataccagtgacgggttggaagcaaaactcgtcactggtatacctctgacgggttttcctttcggcccgtcacaggtgaggggatacctgtgacggtccgcggccggatggctcaccggtgacgttatctcgactgacccgtcagaggtaatggtcactagtgaccaaatcgtttgcccgtcacaggtatcccgacagaggtgtgaggatctggcgtagtgtatggcgtctacgagtcgtcgtcgtcgtcggggtcggcacgcagcttcacgaggcttgggtggtgcatgaccgagtacggcctcgacgacgacgccactgacggagcagacaagcaggtgctctgcaaggtctaccgctcgccgcgcgcggtctgcgcggaggcgcgcacggcggcggcaaagtgctccggctccaagaggaaggcggacgacggcgtggatcacccggaggcgccgccgcccagcgcgcggccgcggcaagaggaggccgggagcgagcacgacgagcagtcatcggagctcctgccggagttggacctggacgcgctgctgtcggcgccgatggacgagaacctggagagcacgttcagcacggccgccacggaacaatacatgaggtatctgttgaacgacgagcctttgccgtgggctccgacgacggagcttgtcgacggcggcggcggcggcggagacgagttcatccagacggcgaacggaccttgcatggatggcgaggtcttcacgcgcctggctgccggagaaacgctcgacgacattcttggctcgacgagttcttgattgatctctattgtcagcggctgttcctctagcactagtagtgtagttctttcgatcgaatccgatcgaagtaggtttagttagagagattcatggattaggtatttgtttgatccgtgaatagacactgagctgcatgaagatatgcattgctcgatcgatcgatctgtaatttgatgagaagagttgaattgattctttctgtaaagcgtgatgatgtagtgcccttttgtgaagtgaactaatgaaattcatcttcatcagaggttcggagtgttttttttttctttttgatcgaattgaagcagaggttatgcatatgcgttgcttgtttcctcgatcgatctgtaattaatgaagagagttgaatcgatacttttctgtaaagtctgatgtaattctctttttttgctgctgtaagaaattataatacgaatgtttttcttcgcttcagatgtcctacatgctcacatgcatgcacgctggctttctcggtgttcatcatgatgagcccaccttatattgggccgtgtcggcccacctagatccgtatcggccctattttcggtgatccgggttcatgatgggccaattccgtaacgtgtagtgggctcatctcacagaaagccctgtgacggtgtgtacctatctcgctcgtcgccgtcgttggggtcgcgagaccgcggcggcggcgggcggcgaggggccgccggcgccgaggcatccgcgaccgcgaggcgggggatggcgcgcggcgacgacggcgagcggctgcctgtcgctgttggcgtgcttccatggcagcagcagcagcaacaacaacctacggtttctgtttctcccccaaattccaaggcatatcctctcccttatatttgagttcgccatcgtaggaatttcttcagtagttcagttccaaccgaagtgcttgtcttttttttttaatctctaattgtctcatgtgcaattgcatggaagagtagggagagtcttgctatggaattggatggtattttccagcgctctagatggataggcaacatgaatttccctaggatttggtttactgtgacctccgtacggatatccttaaaaccaactgtccttttagttttagaccttttgtatgcttatgtagtgatgtggttccattgatcaacgccttcttttgcaagttagtatgttcataaatccacacagcatgtacacactagacagctttgatactgcattgaccagagttggatttggtagtcgttgtcacaattgggcattagattcaaacagatcttctacctgctcacacagagactaactcttgtctcatactgcaacagaagtcaaacataactttagttgtacatgatgatgtgtttcgttctggtggactacaatatgttcaaccaaaaagaaaggaaatttgtctccaccacaagtcttacatgtcgtcaagagagtggcgaagagtcttaaaagcatcccaagatcatctgcaaattcccccatggctagcttggttgacccggcaaggttgcagaaattgttttcttttccttcttttaatgaatgggagaacttctgctctggtcgatattggttatccacatttccattcctctcagaggatgtatactatataatattgggtaccttcttgtttcccatcttatgggttcaacaaaagaaactataatagctagcatgcagctggttttgctatcgatcatagcatccactgtcatgttggtggcatctggagcacctcctcccactgctgctagtcttgctccctgccccaaaacatgtggagaagtgaacatctggtatccttatggtatcgggcctggttgctttcggcagggctttgagcttacttgcgacaccaccagcaaacctttgaagctcttcttgggaaacactatgactcaggtgattagcctctatccttcaggaactgtccttgcctctatcatgtacactatccccatgattcatggagttgacacctacaacttgtcatgggactctcctgggaggaatctcaacgttgagacctacaattacttggcgttcctcggttgtgggatcggggtttacctgttccatccagatactggtaaccttgtgggtcattgcacgatcaagtgtgcctccatggaggaaatgcacatggcaaccgaaggagggatttgcaatggcatgggttgctgcactgtcacattcccggtgttatttcgaggttttagagtgaccattgttaagagtaacgagacaataccgcagcccttcaacaatatcaccatcaaggctttcttaaccttccgtccttacatttttagcattgcggatctcctgtccaataagataaatgcaagcaccattggtgcttccatggcatacctctcgactgtcatcgcagatgaaccaaattgtccaacagctcggttggataataagacacaatttgcctgtggcagtaacaattgcatagatgtggcaaatggaggttattcttgtgcttgcccaggaaattctgatgatggcaatccctaccttcttgatgattgcaaacaaggtacctacgcaactctagctcctctctgaacagatgttcctttctttattgattgttaattcactacatattttttgtggtcatatatgtttcttaactggaacagagtttaaccctaccccgaaaaagaattgttctagatcatgtggtagcacaaatattcctttcccgtttgggcttgagccaggctgttttgctaagaggagatttcaactgagttgtgcatcaaatcgcactcttattggaagaccacctgcaaaatatgaagtgacaaatatatcattagatgaaggactcctttatgttaacaagctttcagaatttgaagatgccaacacaaagtatttatcagtatactatggtggttctggatattttggccaacaattaatttatggtttggaaaagtctgatttatctgaagagtatggtgtttggaagtggtctgtgaccaatttgacgtgtgaagatgcaaaaagcaaaagtgcatatgcatgtgttagcacaaacagcgagtgtcttgatgttacacatgggaagctatatattggttatcgttgcaagtgctctcttggatttgaaggaaatccttatgtccaaaatggatgtacaggtacacattcctaatgtatctagtgcattcgattttcttgtatgtggcaggagcatggagatatggaatatctgaagagagtgatatgttatccaatgattttcatagtgtggaagttgtagttaatgtgcatttaattgaaaacaaaagcatataggagccatcaagagtttgatatattaaagttcacatttttagttttctgtttgcagatattgatgaatgctctataccaaactattgtaatgggacatgttataactttaaaggaagctatagttgttgtcctcatggtatgtcttatgatcgagtaagaaggcagtgcacttccaataagaggcaaaatattgttttgggtatgtcaggtttttatttattgtttgctgtatgcatgcactccaattgttgaaaatgttatcaaacccctcaaagaataacttttcaattgctgcaattactcctgtaggacttgccattgggattagcagtggttttggagttctagctcttacattaattgcagctatattattcaaaaggtggaagagaagcactcggaagaaaattcgaagggcatacttccgaaaaaacaaaggccttctcttggagcagctgatctcatccagtaacaatgttactcctaacacaagaatattttctttggaagatttagagaaagcaaccaacaactttgacccaacacgtatccttggatatggaggccatggtactgtttacaaggggattttatccgatcaacgagtggttgccataaagaggtccaaaattgtggagcagagtgagattgaccaatttgttaatgaggttgccatcctttcccagattattcatcgtaatgtggtgaaactttttggttgttgccttgaatctgaggtgcctcttctagtgtatgaattcatttctaatggcacacttcatggtcttcttcatggtgatctgagcaccaattgtttgttgacatgggatgatcgaatgaggattgctctagaggctgcaggggcacttgcttatctccattcctctgctgcaatgccaatcttccatagagatgtgaaatcaactaatatactcttggatggtaccttcactactaaggtttcagatttcggtgcttctaggtccatttccattgatcaaactcgcgtagttacaatagtacaggggacatttgggtacttagatccagaatatttctatacaagccaattaaccgagaagagtgatgtttatagtttcggtgtgatacttgttgaactcctaacaaggaagaagccaatttttctcaactgtcttggtgaacagaaaaatttgtgccactgttttcttcaaagcctaagagataaaacaacaatggatatactggattctcaagttgtagaggaagctagccatagagagattgatgaaatggcctcagttgcagagatgtgcttaaagactaaaggagcaaagagacctaaaatgaaagaagtggagataagactgcaactcctaagagctgcaagatcaagggcatacaaggaagacttacaaaggagcagcgaaataaagccgttattaactccgaagtacaaatgtacttccctgaacagcaccaagaatgttgaaatgggccttgttgctaatccagaatctcaggttgtctctaggtgctataccatggagagagagatgatgtactcttcacagtttcctcgctgattgtatttgtttcgacccttgtaatgatttatttatttttcgcttatttttgtagactgtacaaaatgaatggcacagaccaatcgatttctctgtatgcagcagctctatctatttttgtggagtggttagttgcaacagctctatcaacgttttctctgtatgcatttgtgtgtgttgacccagcaagaaaaaatctaagtaaaatttgaaaccacagcagcaacagcacgataggtcgatatgtccgagtggttaaggagacagactcgaaatctgttgggctttgcctgcgcaggttcgaatcctgctgtcgacgcttttttttttttgtgctttcttttgttgtacattttttattttcccttccagccgtgtctatttttccccttatttgttcattcacttttttttttcagctgcgtctctttcttgatcgtgcaatctatagacattttgttaagacctttaataacatttttataatctaatgttagtgcacatagttagttagtggtacagtgcctctcagcctacaacaaaatgctgccatttgttagtcattgctaaagtgcttatgagcaccgtttatattactcaatccatgcaggtagacgtcatctgaacccattaaacatatacttccttagttttttttaaatagatatcgccgttgacttctaaacacatatttgaccattcatctcattcaaatttcatgcttaaaataatttaagtgataaaacaactaacaaccaaataaattataatacgtgatttttttaataagacgaatagccaaacgtgtgacaacatgttacaacaagttaatggcatcatctattaaaaaaacagaggttatactgtacaataaatgtgcatttgtaaccagaaaaataattcactggtaggactaaaataaatacggagtatgtggccaagggtggaggtagagtatctcagggggggtgcccaggaacccagtcaagaaattttttagctataccttactcattttaaccatgtgtgcaccccctaaatacaaacttaggcacccatgtcagcttaaattcgatttaaagtagagtatattaaacaagtggtacccctctacatttcgttttagatccgcgcccatgtggctatatttaggccctgtttgggggagcttctctcagctacagcttttcccaaaagctgcttctgctagaagctgccccaaacagtccacagcttctgagaatctgtagttacagattctgaaaaatgaactaagaagccagaagctggagaaactgggtttcagagcttttccagattctcagaagctggctaccaaacagctgcttctcagaatctaaagctcctcaaatagacccttatatttacttgtgaaatagtaaactggaactattgtggaatccaatggcaatcaaatctaagtttcatgcctatgttcattgaagcaaaaaggaatttttcccaagtctttttcattgaggttgttgcgatagtattgtggaacatctggagaagaagaaatgattatattttcaacaacataacacccactttcaattcctagaaatctcttttccgtaaagattttaccctacttttgcatagggttagagctcaggacagaccaccctggaaatcatggctagataatctgtaatttgttcttttaagttctattttcttttcttttctccctcttagaactttttgggattgtaaatatcttttattgacaatgcatttcaataggagcatctcctgctggtttttcgtaaaaaaaaaaaaaacgggggggggggggggggggggcgcagaagtaaggccggcccggcctactctctcggtcggcccatctcattccaaccaaagcgctgcggcgaggcgaggggaggcgaccaacccttctccgcttcttcccccaccttcctctcctcctccgccgttcgcgtctcctctccttcctcccccacctccgtctcgcgaaaccctcctcccctccccccatggcggagtcgcccgagaacgccgccccggccgcggctccggccccagcgcccgcgcccaccccggccccgccgccgccgccgtcatctccgcccaccaagtcggggatcccgccgcggtacgacctggacgccaagtgggacgcctgcctcgacatctccatccgccgcgtcgcctactccaccctgggtggcaccttcgcgggcctcctcctcttccgtaaggagtttcccccctcccaaactcgcccttgccttcccattgcgtgcgatttcgtgagatctggttgcggcgcgctcgttgttccggcattggcctagggttggcgccgttgctctcgttttaccgttccgatcggcctactctgatgagggattggctaattagggttacatccaagtataatgcacgttatgtaggaactggttgctttatattccgagtaattttttttcatgcaatatcatgtgattaggtgtcgcatttagcgtggatgagttttttgtgtgccacaatgattctgggatttgacatgtgcagatgaaaattccttggtcttagtttactgtatgacattgagagcgaaataagtacaaacaagcagaatgtgaggatgcctgaatcacgtatcgatatccttgtttcattgtgggggctatgcctggattgcttgtaaggctttggtgaacatttattacaacattgtgtttctttcgtatgggcagcttccatgtgtggtagcttgtttacgagaagtttttgttaaatggtattggttttcagcacgtcacggtttagatcccttctaattcatgtttagccattgatagtattagttctcatactgcctagaatatgtttgaaatgtgatcagtggtgaactggtggtcctccttagggggatcaatcgtagtaacttttgtgtgccaagtgctgaggttttgtatgatttgtggtctggtactaatccttaatcttggagtgttgactgtgctttatgtgatcaacacttagcattttagcttgatgtctctccagttattttttcctaatggtgatgagcacacattatagcatgcatgtttaggatcttttcctaggtgaacctcaaatgctcaatctcaaatatgaagggcttcacatgatatctattctgaagtcattattagttattaagttttcctgtatcttttttttttaattttttcttgcattcagcacggatttgacatccagatactctttaaacaatggaacacgtttgctgagatctccttttacatcttgagtactttagctatgacaatttaccatcttgacaatacaactaacaatacgttctctttgaaccttcttgaattactattcatcatattttatcctgaatttgttagaaatggcatatgtccaaaaaaaatgcaaagggagtagttctgccttaaaataccagtgaatagacattcattaaagtactaataaatttagttcttttctccaacaagagttggatgaagattaagattttcgtggcacgctttttaaactgttaaacggtgtgtttcgtgcgaaaactttctatatgaaagttgctctaaaatatcatattaatctatttttcaagtttgtaataattaaagctcaatcaatcatatgttaataccacctcgttttgcgtaaaaaacttcatctccatcttcattttcaggagaaaagaacaccaccatattttgaccagtattattttatacaggtagcccaactactcgctgggcatcagttgcgctcggagctggtgtggggataggagctgcgtacactgaatgttcatacttattcaatggtgctcctccaaagtggtcacccaaagtttcgaccgttccttctgctcattctgaagtaagtgttttctcattttccctgaacttatatatatctgtttgttgactagtcaaactttaccatcagtaaatcaactgcatccttttactgttcttttttagcttttacttgacctcaccatatttttatcctggttgtatgtggtacagttatcaactcttggtgtttctggaaaagaaatgtacttaatattagaccagaataggttattggtgaaatttatttgccactttaactttataacacatagcaggcactacatgtttgctactgcttgttgcatatttatgaatgcatgggttgagcttcttactatcagcgattgtccaaaggctaggaattaggtacatgctgacagtgatcaaacaaaaaatagagcacacgtttcatgtggttggtagtaatttaccaacttccaaacacgtttaggccactccttgtgtttccatagcaagccccccttttctatatctgggattttttcttaattcagcatttgtcaaaatttgtatagatgatctcatggcagtcatgttttggtcagtttgggattagattgtttttgaaaacactctcaggtgtgtggaaggatagagttatcgtttgttgaagccactgattttcaacagtccatgggaaaaatgttgtgttggtgtccttttgggtgaagtgaaagtattgaaaaccctctgcagaagttataatggctgtcatgaatctagtacttacaggatgcgtgtagcaagttttgttcattgtgaaatgacattggtgattatcttttaacgtatctaattcaaaattatcattttgaatgttcattaatttccttatcttctatatttaatcagggggaagacaagtaaacgctgtttggttggatcggtccatcttgatggaggttttttggagtgttgttgaactagctatctcatcatcttgtctgatatcgccaattctggtctactctttaagtatcgcctcaaagttagcaagagcctgctgattttcctttacactatgcaaaactattccaattgtggtcggatgacccatgggccatggctgcgtacctcaaatgatggttttgtgactggcaaataatatgttcatcatgcgaacttgttgcagcgtgcacattagtatatactttgttactgtcccccttttgatgattggtttgtttccaatcctgagcaagtccaatttctgaacaaaatcgagtgtaaacttttccatgcaaaaatgattttaacgttcactttgcacgtttccccgtgagtacatttcgtgtggatctgaaatttggccggtggtctcatcgagaacgggcgttaagattatactccctccatcctccggtccttaatacaagggattttgatattttgcctgtactgtttgacaactcatcttattcaaaaactttgtgcaaatataaaaaatgaaaagttgtgtttaaagaactttggataataaagtaaatcacaaataaaataaataataattctaaatttttttaataagacgaatgatcaaatagtgtaagcaaaatgttaaaatcctttatattaagggacggagggagtacaagatgactgcaaccctttttcttttacgaaagtttcattaagctatttaggcgaataaaaacgtcttttatgaaactttcattaaactattttagacgagtctatataaacgggtgtgaactttcaaaattaggcaaaggctgtgtttagatccaaagtttggatccaaacttcagtcatttttcatcacatcaatctatcatacacacacaacttttcagtcatattatctccaatttcaataaaaatttaaactttgcgctgaactaaacacaaccaaatttaaagacgcccaaaacgggatgctgacagtgaagcaactgtctctgcgaaccgacgcgtccatggcaacgcgaaacacctgaccgttgttcggccatggcaaatccaaaaatggattaaccgtcgccaaccccacctcgtccgtttattcttcttcttgtttcggcttccgcctccgtcccgcgcgcgcgtgcccccgcccgcgccgccatctctctccttcctcctgtattgttacgcaagccatccgagccaagcaggagaagaggaagaggaagaggaagaggaagagcatgcccccctgcgcggcatggggaaaagctccgccgacttgtccgcctcctcggagtcggccgtgctcctgcacggcgacctcgacatttggataaccgaggccaagtgcctccccaacatggacatcatgtcggagcggatgcgccgcttcttcaccggctacggcgcctgcggctcctcgtgcggcggcaccggcgacaacgcgcgccgggccggcggcggcgtcaggcccaagaagatcatcaccagcgacccctacgtctccgtctgcctcgccggcgccaccgtcgcgcagacgcgggtcatccccaactccgagaaccccaggtgggaggagcgcttccgcgtcgaggtcgcccacgccgtctccaggctcgagttccacgtcaaggacaacgacgtcttcggcgcgcagctcatcggcgtcgcctccctccccgtcgacaggatcctctccggcgcccccgccgagggctggttccccatcgacggccactgcagcagcaaccccatgcggccgccgccggagctccgcctctccgtccagtacaggcccatcgacgacaaccccctctacaggggcggcgccggcgccgtccccaacgcctacttccctctccgccgaggtggcggcgtcaccctctaccaggacgcccacgtcgccgacggcggcctcccggccatccagatcgccggcggaagggcgtacgagcacggccgatgctgggaggacatctgccactccatcgtggaggcgcaccacctcgtgtacatggtcggatggtccatctaccaccccgtcaagctcgtcagggagcccacccgggcgctccccggcgagacgccatcgacgctcggcgagcttctcaagaaaagggctcgcgagggcgtccgcatcgtcatcttgctctgggacgacaagacgtcgcatgacaagttccttctcaaacggtagtatatctatctatcatcttttttatatcctttcttcttcttcttcttcagttgtactctctgatgaattgatatcgtcaaactcacaagaattcggaaatgatattgtgagaaataattcaggttgaatgcaggatggtgtcatgcatacacacgacgaggagaccaaaaagtttttcaggcattcaggtgttcactgtgtgctggttcctcgctatgccagcactaagcttagcattttcaagcagcaggtcagaaatctttgtctgatatagcgctataatttaactgcctcattagttattactagtacatgaacataagtatagtaattacttgttattgaatataatacctactagtacacactatccaattatgcctgcttttacaaatcacatacaagtaggttctcactagttcatgttctgttgcttatctgcatttgtcaggatgaatagtcctgatgttctttctgagtctgagaaagctacactaaatattcatgcagcaaactcatgccttaccatttgttcatttgcctgttaatagttcataaaaaacctttcgatgatgcttgctaatgtaatatttctcttctccaggtagtgggaactttatttacacatcatcagaaatgtgtgcttgttgatacacaagctactgggaacaaccgcaaaatcactgctttcattggtggtctagacttgtgcgacggcagatacgatacacctgaacataggcttttcaaagatcttgataccgctttcaacaaggacttccataatcctacatttcctgtaagttctccagttcataagctgttatcagatcatggagttccttcatagatgtttacacaaattcatgtgaattgctaaatatctccataaaatgtattggcagcacgttgtacaatctgacttttctataaaatatatcttctctatctgataagaatatgaacgccgaggatcctttctcctgatctacaggttaattcatatggaccaagacagccatggcatgatttacactgcaagattgagggccctgctgcctttgatatactgacaaactttgaacagcggtggagaaaagcaaccaaatggaaggtcaatcttaagaaagttgcaagttggcatcatgacacgctgataaaaataaaccggatgtcctggattgttaccccagctgcagatgaggctaatgcacatgtttgtgaagaaaaggacccagaaaattggcatgtgcaggtataagactttgttttagtcttacatgaactacagtaacatcttagatggtacttcctcatacttattttggtgctcggctaggtgttcaggtcaattgattcaggttctgtaaaggggttcccaaaaattgttcaggaggcagagtctcaggttagtgtcctttgccatgcaccacagcaccagctaaaagtgcatctttcaacaattgtttagttattttcccttttcttctgcagaatcttgtctgtgcaaagaatctaaagatcgacaaaagcatacacagtgcatatgtcaaagcaatcaggtctgcgcagcacttcatatacattgagaaccagtatttcattgggtcatcgttcttatggtcctcacataaaagcgcaggtaaatctgtcttcagttctgctttaggtgaagcttatgaaatgccatttcactacaaatttctttgcttggcaaccaacagttaacatcttgtagttgtagacttgatcagcctaacaatcacatacatgtttatgctatgacttgcgaacagcaattggattgttcagatgcacgatggcaaacgacacattagaacctgaaaatggcataagagatagtaggattagtgtttcagtacctgtcaggctgtttgttactcacatttggtaatgactacaagggcattctgcattcatattacgattggaatgctctggtgagatcaggtgctgataacttaatacctgtggagctggccttgaagattgcaagcaagatcaaggcaaatgagcagttcgcggtgtacattgtcctaccaatgtggcctgaaggcatcccaaccgcggcaccgatgcagcaaatcctcttttggcaggtctgcaggcatttattcatgcaaataactactacctccgtttcaggttataagactttctaacattgcccacattcatatagatgttaatgaatctaggcacacattaacaaatgaatctagacacattcatttgtgcctagattcattaacatctatatgaatgtggacaatactagaaagtcttataatataaaacggaggaagtacaaattaattaagatactgatgttttgatctggtattcttttgaagagccaaacaatgtctatgatgtacaagatcatagcggacgctctgcagatgcagggattggttgaagctcaccctcaagattatctgaatttctactgcctcggcaagcgcgaggtcgccgccggtgacagcatgtcccagacgagcttatgcaatgacaactccactctggtacagtacagcagcaggatactactccgtagtccgtagtaggtaaatgtattactactacgtgtggtgaaatactcgtggctgatcattgttgcaaattaacaatcatgcatccagcgctcggcacagaagctccggagattcatgatctatgtgcactcgaaagggatggtggtggacgacgagtacgtcatcatcggatcggccaacatcaaccagaggtccatggaaggctgcagggacaccgagatcgccatgggcgcctaccagccacactacaagtggtctgctgatcacggccaaggccctcctcgtggacaggtacagttcatccaaagagcttcattacgatcgatgacgagagagagagagatgtgtgtttgcattgcagatgtagagaaacgaggattttcttgctaactccacaaggtgttgaactagccaacctaggttcaaaagcctcaccccttttaattatttgatattaggtagggttcactctatcggttttagcccatttgatcggagttcaccgaaatcccgaaatttcggaaattttggtccgaaattttgaacaaaatttagttgaatttgaacaaatattaccaaaattcacgaaaaaaattaaaaaaatttagccgaagtaatatcgtatcggaggggaccaaaatgaccgaaatttcggttcgaaatttccaactctgatattaggttattcactaatattcacttttttttgcattgcaggtgtacgggtacaggatgtcgctgtgggcggagcaccttggggcggtggaggagtgcttcgggcggccggagacgggggagtgcgtgaggcgggtgagggagatggcggaggagaactggagggcgtacgtgtcgccggagatggaggagacgaaggggcacctgatgtgttacccgttgaaggtggacaaggacggccgcgtccgctctctccccggccacgactgcttccccgacgtcggcggcaaggtcctcggcactcaaacctcgctccccaatgccctcaccacctagtacctgtaccatatcccgcgtgaatatgaatatgaatgaatgccactgttttgtattttcatgtgcactgcaaccaagcaattttttttttccgcaaaagcgcaaaaaaattatatatcaatatattagaagaagagagcagagtttaagatagacaacacaaacggtcgtcagaaagccgttgccaaggttgaggaaagaaagaacaaggggtagagcatttttataacattgcttcaaaatatagagacacgcatgctgcacatctaaaacgcactagagcagaattcacaacaaactataatttactttaaagataaaattggttatatagtccttagagtgtgataggacgatgaagccatgggtgcatgatcatacttatgaatagcagggtttaaatccaaattcttcgaatattatgattctatttttccaagtagagatttactagtattaatctttgtgagtgtatgagtgtgatgtgcgcacatgtcggcacaagcatgcttattgtaatatgtttccaaatacgaatcgaggacatgttggtagtttccattcctttgagcgtgcgttaaaggatacatttgcaggtatatataagtgtgatgtgtgagctcgtgccatccatattataattgaaaataaatacttatccctttgataattaggataaacttacaggaattaacaaatagacccactatattttagtattttctattttcgatgctttacagcctcattgtttggcttatgcttatacttataagttaaaatttaaattttcaacattgaatttggagttaattttggaggtttttcatcgtagtttatatttcagcctttaccttttatcgctaagaacacgtatataaaagttttatttataaattattttttttctaaatatgccgagtccttggtggccccgtgcttattgcttaaacccagccacccacccaggccaaaacctcgcggtcgcggcgaggcatccgtcagctcagctcgatgctgccgcggaggagacgacgccttctccgacgatctcccctccaatccaatccaacccaaatcatccctcctcccctctcgccgccgcccgccgccaagcccagccccagccgcccgcctcctggagccgtcggcgtacggccgcctcctcctggccgcgtcgaggacccgcgcgctggcgctgggcaagctcctccactcccacatgctccgcgccgcctacaggccgggcctcttcctgcgcaacaacctccttgccctctactgccgctgcggcgacatgcgccacgcccgcctcctgttcgacggaatgccgcgcagggacgccgtctcgtggaacacgctcatcgccggctactccggcctgggctcttgccgcctggccctcgacgcgttccgggacgctcgggccagcggggatggtgtggataggttcacgttcgccgcggcgcttgcctcgtgcgcccgcgtgggggactggagggacgggcgggtggtgcacgggctggccgtggtgagcgggcttgcacggaccgcgttcctgaccaattcggtcattgacatgtatgccaaatgtgggatgattgatgaggtgaggctgctgttcgatcgagccgaggaacggggcgaggcttcttggaacctgctgttgtcagcgtacgtgaggatggggtggccagaggtggcagtgaatgtgcttgtttggatgcaccggtcgggggtgaagctggacagttttgctttgggtggcatcctcaaggcttgctctgagctaggtgattcagaggatgttcggaggatgctgcacagttgtgtggttaaggttggtttggacttggatgtgttcgtcgggagtgcaatggtggacatgtacgcgaagaatgggggattggaggaggcgatcaaggtatttgattgcatccctaatcaaaatgtggtagtttacaatgccatgatagcaggatttgctcggttgggtaatgacccgtgccctgagattagaatcgaagcagtcacgcttttttcaaacatgctcaagaagaggataaaaccgtcaaagtttacgtttaagagtgtgcttgaagtgtgcaatttgaccaatgcagtgcgatgtggtaggcagatacatgcccatgtcatactcagtgggcttcaaggtgacgagtttattgcaagtgtgctgattaacttgtactcaaaagcacggtgtgtaaatgacagtctgagatgcttcgatatgaccgttaaagaagatgtcttcatatggacatccatgattacagcatttgtgcagaacgagcactttgagaaggcactatacttgtttagggagcttctctacaccagaaaagggacagatcaattcaccatatcaagtgtgatgagtgcctgtgctgctctttctgtaccaacaacctgtaagcagatacactgtcatgcagtcaaaactggtcttgatcaatttactgtctctggcaattcccagattgctatgtacaggaatataggtgatcttaaggcttcaaaacagacatttgagcagatttcatgtctggacactttctcatggtccgctatgatcctgagctatgcggttcatggctatgaaagcaaggccctagagctctttgagaaaatgaagaatcttggtgtcatgatgaatgagagtgcttctcttgctgctcttattgcttgcagccatcaggggctgggagatgaaggtctcaggtatttcattttctgaaactgcaactttctctctttattatttttcctttattctttctcacgttcttgattgactttctcctgcctcttttactgagcaatttatacgtaatagcaagggagagatgctattctggtaatcttcagaagggcaatgatggcatagatggcagaaagcagtccttgaaaaagcatgccagctatacccagtcagtttagaccatgcattcttttttttttttttgaacgaactggcaagctgccaatttcattgaacagagaaggagtaaaactgtacatgcgccacgcgcaaagggaaaaaaaaaacagattcaaggcctttggcaggtgtttcactcccgccagaacccatgtttagaccatgcattcatttaagacaaatacaaaatttacctgtatggtagatacgttcacacttaaccttacccttaccctcaagatcataaatcaactgtgcatattgcctgcattgtggcatgcattcagtttcttgtgttaactctagctaaggatatcctgtgttatgcctttttgaactgtcaatgtcgagggattggtaaagatcatcagacttgaagtgacactgccaatgccggtcccaagcccggatgtaaaaggtggagggtttgagtttcatatactttttctacacaaaataatgttgtagccttgaagcattactgagtatagatggctggagtagaacttaagtataggatgctaactgcatcaaggtactaaacgggtacattcattggaaacattccatttctggtacctaatcacatttcttaagtcttggtcactgttaatcatgggtttttcttttgtaacccaggtactacgagaacacgataccagatgatggcttttccctggatgtgaaactcaaagcgtgcatggttgacctccttggccgtgttggcaagatagctgacgctgaagatttcataatgagttctggatcagaaaatgacccgatactttggcatgcactattgcgtgcttgcagagtccatggggacaaagaaagatgtacaaaaattggagagaaactgatggaacttgagccgttttctgctagttcatatgtcatgttgtataacttatacatggatgctggaaaaatctcattggctatgaggacgagaggcctaatgagagagcgaggcatcagtaacgaagctggaattagttggaccgactttggaggatccattcataatttcattgatggagataactcctgttcacataacacaattcacacaaccttggaggagttgttggtcagggtgaaacagaagactgagcatggtggaacaaacatttgggagttagaattccaaagcagaaagcttagtgagagctcaatcagcagacatggtgaattattggcagtggcttttgggttgacaactttgccatctgttgctcctgtaagagttatgaagaatcagaggatatcctgggaaagccacgaaactctgaagttgctatcagaaggtgaaaatagggaaataactgtcagggatccaactcattttcatcattttactcgaggctcatgctcttgtagaggctactggtaattgaagttgatgcctcatcttgagagtaggagacttacaagggtgagaacatttttaaggtgagctttctactggcagatcatggagttttggacgcaagcaaaccaagccagatgattcagttgtggtcaggataagactaaagtcaattcaactgaagttgcattgttacagcttgtggctgtgcttcatggttaatagcatcacggctcgagatttttactctgatgaaaccaagaaaggagataaagtgcttacttccctgttagttgcatcattttgactagcacacctcaaaggttcttatgcagtattttgtagtctcatgctaggttatacagaattttttcacacaatctagcagtagagtttcctcgttagggactaattgatcactactttagaagcattcacataattagttcaaattgcatcaattttgaactaattgtgataattagttcaagatatgtgataattatcacaattatgtgataattagttcaagatatcattcctctcagcacacaaattgcgatgataaagaaaataaacctagtgctatgccaagaagctcaagcctgtaaatagacacttgttgaacagatatggacaataatatagttaccgttctttgtagattaattgctttgtttgtaattttgcagggaagattaatacttaatcagggcaacatgaagtcatcatatatcatgcagtaaaaataggagaccacaatcgaatgctttattattgagaaaaatggatggtatcatgtttatctattttagctgaatctatttaaccataattaatcagtatgtgttagtagaagtctttatatcgttatgcatcaacatatcatgagattattaagtaatagctgagtacaccggcctaaccatacttaacatatcatgagactatcgggtaatggacaaactcatgtttaactatggtagagaaaaaaaagtaaattataatttgtactatatttttttaaaaaagttttcatattatgtcatcctttaccattctttacatttcaatttggagaaagaatgaacggtggtgactgtgcgtggagcggcgattagtgattgctggtgctatgaggagtttgttgtcgacacaatctctagccgagtttgttaatatttttctaatacatggaccaccactagaaatatgtgctacttaaaaaggggcttttaactatttgccacttttagatttggcaattaactatttgccacacctatctcaatgacatgtgggtccacatgtgtctatgacatgtgggtccagtggcaaatagttaattgccacatataaaagtggcatatagttcaatagtatatagttcaatagtatctcgcttaaaaaaagcgtagtggtgatcttaaatcctcgcctaggcagactcgcggagtgtgaactgttggatcgcgaaatccaacgcctcgatagcctttcttttcttttcctcgcgctctccccctcaaaccccccgatccccctatccgcctcacgccgccgcataccctctcggtcgctcccccgcctcaaccgccgccgcatcccctccaacgccgtcgctctacgccgcagcagcggcctgcgctccatcgacggcgtgactccgcgcgacggctggagaaggcgaggtcgggccgacgctccacgccgccgctgcccgcagccccgtcggcgccgtcgctccatcgccgtcccgacctcgaaggtgaaccggcttcgagtccctcgcgccgccaccgatcccaggactcctcgaccctaccagcgaacaaggtaagagtgctgctcgatcccgttcctgtacaggaggaggcatacgaggcagggtatggtagatgcataataatggctttagaaatctcctgtgctgactaaatccccattgttcattattaaccattgttcactgtacatgtatatctgtgatgcaaaactctaatccaaaatctgaagtccttagtggtttactgtacctgacaagcaaacatctcaaattgctactgttaatgtatgctactgaaaattctggagaaaaaatcgcaagtacttttactgatgctaatgtatgctactgttaagctgttatttgatgctactaaaatatgtaacatatggacatgaatgttcttgtatgtaaaatgtgtattacctgattaatatgactgcttccaaggctgacaccatcttaattagaatatttgattatgagaaaacccttacaatttattgtctattctgttcttgagagttaaaaaaatctttcaatacatttcagtagttttcctctattgttcttcaaagttacataaatctttcatatcttacctatttcagtacgtgcaccatgtttttgtcttcattttctgtagtacagtctactcatccactttgctggtagcttttgcatgtcatgatccccacagcatgatgtacggttttcagttatagacgtcggttgtgatatgaggaactaaattgcaaccaaacagtgattttccagagttgcggttaagttctgaacaagtcctcagttaaattggaaacattcctttgttttccttcatgtctaaaacctgaactgaacagagatgagaagactactgcatcccttccaaacataatttctcatgtttgttattcgatggttttttaattatggcagctaaaatcaagattatgtatcttgggtagtctgatacattaaaaaggatcgatgcaatatatttttaatgaatatctgcagagaaattggataaacctttctcactctgctttttgttttcaggctacactttgatcatctcttaattttcttcaattcaatctctcttaaggttgttcaagttcagtatcatgccatctacctctccagtataatatacttcttggtaagttctgctgactgcatatgctgccatgttttctcttcataataacaacagatatattttgtagttttgaaaaccacattctgaacattagtgcaagttcagtttttaattttatgtttcaagtttaagttcagaaatccacattcttgctatgtatcttacctatttcagtacacacaccatgtttttttcttcattttctgcagtacagtctattcatctactttgctggttgcttttgcatgccatgatccccacatcatgatgtacgattttcatttttagatgctggttttggtgtgaggaactaaatttaacattgatcagaacaatttgtatgcaaattatgcaacaaaaattagcatatatttgatacatgtctttaatgtaccgtattttatcatttaaattaagcttctatcattggatttaaaatgtagcatacagtcactcgagatgattttcatttttttaatatatcatgagtttttatgatggctggatgactgttacattgtatatttgatacatataatcattgtctgttcggagtgggatccacttaacgttatgtgtacttaaaaaaaattaggaacttattgttcatgtattcgtactattgtccagctatagaagaagatacatatatgtcatgcttgaactttcttttcaagtattttttattaagcaaattatctgcttatcacttagcttttatggcattagctcaaattttagtcacgtgggatcatgagtgattaaaacatgtgatcttaaattgatatatatttttcctgttgcaacgcacaagcacccaactagttgagataaaaggtggagtagttgtaacgccccgattttcgttcgggattaaaaatcatttaataatacactttctagaaatttaataaaagttaaatcaatttaatcaagtgaactattgagggaattaaaaatttccttttaaaaatcattggccgagaatattttgtaatattctttggccctaaatattctctaaaattttctcgtgaagtttcggagctcaagaagtaattttaaaagtcacaaagttcattaaactcatttaaataaaaagaaaaaccaaattaaaatcctctcctctcctttgggctcggcccaagcctctccttcccctcccgcggcccgcgcgccgtcgccgctcccgtcgcctccttcggcctgcttctcttccccccccccccctcatgggccgttggcccatttgcctcctctcccttgaaagtccacaaaaccccccagctcttctctctctggccgacatgtgggacccgaggccccacatgtcagctccttccccttcctccagcctgggccggcaactgccgaagccgccattgttgccccacgccgctgccaaaaccgccgcctcccacctcgcgcgcgcacgtccgaccgtagtctagtatcttccccttcccatcccttggcgtaaatgcgtaacggcttgtttggcaaccctaaaatctgccgtctcggctcctccgctccttgcgccatctcgcggctgaacaggggaggtggcgagcagagcaggggaggggaggggatcctgcaggtgagcatcctctttctcagaattcatctctctcccaccgggactagttttgtctggaatttgcttgcgttcgttcggtaaccctagcttctcttctagatctggaagaagctcttctcttaatttcagagcctccttaaccttaatacaagtaacaacagtttgttgtttgttcccccaaaatcaactgaacccccatgtcccaagttcgatccacccctgcctgaaaggagttgataaacttgatgagtctagtggcgatatgtggaatagactcggatgaggtattgttgtagatgcatagcttcttctggtgttccgatgtgaattttagcgatgcgatgtgatgagggaggatttttgttagcagccatgattttcttccctcgtggtacatctttatttgtccatttgcagtaccagttaaagcatggaatctaaaatattataccaactgaagtatggttgcagtttagcattaaatttagctagtcatatagtagtatatgttagctctcatttgatcgccatttttgtctctgaccctccaccaggtcaccagtaacatgccatttgatttcaccatattgtcatatactccttcctttagaaaatattataatcaagtattcccttttccttttttttcttttttgcttttgcttgtcagatagcatgttatctattactgtgctccctaaatctgtgatttttttctccagtgacattggcacttaaaaactgtttcttggagttcataacagtggtcatatagcaatgattgatgatgaggctgactttggcaacatcactgatgccacagaagggcaggcagctgcaaagttccgtccgaaggcacgggccaagccccgtaagacatctttgccatccagatccctggcacctcatcctactgtggaatcaacagatgaaaatgtggaaacattaaataaagatagcacctcacaagaacagtctgttgataaaaaagcagcatcattaggatgccatggtagtgagacagatggtaatgcttgtgcttctggcggtatacttgacacaccttctgaagatgtggtgacagtatccctggggcttgtgaataatcctgatgtggcattggattcttcaacagttttcgcttcttctgcacataaagtttcccaaaatgaagagaataatgatgatgtatctcatgtggctacacacaaagaaaacatggtggtttcagatacccaagcaccaccgacctgttgcagtgccaggacaattgatgatttggctgactttgaaggattgtgtgatgatactcatgttgaggaagaaagagttgcaaaattccagccgaagtttcgggtgaaaaccagcaaggccgcatcgaaatctcagaggactaaccaaaaggcaggagtctccactgtagatgtgctctcccaaaacaaagaagatggtaaagatcaggcaggatgcaatgacaagcagctgcactctcctactagacatcaagaaagtgtacagatctcatattctcaagcacacctgggaactcataacagtacaatcgatgacgttgctaactctgatagtattatggaagaaccagctcaagaggaaatggctgcaaaattccaacctagactgcgaccaaaggctggtggagcttcacctggggttgctgagactattgatgctgcttgtgtagctactccagagtttggggtttcctctgtagatgtggtttcccaagatacggaagaagatagccatagagaaggcctcagtgatgattcatgccaaaaatatatagatgaagaggctattacaacttcaggcactgggccaccacaggttagtggatatttcgttgttcagaaaaaaaaaatggtactgctatttcaaataaagactatggctccatgctctgacttttgattgtttttaggatttggatgatactgttgatttagactcgcatgctgaaatggtaaatccacatcctgatggtagtccgttgatcattgaagagctctcaggtgtgcttattttacgtatagatcttctcccttttttttttttcaaacttgtgatgtttcttgtagtccaaaaaaaaattcctgtgatatttttaagcatgttgaaagaagtccttaactaaatgagcctcaagttaagcttaattggaacctatgcttgttactatgtgaatattccatgctgaactcatgtttgagctggcttcaatcatatataataacttttactagtttttctgtacttcttttaagaagctaacatatttcttttacagcgggaactactgttaaatttcaaccttatgttcgaaggaaaaaaggcaaaggaaaatcagtatcttttgttccaccaaatgtttctcatgcgcatgctcctacagacaccaattttgagacaagcaactctagccatttctgtaaagatatagcaactggtgaaagtttaagcaacttgccccagcaagcatctgaaaaggtaattgcatgctgaaattcacacttctggttggagtgtgtactggcatgatatacttgattgagtctctttgcctaaacattgcaattctcttctcttaagctgtccgtttttatcagatctgtattagtggcgaacatcatccagatgatcaagaatgtaatgacccagagaatcaataccatgagggggagccatatgatcatgttattgaacaagagccagaaagggatgccagagaaacaggaacatcaatgaaattacgaaacaggagaaaattacaaaaagatgggatacctgagcataccgctgatgatatcatggatgaagactttggtgaacctccatctgacgaacaagataatgatagtggtgatgagtacaccgctagaggcaagcagaagggcaggagaaaatcaagggagaaaaatattaacaaagaaccttcgagaggtaccaagcgcacctcgggggattccactatagaggaatcacagaagcagaagcttcagaaaaataaaagtaaagcatcttcagggggtcagaagaaaacatcaaaagattcatcggtggaacaacctgagaagaagcttacacaccgaattcgtcgaaagagaatggaaggtagctggctcaaatagtaaaacatcaatttcatacaacatgaggtcttaactcatttatttttgtccactttttttagaagtcaagactttactagaaacacctgatcacgagatagatcgcatgaagctaagtgtgacacatcttagactgttacaggaggcgaaagaacgtattaaggcgagttttgtcgtgccacatttattagttctgtttattgaacatttttgtgctgttgatatccaatttgctttttgcttctatagggcaaagaaattccatcaggaccatcgtcctctaatcataggtatggcacaaaattttagtttagtattattatgcataaatattttctctatgcaaaccagttatgtaggaagagtaggattcaaggatatatgtgtacatattgtagtaccatcccttattaaactagagatactttggcaaaactatcacaaaactacaattttaccattgatttttccacaacactacagatttaaggcatagtttgcaaaggctacagatttagcaataacttaatcgcaaagctacttaacaaatcccttaaggataacgatgatatgaaggaaccactagaatctcttgcttttatgttatgtgctaaatttgttgtttgcaatattgtggcttaaagatgtaggtttgcagttcaacaccttgaatctgtagttttgtgatagttttggcttaaacacagcaaaataaccactcactggtactgttatgggttgtgcgaactttttttcctttctttcttttttttttttttggaaaaaggtccaaataaacttaaacactctgaactattgaatcatgtattgagcaccctctgacttttgggtttgattcaaataacctcctgaggggttttgcctatataataagttgactcaaggtgcaatgactcagtgattttaacatgttggcaagctgcttataccactaacagaataataagaaaaatataccaggagcaaggatgatgcttcatctttgctcaggtcattttttaagctatatatgtttattttatgtttccttgtttgtgtagtggtttcacgtgtgctataacatgacaaatactacagtcagcacgccatgcaggcaaaaccacttgggggttgtttggatcaaacgggaacgttcaggggtaatcgcttaaggtgttagacaggactctcaggttcagtggggtatttggacgttttccttttcttttggtcatgtaaacttttcttgtggagagtctttcctgtttcagacaagttatttccaatatcaaattgatgctgctattgttagcttcatcatctaaattgtttgctattgttagcttcatcatctaaattgtttgctgcaatttgatggtctgctatacagcttcacttgctatctttcagtgatatgtacatacctgatgcaattcttattttagattgaccgcaatcttttttgtggcacttctaataattgtttcattcaattcaatttatttgactattgaacctcttaaagtttcaacagtctcatttgtcttctaacaaaaattctcagtgtcttttatttagacattgttttctttgtaaagcgcaagccattggagcactcttgtttaataatgtctcgaatatatgttcatggggaagttaatcgtccacacgaactacagcttttagctgaaaatgatttaggcgattcaacttatctgaccctatcatgatcttggtttgtcttaccacagcacctcccaatttggagatatggatgatgagtataacgaacaagacaactgggacaacgacaggactgagaatcatgtggtcgaaaatacaaccaaacttaattaccattcatacatgaacagacaaacacgagccaaatggtccaaatctgaaacggacaagttttacgaggtatttgataaatcaaccattttgattgctatttttcattttttattttataccaattttaaaaagatatttttattcctgcgtatttattggtgttacataaatttgtattttcatatttgttctgttcagggtcttcaacaatttggtagcgattttgcaatgatacagcatctcttccctgataagagccgtaatcaggtgcgacaaaaatttaaagctgaggagaaaaaacatccaatgcaagttcatgatgccataatgcatcgctcgagaggtgagattgttctatagaaaataccagcccatatttttgagttgtgatctagattaacttaatccttatgctttacatctgtgcacagataatttgtattttaaagaagtaatcaaaaagctcaacatcgaagatgtccagccagatatcaacaatacacatgaacaggagggtacatcaaatgaagaggaccctggaaataaggtttgttttgaaactagcgtataattttcttatatcaagttcattttattaatcttgtttcttgttttctgtgtattaagaatataccgggtggattaattaatgaggaggaagaaaatggtttagattggtcagataaagagctggacatgcacagatctgaggtcgaagagaaggagcacgtttctacaaatgatgatgatgatgatgatcttggtgatgtttttgattggtactaacgtgattaccatgcgaacattactgacgacctcatgattctatcaatatcatgggcctcttgaaaatttatattctggtgctatgacctttgggctctggaaggccatattctgcatcgaaaataattttgctgacaggattctccagatggcgatgaaagcagtacagttccaaaggctgaagaactgtatttttttttttttggtttgctgcttatttctagtttagttgaaacttagaaccataattctagtgcttagcaacacagggatctcaatatttgttgcttgaatcctagtttcgtagattacttgcagagtagtaatgtatatattgctccatcatcatttgatatatctgtcatttttttttctgtctgctctttcaatattctattctatcaatggcgctggctcggctgccccctcacgtcgtcgtcatattgatctgctcacgtcgccccgaccctacatcggcaaatccgagctcctcttcgatccccttctgctcgtctttcaccaccagcgccggtagctgctcgccaccctaacctcccgctgtgctatcccaacctcctccgtgcacggtgtttgtgattaggagtaaatgcctaattcttttttagaattttcatgatatttgctaattaatatgctcatcatcttcaacacgaaatgtttaactcgcacaatgacaacaaaaaggtgtcgtggtgtagttggttatcacgtcagtctaacacactgaaggtctccggttcgaacccgggcgacgccatcataattttactcattttttccacttcaatcttcaatgcatttactacatttttctgttcacttcattagttcaatctatttattttttccacttcaatgcatttactacatttttccatcataattttactcattttttccacttcaatgcatttactacatttttctgttcacttcattagttcaatctatttactatattgctttttatcttttctttttcacttcaatgtatttactacatttttctgttcacttcattagttcaatctatttactatattgctttttatcttttctttttcacttcaatgtatttactacatttttttcacttcaatagttcaatctatttactatgcaacaatgtaagcataaaactggccaataaaaaaaaactagatatgtagcaattctgatatcgtttgccctgaagatggcatcagtgtacatgatcttattcctggtagattcatgctactacataacagtattatatctacattcatgcactccaatatccatggtttattggcttaattcagcgtgatcagccagtgccatggcttcactcagcagctcttgccatagttgagctcttcaggttgggcagcatcttggatgttgagccagtggcaatcctggaacgcgcacctgcccgaggcttgcagcgtctcgccgacgtctcggggctccaggaagtatggcgtccacgacggcgtgccgtcctcgaacgagttgtgcgtgagccgccggatgttggacccgtcgatgtcgacggtgaagatctcgccgtatggctggtaatggtgagggttggagaccggctcggcggagacggcggcgtagtcggaggtgaagacgaggctcttggagtccgggctgaaccatgggtggttggtccggccgctgccgccgctgtgcaccacccgccgcagcccggtgccattggggtgcaccatgtagatggcgaagctgccgctccccggggcatggcggtcggaggcgaaggcgatccactcgccgtcgggtgaccagttgcacatcgtgtccgaccatggcccctccgtcagccgccggatgccgccggcctcgccgtcctcggcgtcgatgatgtacaggttcttgttcccggatctccccgaccggaacaccacccacttcccgtccggcgacggcgacgggaacgcgttgttctcgcctcccacggtcagcttcttcatcgagatggttgactcgtcgtcgtcgtcgccgagggagatggccaccacgtccacctccgtggtctcgctggcgaaatccggcccgatgctggtgtataccacgcctttcctcttccagtcccacgacgtcgagaaggcgttcccggagaagatcttgcggcgaccaccggagccgtcggagttcaccacgtacatccccggcagcccgacgaacgcgatcttcttgccgtcgtgcgagaaggaggggaacgagccgtcgatcctgaagagcgagaacgtgtccggtgaccctgggctcttgatgttctccagcagcagcggcgagtcgccgttccctctcccccggcaccggtggtacccgacgcgcgcgccgtccggcgagatgaatgggttgaagtggtgcacgcgcggtgccacgggcctggtcacctcgaagtaggcgttcttgccgtcgctgctcacgtcgatcacctcgatgtggcggtagtcggagcccgcccgccgtgtcgccaccgccacgagccccggcgcgccgggcgacgcggccggcgtgaaggcgtggaaccccggcggggtgattcgctccacggacgccgcttcgaccccgtcgccggtgacggagatctcggcgcggtagacgccgtaccaaccgtcgctgtcccggcggtggaagaagacggtggtctcgtcggcccagctcggccagccgccgtcacggatggcgagcgaccggcgcgacccgtcggcggtgcggaagacgtagatgtcagtgcgcaggtcctcgacctcgccgctccaaccggcggcgccgggcgacgcggcggccgtccactcgcccgagggcgacacggcggggctgaagtccgcaacgccaagcggcgtgaggcggcgcgtgcggccggtggacagctcggtggagtacacggcggcccagctgctgcgcggctccgcggcggggacggcggtggagacgtagacgaggcgggagccgtcgggggtgagcgacggccggtccttgagcgcgattggctcccatgggaggagcggcgagatcgtcgccgccgccgaagacgacgacgacgacgccgactcgagcgcctcgcggcgggaggagggaaccggggagaggtagaggttgagggagccgttgcgctcggagacgaagaggatggaatcggaggcgggggcgaagttgccgttgtagttgacggagacgccatcggtgaggcggagctcggcggcggcggcggggttatggggggagggcgcgagggggagggagaagatgtcgaactcgtagcggctgcggccgagggtggtgaagacgatggtgccgccgctggccgacgccgccggcgccgccggcgaggcgagcagcgcggcggcgaggagcgcggcgagcaaaggagtggccatggtcgtcggactgaagcgggctacaggttgttggatttggggatttttttgcctatttttcgcggcttccgttggtgatgggctgatggcacaaacaacttttttttttcttttttttttttgttgttgttgatggctttcaacatgataaaggtccacagaaaaatcgaaccatttctcacgaatcatatgtaaaaaaaattctgtgaatttttatcccattgtttgccgcgtgattttttgcactggttcctggacggttgggtgtcctgctcaggaagaaagacctggtaggtggtagcaacacacccacccaatctctactagacgcacactcgagtactcgacttgtctatgaccatctccgtcgtctgctgcttaaaaaaatatataatatatttataaatataagcacatatataaagtcttatgaataatataaaacttaagctgttaagctacgtttattttattatagcataatagtatgatacaacctttgtgataggacgcaagtcgttctactttttcggtaagaaagcgtaattttatcctgagaaagaacgcacttgttttctacagccatatgagtaggttgcaatatacactggtcgaatgaaggcaatacgccattttgtttggtaggttggggtgtgaaaacgtttgtcgtcatgggccacccccacgaaagatcatccagacgtttccatggccggaggggacatagtacattgaacacctactgctttttggttgagtaattttgagctggtttaatgtttttcttttctgaaatactcctaaaaaggagagagataaatgttactaacgtgtgttattgtggtcactggtggggaaagatgtcgaacttttgcttccggaagcggaatataatcggcacagtaaaacgtgatactgaactactcgaaacggcccaagtattcaatgggccgaatgcttaacatgagcagggaataagttcatttgaggtcccttaacttgtcaacgaatccgattttcgtccctcaaccggaaaaccagacacaacgagtccctcaactatcaaaaccagtgcagattaggtccctcggcggttttgagggcggttttggctgacgtggcgcctacgtggctaatttgactcggtctttatatgacgtggcgcttacgtggcaattcgagccggaaaaataataaaatcctcggggcccacgtggccccacatgtcagtatcacaaataaaataataaaaaaaatagtgggacccacgtgggccccatatgtcagtccaactcaccctcctcttcttcctcctctctccccatctcccctcttcatctatctctcctctcctctcctctctctcggggacggagaggcagcggcacgcggtggccggctgccggcgggagaggaggaagcggcgcagccaggcgcggcgtgcggaggcggtttggcgcgatggcgcggcaccggcaatgaaggggaagaaggcgaagggagctccatgggcggcggtgggtttggggaagggctggcggcggcggggatggtggtgagatcagcgcggggtggaacagggaggtcggcgcggcgtcaacagcagcggccgggcgcggcggctcggcagtgcgcggccaggaggtggcgtagggggaggaatcggggcggcgccgggcagaggagggagggaaggggagcttcacggggcggcggtggattgggaaggccggcatggtggtgtggagaagaggaggccgacggctgtggggatggagaggatggccagcgaaggtggggatggagaggatggaccggcgtggtggggaagggcgccacgaggagaggctaccgcgggcgacgccggcgccgctgtgctcggctgagcgtcggccgactccgcgtggcggtgggaatggagaggtgcgccgaccttctccccaccgttccatggcgcgccatcgcctcacgggccgccgaaggcggaggagctcgggcgccgcccggtgacgctgcgtggggcggcggcggccgccgcgtccattggcgtcagcggcggaagggacgaggccctgcgcggctgcggcccgcgaggcgatggcgctgggcacgctcctccgcccgcgaggcgatgacctgaacgccgcggagggagggggccgtggcggtggcggtggcggtggccggaacagatcgacccgggcgataaaaggggatcggcgataacagggagtcgccgaggatgccgaggtcgacgtcgacgtcgtccgcggcggagggcggtcgccactccctctcccgctggccgccgtcagctgcgcacctctccctccgtccgtcgccatcaagtccccgcccatggctctcggccatcgccggcctccctgcgtcctccctccctgcccgcctcgccggtctttgcgcgttgctccctcctctcttgccgccggccgcgcgtcgccgcgcgccgttgtcttctgtggcgcctggagagagcagagatagggagatgaagagagggaggtggggagagaggaggaagaagagggggtgagttggactgacatgtgggacccacgtgggtcccactatttttttattattttctatgtgagactgacatgtgggtcccatgggtcgaattgctacgtaagcgccacgtcggacaaagaccgagtcaaattagccacgtaggcgccacgtcagccaaaaccgctctcaaaaccgccgagggacctaatctgcaccggttttaatagttgagggacccgttgtgtctggttttccgatcgagggacgaaaatcgaattcggtgtaaagttaagggacctcagattaacttattccacatgagcagagatatgggctgagtttctgcccttctctactcaattgcaggtgggcagtgtttgaattttttttatttataattttttttattaaaagttttacaaaaataattttccattttgaaaattaacggaaatagtcgcctaccgccctctgggagggcgatttttaaaaatcgccctcccagagggcggcgaaaatgacgtggcagacggccgttcgctctcgggcgacggccgtcaacgaaatttgcaggcggcccccttgccgccctccgctagggcgattttgcactgtgcggggggccgcctgcaaatgggcggcgagggggcatggaattttgcaggcggcccccttgccgccctgggggagggcgattttgtactgtgctctatattttttttatataaatatcaatagttatcaaatctttttatattgaaaactatacaagattaaaatctccaagactggtaaaatacaattttattatttttagggcatatttggaatgttaccgtacaaatattttgttaatgccaaaatataagcaagttttggcactaccaaatatttggtaaggtaaaattgcatttgatcatatttggtttgctgccaaaatgtaaaattgtagtgaagaatgttgtacataatctcaattctagattacgtattaccaattaataggcttccattttcgtgtgtggtgtggtagtgggaaagaagatatgaagaggttgccttcagattgtcaattatatagcgtcgttttcactgcaatatatgtgaactcaatgagatacattattcattagatgtgacaagacgatcacgcgtgggcgtgattcactttatgtcaacaggcagcgccgaaagttgatagtgataactcgagctgccgcttttcatgtgtgctgttgtggactgtgcgcgctactggatatggcactaccgtgaagcgccgaaagtgtgttgttgtgagcataagttgttcaagcaccatacgaatgaaaagaactacgtagacgagacaaacacaagtagtactgcagtagtaatagcaaaagtagtactgctttacaagtttgtaagccaaaagaaacggtcacataaggactgaagaggtagaacactactgacgaggcctcttacccctgtccctcctaccctgcgccctaatgtgcccctgggagtacgtgagtcggtccgggggtacggcacggccaacccgtcctgcctgtacaggtgtgacctctggctgctcctgagtgtgcgcctctggagctcctccaagctgagaggagcctagtacgtcctggtggtctgcaccgtgcaagtcgtcgtcgtagaactggctagtaggaccagtcctaccggcgtgagacgaagaggccccagtaccgaagatcccggctgcaaatcctgctggacaaggaccatcagtttcgtacaggtatttaacagtattaataaaaagtaaagtaccgtgtgggcgagggatcgacgctccgtgagaggaagagctggcgaacgcgcccgaagaggtggcgaacgcccctgcggagctcgcggaagcgccggtcgtgcctgcgaacgcgctcgaaggcatacgaggtcctgcgatgaggaaacgtgcagttaaaacatggtgacacattcgtgcaaaagctgaaacaaaaatgaactaatatctgggctgaactgtaccgtgcgaaaccggtgctataggtcgcactgctccgaagctaggggcgctcgaagacaaacgaggtcctgctccgacggtaggaccgcgaggccgtgggtgtaccggaccagctggaggtacgacgtccacggcgctgcgacaggagaagacgcgcatgaccgcacgcatcttctcctgcatccggtcgaaggtcgacctctgctcaacgtcctccgcttgctcattatccgaatcttccctctccatttcatcaacaattataccgactctctccccctcatccgccatgcccatggcctgctcctcccttggttgattttcctcattttgcatcgatggtccaacaacatcccctgcattgctaggaccctccacatcttcggtttgcattgaaacatttgtatctttctcttgtaccgacacaaatataacgaggggccatgaccgttcaaaagccatttccacataccgtctccaagcagcagtgctgtccatcggcattagttcccaaaaataaccttctattgcacgactcactacaacagatactgacattgtgtagacttcttggtctattctaaatcctctcaacaaccaactataaattgactcaaatgttctctccgcaggcctatcgatgcccttagatgtcattacaaaatctgacagatcaacaccatctggaccaaatctaatatttccttcaccgtgaactatctgaaatgtgaccttacttgacattgtgcctgatgaaaacaataactgcgttaacctcgcactacgccctaagttacattctctacaatattgttctctaaatttctaaaagtaggttacattctccagatcaaactaaactacatcttacaattaacactactgtctatgtctcaattcatactattatattctatgctctggatctacacatatgtgctgtgtgctacagatctgctaaaatatatggaactaaaactaaaacgcaacatatgtactcaaacgtaatatattagtacaaatgcaaaagatgtatgggagcatacctgtgatgaagtgagcgaaccagcagggcttcgccgctccccttctgctgccctcccctctctctctctttcgtttttttggatttttagtgaatataatgaaatttcacaggggaggggctgggctttataggggggaggcaaaaatcgccctcccccagggcggcaagggggccgcctgcaaattccatgccccctcgccgcccatttgcaggcggccccccgcacagtagaaaatcgccctcgcggagggcggcaagggggccgcctgcaaatttcgttgacggccgtcgcccgagagcgaacggccgtctgccacgtcattttcgccgccctctgggagggcgatttttaaaaatcgccctcccaaagggcggtaggcgactatttccgttaattttcaaaatggaaaattatttttgtaaaacttttaataaaaaaaattataaataaaaaaaattcggcagtgtttgctatgatgcggcccagtggagtaagcaagagatatcttagtgggctctccttcagtccttcccggcctttcatgggctcccgtcccgttagtgcgagatggaccgagttctaatcggtgggctttcctactgctcgtgggcctaaaacgacaagagggagagagcggtacgatgcggagtcgaccaatattttcagtgtattgtaggggggcgcctagctcgcgcatacgcgcttccccacctaaccacctatattagtattatattagtattagttaacactacttaacactaataacagtaattaggaaagattttagagatttttttgagatatttttactaacagattgaaaatttttcaagttagattaagaaactttcgatttaagatttaaattttaaagtcaaattttgaagatatttaactcagatttaaaaactttcaactcagattcgaaaactttcaagtacagatttgaaagttttgaaaagtttcaactcgagatttgaaaacttttaactcgattcgaaaactttcaagtccagatttgaaacttttgaaactttcaacttgagatttgaaaactttcaactcgagatttcaaaactttcaactcgattcgaaaactttcaagtccagatttgaaaattttgaaactttcaacttgagatttgaaaattttcatgtctaaatttgaaaattttaaagttaaaatttaaaaattactagtaaaccaaccactagtaaaaatatgaagctaatctaaactaattatatttttttcttttatccgtacgacaggaacaatatacggcgaaaaaaaagaaacagcggcgtaaaaaaaagaaaaaaaagagagaagcgcaaaagcatgcgcgtgcatgggcctcgtgggccggcgtgcgcgccagcaacgcgcgcgcggattagcctttccgacgcatgaatctgaacttatgctactaccacgaatttagatatagctcatgttcagattcatcgtattaagatatatcttatattctactagatttatttttacggggatattctactttattgttatattataagacggagcgagtattttagattgcattatcgccgtgtgatgacaaatcagggcgttgctcatgtcgactataggaggaccaacacaaccgcacatcaaaaagatcgaccggctagctactgctccctcatgcatgttttttttcaacgcttggaacctacaaactgcctctcttgtggcattgacgtgctaccttatgatagaatattaatttcattgatcaatattggcaaggattaaaatgcattatagggtagcttcgtcttcccatgtactcctttttgtttaaaaatatactccgtaataattttggctagattcatatccaatatttgtatatgtatatgctcgctcgaaaaaggcaaaaagcacgcacacgcgaaaaggtatagacctgcacgtgatgtccagcgagaagcgatcgaattagcgcacgtatgtacgtacgtatacacatacgctggcctgtctttctcctgtctgtcttatactacctactccctccgtcccagaaaaaggcaaaccctgggtttacgtgtccaactttgactgtccgtcttatataaattttttttataattcgtatttttattattgttagatgataaaacatgatcaatattttatgcgtgacttgtctttttaatttttttcataatttttttaaataagacggacggtcaaatattaggcacggaaaccagagtttatcttttttttgacagagggagtacctaccagcctgcacaatcgaaccgtagatgcgtacatatatacgtgtattgtcctggatactatatatactagtgtgcgtatatgtaggcaggccagagaccagagcaggtgcacatcatataatagtacactcatctttagcttcatacagtatttgccaaaacgacaaaaccacacattccgacattatattccacctagtttagtagctcgatacactttattctgttatgttctatactattttgcaaacaatatgtgtttgttagcatatatagatggatacatgttaattattccacttaacaatgtgtgtgtgtgagagagagagagaggggtagcgtactagatgttgtaatcaagttagttggttaaccacttaacaactcaatagatcgccatacacatacccatcgtcacgatcgaattagttggtgtaaatcaatcgatcgatcgaccgagtgagatatatgcatgcatgatgttgaattgttgacgactaccgatcgatcgaccggccaaatgattaattattttctgtgcctatatatctgtctggttgtttttctttaattttactgcattatatgtgtcactctctgcagatcgagctctctagctacacgttacatcctgcaaccgctctccaactaacacactacacctgcatgctgatgctgggttaataattttggcttcttgtcgattactaaatcttaattagtgaccatcgatcacttctaaatcaagcagctatatatctagctacattggattaatattttcgaatgatccatctcacgaatgtacgcccagtgacgaccatgtctattgattttaaaaataataataatagaaactttcattgaattagaataactacatcaagtttaatcacgagtttggtattatatatactgatactacccatcgtttcacttattcaggaaataaaccaaacagcatatttgcaaatggaatataatttatgaataaaacttttatatacgtgcgtgttcttaactagtataaaaaaaaaggatgaaaaataattttcgatgataaaaacctcaaattaactttaaatttaaagttgaaaattcaaattttgttcaaggaaagttccggccgccaagcagaactgaccgacctcctacttgccggctgaaaatttgactttgtacttctcttctatgaccaataattgattaaagagtgagagaaaataaaatggcatactgttccattcaactgggaattaattgtgcagcgattagttgacaggaaaatgacctggcagcacagccatggatgcttaagcttgcatttttaattaattaatgttgcggcatgcatgaagcagctagcgatggatcacgatcacatcgatcgttttgatctactcatcgtggcaacataatggacaggtttttgcttcatctgctgttgctcgaaacttcacaaaaaagagaggtaaaaaggttattcagaaagtgaaaaaagtgacataaagcagagtggaaggaaggtgcagaccgtgttctttacagaagaataattgtaaaggaaaaagtatgaggtaattaagtcacttgacagtgaaattaggagaaatcagcaactagctagctagcatccagctgtacttaacctagatttagctagacctttatatccttttgctttaacagtagatcattaaaagaactccaattgataagttaattctagaagagattttagctttgcgtgatcgatcgatcgatcgatggagagtatagtagattagtagttggtggtcatgcgtgatgcatatatacttgtctgcacatgcttgcccagttgcccctgttcgaatttcatttcatattcgcctctcatcaactgtaaataattcagaagctggttgttcaaaccgtataataatatattctcccaactaattgcacgtatgcgtgctcacgagctgaacaatacgttactgctcagtccatccccttcacagaatggagttgtattttttttattttttttagataatggagaatggagttgtataggactcctaattagtaattaacatatactcctatacatttgttaatttaattatagcaagttgagttatgtttgcatgtgtgtgaactgctcctaactaatcagaccatgttaagctctgcatatgcatatttggtctagcaattagtactcaacatttactacttgagcacgtggaattatgtcatctccatccattccatcactgaggaacaagtcgtgcgttgagcatgcgtttgcactgttgaccgtgctagcttcatgaaatgtctgctaattttttgttaatcagatactaatttttattcctctgaacccaaactataccaaatatggtcatcatttaattagcagaagtacagaaatgaaatgatcagccgctggatctatcgatctcaagctcaatcgttcttaggtctgcacttgtaaagaatcaagaaaggtactattactaccgaactttttcagtaccactccagcgtatgtagacaggaagagtttaattaattaattgattagtcatgtaccatcacccttaatcataaagttgtcagctttacatctgctaagcctagaattatactgaaatgatggaggtttagctttctactcacgtggttaatcatgttgcagcagcagttttctcctcatcttttaatttctggaaggattacgacagtgaaccggacttgttctacaggcctgcagcgatagctctaggattactgattgaggttaggtcggtgaggtgaaccatcatatatccatcgaatacattaattattcagttgattaatctctggtcaaatctgaggatttatttaagactcgagcatatctactgacaaacaagtgaaagaatacatgtatggtatcccaataaaaaataatgcatgtcagggacgatatataatccaaggcagatagctaccggctctttttatttttcttgggtgagattcagaagcatgaagccgtgaactacggtgtctgtctgaacttctgaacagaattcgatccagacgatggagaatcacaattgggaatgattcttgttcttccaaaaggtaaatgaagtgtgaaccttcagaagaataatccaggtcaagttttcctacgagaggagtctgaaactgtgaaaaaaatcaaagcaatcgagaacaaagcagagcagtagaggcagctcgatgctgacgtgcgtgtgtgccaagtaccaacacaaatccaacaggcaaaaagcttcagcctccaggattacaaacacagcaccaaataatgcatatatttttgcattgttcatctctcctgacctcacattggaataagactggattatagtgaggacaaaattaattaaactatcaagcaagggtccactgaatcgacatctttgtatcgttgatgacaggtacatgtattgtgcatttgtgcattgacatggacacgttcagtggagtagtttcacttctccacgttttttactcgtcagcgaacccaggaagaagaagatgaagaacatgctgaccaagctgaccaccaaagtgtgtacacacgtagcatgatgtgtactgcattgattgcatttttcagagctttttttacagctctatttcacagtgtatttggacacatgataattgataaagaatataggagcatttctaacataaaataaatatactataaaaatatatccaacggtggatttaataagtttaattttgtgttgttaattgttgtgtgtttttcaatgaacttgatcgaacctttaaaaattaacttaagacaagccaaaaaaacgctttataatactactactcctactatggaacagagggaataatacattagagttcctatgtcccttctgctgtagtaaaagctgttgcacagatttgggattagttaggtgaaggtgataatgcatttctgtttggtggtggtactaccactaaatacatgaacaagggaagtacagacaatacacatttgctacaattataatcctcctcctactctacagatataatcctgcaatttgctccacatgagatgcgtggagactatacagctaattaagtgccattgcatgatctgctcaggtgaccaactacagctaattgctgcaccttggtttgcaacaactcaggactgcacgaaatgctgtgggctctctcgtataatactgcacattcacaccgacagacaacaggaccagctgctgctactgtactaaatcctgcaaagacgtttttgcaacttaattactccgtgccgtactaattagttttgctatgaaaaaggtgcagcgtagttaacacaactaacctatctcatacgccaatagatttcagatcagcatgagtattttatttagattctaatctgacttactgactacttgctgaaacttgatcaacacaattgtcagccacaagaattgttttgggagcaaacaactttttttcttactatttcatacaggcagtagcattatctatctatttaattatttatttgatcaagcatttcgttggatgagtactttgaaagtctgaaggagtaggagcctaggacgaccgttgtaagcaatttgctccataaatactcgatgcttgattaatgtgacggatgtgcgtgtgcgcaattaacgctaagcttgtacgcaacaattaaacaatcttccttccaagctcgaaacctcactgattgagaactactgctactgttccattagctaattaatacgcatgttaagtgcaccctattagctaattaactgtgcattacccactcgcagacaacacattttatttcctttcgggcgagtaaaacatgccgtgtgtttgtgtgtgttaccattaattatgtagctaaatccacaggccaacaattttctgcttgtcttcatctggtctttaatttgaccttttgttcatatttcaatataggttcacaacttcacatatacgactgtcgtctgattcgtacgtttaaggtcaggccgggtcctaaaagtcatcatctctagaaggaatatgtttttttaaaaaaattaatttgtttgttttgttttatgtaattgtttcgcttgataaaaaaatatgtctttgttgctaagacaatggctgaaacaagtatcttgattaatccagtataaatatgcaatggataatcaccactggacaatccttttgaccagttttggctctttgcagtgttggtcattgggttatcaaatcatgacttgcaagttaaggcttgtcatcacctcatgattctttaactaatgcatgaaagtattatttgttccagaaggttgaatcaaatgtcacctaatgagtacgcctgcagaacaagacaattaggatttgggacaggaaagtatggtcaatacgtttctgacagtttcgtggtagctgaaaaatgcaacaagattaattgaaacagtgaatgtgcatgctaccttaacagctaggagaccagcgatgcagcaagtgaccttgatgctcagttccaacagacaatcatccattaaacaaagccagaactactaattggaagacccagcatagacctgcagcgactcttaattctccccattagtttgggacttggataagtagctgtcagatctgacctaattaatggatggaaaaaggtttggtcatctgacctcccaacagattgaataattggttcctaattgcagtcatatatcttgattcttgcatggagtagtttcattcatgttacttcttccaaaatagaaagagcacagaagaaaatgcaactgcattactggaaaaatcatgtactgtactagtctctcaggcatgtgaagtttggaaaatgaataactaatcatactataatcaacaaagtttaggccacgtttaaaacagatttttacgtgatattgaggcagattatttacatgataaacacaataaatcgaaattttaataaatgaattccacaataatatactccctccgtcccaaaataagtgcagttttaacattgtttatgctcaacgtttaatcgttcgtcttatttgaaaaacaattatgattagtatttttattgttattagatgataatacatgaatagtactttatgtgtgactaatatttttaattttttttataaaatttttaaataagacaagacggtcaaaacactagacatggatatctatggctgcatttattttgagacggaggtagtatgtaatcttttaaaaaattactctcgtttaaaaaaagtccaattcatagtacgtttagtaaataaaaaatcggagaaaaaagggtcagattgcatcagagatcacagtatcgtcgtcacagtgactaaatgcagcagcagtcacagatgactagactaaatcaaagattaacagtagcagcagagtaaagagaggctttttttccttggaatcttccccctcactcctcgcaaatcccacgcgccttttcttcccacgtgcatctgtcagtgacacattactactaccacaactgcctcccaaaaaaagagagaaaaaaaagatgaactaatattcggagaataacctgtaaagaaaagagagagagaaaaaaaaagaaatggaaaaggaggcaggcgaattgctcaacggaagtacggtgaaagaaagagaagagcggttgccatcgccagccacagcagccgcggctactataatggtgggagagacaaactagagagagaaagaaaccaccaccgccccaagaagagagagagaggacgcgacggttgccaggaggaggcagccaacggcgctcgaggcaagaaacgacgcggccatggtgggcttgccttgggagtcgtgacgcgctgtgtttgctgccgttgagagatgaaggtagtatccaagaagcatcatcagcaaggaggagggacgacgacgatggaggagggcgccatggacggcgctggcggaggagtggcggaggaagggtgctccggggaggagagggagggagtcgccgacgtcgctgttggcggcggcggcggcgagggggagcgggaggggaggacgctggtggtgggcgtgcgggcggacgccgcgagccggacgctgctcacgtggacgttcatcaatgtcgccgcccccggcgaccgcatcgtcgccgtccacgtcgtgctcgcctccgcgcccgtggccgccgccaccaccgccgtcgacttcgacaccatgctcgccgtctacgagggcttctgcaatctcaagcaggtctagctccctctcccctcccttctctcgccctcgacttgccagtttgctcgccactttctaccaaccatgtccatccttctcttctgcttcatcttttttcttctcaattgtttggttgatttcaatctctcctttatttttggctgtttttgaaggattagatttttagcccatatccttacaatttttcacccatcctgcataaattatcccagttgcaacaaatattcagagagtggtttccgctaacttttgcagtaatgcgatttttttacctttatttatggctttccttctgcaattcacatacttcccgctcgttcccctctgcaaatcgcagtattttcgcagtaattgactgcttcagcaagctaactttggggtcttgtgttgtgcagatcaatctaaagctcaagatttgcaaggactcctcggtccgcaaggcgctagttcgtgaggccaacctgtttggggcatccaaggttatcgtcggcatcgccaagaagaagcgcgggatttcgtaagtgacattcgatccgcatccgctatcaaatctcatcaacttttatttttcacccaatgatgatatgattgatggccaactttcgttttttttgggggggattcgtcaggtccctgcactccgtcgccaaatactgctccaagaagctgccggccaagtgcgcggtgctcgccgtggacagcggcaagatcgtgttcaggagagaatccaatgtccactcaggcaaggtctccgcggagattcctggatgtggtgataatgagttgtattgcgaggtgccgttcctagcccgtcagtgtaaagaggaacctttacctttacatgaaccacccagagatggtggtggtagtgcgggcgaggaagaagaagagcacgatgttggcacaaaggagaccgagccggtgaatgccgtctccggtgaacagcagccttccggtgtggatcctgctgagttgtctccggatcaggttcagggtgatgttgatccatctgacaagggtgaagagtcgactgccgaccagaaagatgagatttctgagcttccgggtgagggtgctagtgttttgtactgtgtgttaccagagaggaatggccattcagctgcaagcacgtccagtcggcaatccaatgattcgaccgagccaccgactgaagggaatggggagctgtactgtattttgcccccaagaaatgatcattcaggcaggagtagcggtgattctagccgttcaactgcgagtcggaaacacgatgattctgccagtctgtctgctgaaggagatggtgaactgtactgccgattgccaaggactggccattcaggtagaagttctgggggatcaaagcgttccttcggtgcaaaaggtttgattaggcgcagcagtagtttctccagtgatattcaaaaggatgtctcagtttgcacgactacaactgaacagacttcgtccatggtatctacagaagctgaggattcaccaaagaacgctgcacgtgatgtcgatacaccctccagctctccaatgtctctaagaaggatgatagagggaaggcccgaccgctgtcgacttcgaaggaggatcttcaatcatcaaagaagctcatcttttgaatgggccaaaatttccatggttcagtgggcaatgaggcttccaagccgttatacttcagttgcagacaacaaatcatttaaatcagatgcaagtccaaggttgaattgtgattccgaatgtgaatccacttcagctgttgacacagaatctatgttttcgttctctttatatgatatatcatggcctccaaatgaagtggaatcgcttcaagagaagtactcttcaacgtgtaggctgtttacctatgaagagctgaaacttgctacgtcaaacttctcaccaggtaatgtcatttgggatgtgcattactttgattcacaggctttttggcaaagttgtctgctgattttcttttacaccaatgcagatatgttaattggaaagggaggaacaagccaagtttacaaggcacaactatttgatggcacattatcagctgtaaagattctgaaaccttcagttgatgcaatacaagagtttgttacagaggtggagattgcaaccagcttgcaacatgacaatattgtttcactaagaggattcagttctgataactacagtcttgtgttggtatatgattacatgctccagggaagcttagacaaagcacttcatggtaatccttaaaatgaaatactttgcatatttattccctgaccttattgatagctcatctcttactttgtgattgactggttgtaactgctcttcaggcaagcatgacagcaaggatagccttagctgggagaagagaaacaaaatagcaattggcatagcaaaggcacttgaatatctacatcatggaagtgtcacccaatctgtgattcatggagatgttaagtcttcgaatatcctcctctcagaggattttcaggcacaggtaaataaccataagagatttgcaaatactgaaatacctgaagcaattatagttttttcttcatacagtaaatatttttttcagatcaaagcaagtgctttaatgcgttagcagtgacgaattacattgagtatttggtagccttactagttaattttgattctgcttatgacatcatctcttttgaaatttccagctttgtgattttgggttggcaaagcaagtctcagcttcaaccccccacctaacatgtactgacatcacgggaacgtttgggtaagtaccatctctatgctatttttaccagctattgctacttttatcaagtgtgaaatgcctaagcaaactactcctgtgacagatacttggctcccgagtatttttcgcacgggaaggtcaatgagaagattgatgtctatgcatttggagttgtaattctggagattatttcaggaagaagacctattagaacaggatgttcaaagggtcaggaaagcctagttggatgggtgagtgatccttaaccccctatatgcctggctggcttgctctgagcagtaacatgccctgagccaagaacaaaatggtagttgcacgttcagtcactgttggaattaaagctgtctaggaccattgctgcattttttttgctctgttgaccacacaatcactcctgcacgagcgagttattaattattttttctttttgctaattctttgttgacggattcaggcaaagccattactatcaagtggggaaattaaacaattggttgatccattcttgggaaatgattatgactgtgatgaaatggagaggatgactctcgcagcttcgctgtgcacaaggacatcttctcattcccgacccgaaatgtcacaggtaagaacctgaacaaattacatgtacaaatacttaaaaagtcttgatgattgacctcaacttgctatgttctggcaacacagatgttgaaactgcttgaaggagacgacgagacgatccactgggcaagaacccaggtcaccgcgagcttcgacggatcggacgaggaggctgtggcggctcctgactcaaacatgcagtcacacctgaacctcgcgttgctgggcgtggaggatgacaccctctcgcactgcagcactgaacagaccatggacacttcagctgacgggtactggagccggtcatcgagcttcgactaacctcctgcttttttcttaaccaccatttgttctgattttgagccatgtgaatggggagctgtgtgtatagagtctctcaattctcataactttgctgctgctgttgtgtcgattggttggaatggtgaatgcaaattgaaaggaagtggatgatatgcacattcggatggcagatgtagtagcttaggaattgtggtagatctaaccctgctggcctttggccctacttggtaggagtatgtatcactgatgggcttcatggtgcatcaagatttgattcttttccaagttgcttttgttttgcttttcctctcagatgccatgccatgacaggctgcctgtctcagatgctcatctaacaccaccatttgatgaagaacatactacacatactgtatgtgtgaattggccagccacaccattagtagtaggtttctctctcactgagacatatgatgtaactgatcttgtcagctactgtacagcaaagatctggtttgcagttccaggtgtaaatgtaacatggcatgacgaaacgccgttcttgatgtactgttctcagtacaggaatggctgggccagttcagacaaaaccagagtctcatgaatacaggactgacaccgcatgctccctaccggagctctcttcgcatcaacacatgtgagccttgtctctctgtcaaactctgaagtttcaggacacctccaatacaaaggatgctactggggtaaacctaacacttgcaaattttgcatcattcagatatgactagcctgtggcccgtacgttgcaacggaaaacaaattgagtttctaacttattaaatcaattaataagcacttataagtaatactatgatttctttttattaaacaagtagatgattttaaaattcgggggaactaatagtatagagaggatttgttgaaacgtggtgcaatagtatagatcgtgggggtcagatatttctagtaggagtgctgtgaaaatggacatcatcaaactgagaagagtgttacaagatcatttgggcctcagttcactgggcggttggataacaattgggcctagctatttgcccatcatcaactgcaactgatctggcccaacctagtaaccggcccatgtcctctcaacaagacctccaaaaacaaagtcctcaggaagacaaaaacactagttcatatgattccagatagatatgttccggagtgatctctaggagaagcagcaaataatatgctattacctgttagtatcatgtatgatgtatccatttatttattattaagagttggtgcctagtattcctactatctaagataataagtatgctccagcgaacttgatctgagttatcggagcgatgacatttggagcacaagacaacaagcaaggcagcttgaaatatattcattactactacataaatatactgaatggcaccatcaaacagcttgttcctcgctggattgatcaactgatagcttcctatttgtcctcctctgcatcatgctcgtcattttgcagctaagtcctcacaaaaaagagagaggaactttccatcaaacagcccgtttggagactaaattgcaactctacagaacagttattatcggttgatcgggaatgaaccatatttacccattttaattgttacttcgtcctaaaatataatataagagatgctgtgcacgtaattatatgagaaaatctcttatattttaaaacagaggtaatatttagggctgattataatatatacaatgctaaactaaattttatataggatgagagttagaaacaataccatgttttactgaaacgatgctcggacggttggttgggaatttccgtcaccgttttaatcccgatcgtatatgttcaaatctgcgtatgcatcgaccgatccgcacattaattgtgattgtgtggacattctcaattctgactgccaaaatcacgcagcaccactacagtgaaccttctacttgactacttttatacatgcatggttgctaattgcatggtccgatctgtaagcagctagctgtaaacacgatcgttttatttattcaagagcgattagtgattaccagtactgctaatcactctcatcgactgtactgatgctgtcaacagccactgcaattaattttctcgctggtaattaacttgcatgtgcacgtcgcttgcctgtaaaaaatttccaagaaagcgaggtgccatgtgcaaataatggctttcgctgcacataaaaacgcaagaattaaacgtcgagtgatcaagctctggttggtgacgccaatggcgttggacgagtcgttcaagaggccgggcaccatcccgttcaagtgggagctccagccaggcgtcccgaagcagcaaccacaccacggcggcggcggcgccgccgtcggaagtagcagtgcatcttcttctccggcgccggcgccggcggcagcatcgacgctgctgctcccgccgaggctcctcgcgcctcctcctgcagccgcggcgtcccatggcggctgcgacacgggggcgaacattctcgcttcgacgacgacgccgtcgccttcgtcgtcgtctcaccggcggtccatgtctgcgcggttcacggcatcgctggtgctgccgttcacgcggccgcggcggggacggtcagccaattcaaaggacgaggacgacatagccttcacggtgctctatggcgacaagattgtgtaaatattcatactccctttatcccaaaatgtttgacgccgttgacttttttaaaaatatttgactgttcgtcttatttaaaaaaatttaaataataattaattcttttcctatcatttgatttattgttaaatatacttttatatatacatatagttttacatatttcacaaaagtttttgaataagacaaatggttaaacatactttaaaaagtcaacagcgtcaaacatttagggaagtaaggaatattttgggtctattttcaaaataaattttattaaaggtcgatttgtcagaatttcggctgttttgatgtatatatgtgctttacgtgtctaaattcatagaatagagagtactaaagtaagcactgagcactgaggcatcatttccttcatttcggtttcgaaaggaggttggaaagagacaattggagcattatgcatttaattacaaactctacactgcgtaattgccagagttaaatgagtgtgtagtgtactgtgacaataattgaacttttaaattgcagcactaaatagatcatattagtcattgctttggtgacgctgatgaatcagtagaacatagataatcctcagcacaacatggtagcatggcaatctgtttcaacacagattttcctaccttccccctctccccgcactggcatggtgttttgctaacacggctaagcgcctgaagagttggagtgaccgtcacatcggcagcgtccgtctccaactgcagatggcgaaggagaacgtcttccggtttgacgtcgcgcaagagaaccggtctctctccccctggagacttggttgcagcgggatttgaaactgaagtgccttgggctagcttgcctcgctcgagcccgctagcgttcgcgtctgatctggctcaaggagggtgacagaaacaccatgtttttccacctgcacgctagagcccgaaggcggaagaacttcatcacacgtcttcaagatggggaccaacttgccgtctcccacgatgagcttcaggagcttgcctcttctcactttggcgctatcttggggacgtctgttgagcgcgatttcgcccttgacctccactcccttggtctctgccctgcgcatcttggggggctggacaaccctttctcggaggaggaggtttgggcggtggtcaaggccttaccttctgacaaggcgcccggtccggatgggttcacgggccggttctacaagacttgctggtcggtgatcaagccagaggtcatggcggctctcaactccctctttctcgctaacggtcgggggttctcctccctcaatgataccctcatctcccttctgccaaagaaggacgaggctgttgacgtcaaggatttccgaccgattagccccatccacagctttgggaagttgttctccaagatcccggcttcccgtctctctcctcaccttggcgagcttgtggcgcccaatcagagtgcctcgtcaaaggccgatccctttcatgacaacttccgctatgttcagctcgcggccagggctctccacgccaagcatatcccccgcctccttcttaaggtggacatcgccaaggcttttgacacggtcagctggcagtttctacttgagatgctcgcccacctggggttcagtcagcgctggcgtgattggattttcctcattcttggtgcctcctcttcccgggtgctgatcaatggggtgccggggccttgtttcccggtcttcggcagggagatcctctctctcccatgctcttcattctggtcatggatgtgctcaatacgatgctccgcaaagcctccgagtcaggcgggttccttccgctcaacgaccatgcctccctctacgctgatgacttggttctcttcctctccccggttcgtcaggatctcgaattcatccagggtatcctctctatctttggtgcagcatccgggcttcgcactaactttgccaagtgttcggttactctgatccgctgttcggcggaggacctggacctggtgcagtcctgctttccccgctcaatctcagattttccctaatcctatctcggcattccgttgtccattcgcaaattgccgaaggcggccctgcaacctcttgtggacaaagtttcccatcgtcttccgccctggaagggacaactcaccactctggttagccgctctgtgctggtccagtctgttctctcctccattccggtccatgtgtctatggtgatcggtcttcccgcctggatgatcaaggccattaacaagaagcgccgcgccttcttgtggacgggtacagactcggctcatggagggtagtgccgggtgtcttggacgaatgtctgtcgtcccaaagctttcggtgggttaggaattcctgacctgaagttggcagggtttgccctgtgagttcgttggctttggctccaacactcagggaatccttactgggacggcctgaaagccccagccgagcgagccgtcactgacatgtttcaggcgtccaccttcttcgtgccgggtgatggtgagtcgattctcttctggtctgaccaatggatcggtggccgctctgttgcctccttggctccagatctcctcttcgttgtgcccccgcgtctgcgtggttcgcgcacggtttcttctggcctggcgaacaacgcttggatttctgacatccgcggggccctcactgtcccgggcatctcccagtttcttcttgtctaggacgcggtgcttcacttccaactttcaccgggtgtcggggatctgttgacgtaaaaatacgaggcctgggggatctacttaactccagtgcaggtccaaaactcgccttcgggtatgctagcgtgccagttgatttgatcctgcaatcaacaagaaacaaagacaaagaaaccgcggttaaatccataaacgatagccgatcggctaggtgccgatgacatatcatttatctttgagccgatgtcacatatgcatcgatcggcagtcataaataagtaaggaagaactaaatctactcgatcggctgtagatattaacaatatataatccccgtgtcgatatatacataaatcaagtgattgggatagattggtcgccatgccgagacaatataaatcacttagatcaaaatatatattaacaacaagactatatacgttcatagcatagccgatcagatagatctagcatgtatcggctaatattccgatacaactctatactaggatatcaaagcaaataggatatattaaacaaaggcctaatatacttaaatgcaacaagatcttaatataaatggcagatttaacatatcagcgaagcatatagagtaaatatagttaaatcaggtaagatcggctgaaaccccgatactaccctaatcggcaaccaagaagcaggctagagattgagattctaatcacgacttataagatcaaactcaactgatgcagctataagtatgaaaagaatgacaatatctagacaatcaagccattggaagtttcatagagtggtggatatcctatataatctaagtcaacatcgatatctaacctaatcggctgccctcttccgacagatgttagccgattataggttagatagcgatattgccggagattatgtaagatatatgataactcgacaaattacataaacaagattagagtatcataaagatggaagcactaatcccgagaacgcaagccaccataacaagttttacctcttgttgaagatcgaaaccgatgcagctcaacccgaaagcaagaactcgtcgaaacaagacgaaagtaaaaagggtggcgatgcgccgagattgtattgaacgtgtgttaatttgattacatggggctcggggtctatttatacccgagaattacaaaacatgtccatatcaaacacgactcttatctctaacaaactctaagataccataagtatttgcggcaaacttttgcccacacttatctctaaggaaattacataaaatatcctaattaatagatacaattgccttcttaggactctatccatgtgcggcaatcatcacgaagtgcatcaacctaaaccgacaacgtatgccatgtcatgctgtcagatttggctcaatcggctaacccatctgaccgaactctgccgatttcagtcgtagccgattcagattctagctgatccttactctgtttccggaatgatttcaatcttgattccttctcgatttcttcctcatctctgatccctggattagcaaatttggtcgttaacaggatcgtcttgtctggcgttggacgagtgaccagcgctactcggcgcattcggcgtaccaggcgttcttccttggccagcactcctttgcttgtgtcgatcttctcttgaacgcgaaaggccctgctaaatgcaaattcttcctctggtttgcattccagcagcgctgttggatggctgatctcctccaaaagcgtagcatcgatagccactcgacctgccccttttgcgctcaagagctcgagacagcgaaccacatcctcctcgactacgttttcgctcgtcaggtctggttacgggtgctgtcgcctcctggctggaatgccctctcgccccccgtggcagctggctccaggactggtggccatcttccaaggctggtttacctgatcacctccgtgccagcttcgactccctggtcctcctggtcttgtggcagctatggaaggaacataactccggggtgtttgactctgcgctctcttcggtctcagtggtcctagagtccatcctgtcggagggccggttgtggtcgttagcgggcgttgcttcctttagggacttgttgggagtgtagcatgactctgccccctcccgttgtttagagtagcgttcaagtttttctttttcttttttctcttcgttgttttttgactttgcgttttttccccttccttggcataagccggtctggccaattgcagtgtgtaacaaaaactctattcctctaatatattgacgtgcaatctttttgcgtgttcgcgaaaaaaaatcaacataaagaaaaactgatctgaagataagtcagccaacacattgttggtaacaaataaaatcacaaacgataagcctagatgcctggataggcagcaccagtggcaggtgaggtcttcaaaatagcaattggcatagcaaaggcacttgaatatctacataatggaagtatcacccaatctgtgattcatggagatgttaagtcttcgaatatcctcctctcagaggattttcaggcacaggtaaataatcacaagagatttgcaaatactgaaatacctgaagcaatctcagtacagtaaatatttattttcagatcaaagcaagtgtcttaatgcgttagcagtgacgaattgcattgagtatttggtagccttactagttaattttgattctgcttatgacatcatctcttttgaaatttccagctttgtgattttgggttggcaaagcaagtgtcagcttcaactccccgcctaacatgtactgacatcacgggaacttttgggtaagtaccatctctatgctatttttacctgctattgctacttttgtcaagtgtgaaatgcctaagcaaactactccagtgacagatacttggctcccgagtatttttcgcacgggaaggtcaatgagaaaattgatgtctatgcatttggagttgtaattctggttctggagattatttcaggaagaagacatattagaacaggatgtgcaaagggtcaggaaagcctggttggatgggtgagtgatccttaaccccatatatgcctagctggcttgctctgagcagtaacatgccctgagccaagaacaaaatggtagttgcacgttcacgcactgttggaattttttgctgcattttttgctctgttgaccacacaagcactcttgcacgagcaagttattaattattttttctttttgctaattctatgttgacggtttcaggcaaagccattactatcaagtggggaaattaaacaattggttgatccattcttgggaaatgattatgactgtgacgaaatggagaggatgatgttggattaggcctccattctttagctgatgactgactcttgcagccttgctatgcacaaggacatcttctcattcccgaccggaaatgtcacaggtaagaacctgaacaaattacatgtgcaaaatacttaaaaaatgtcttgatgattgacctcaacttgctatgttctggcaacacagattttgaaactgcttgaaggagatgacgaaacgatccactgaccactgggcaaggtcccacgtcaccgcgagcttcgacggatcagacgaggaggctgtggcggctcctgactcaaacatgcagtcacacctgaacctcgcgttgctgggcgtggaggatgacaccctctcgcactgcagcactgaacagaccatggacacttcagctgacgggtactggagccggtcatcgagcttcgactaacctcctgctacttttttcttaaccaccatttgtgatttgttctgattttgagccatgtgaatgggagctgtgtatagagtctctcaattctcatacctttgctactgctgttgttgtgtcgattggttggaatggtgaatggaaagaaagtggattggaggatgatatgcacattcagatggcagaaggcagatgtagtagcttaggaattgtggtagatctaaccctactggcctttggccctacttggtatgtagcactgatgggcttcatggtgcatcaagatttgttttgcagccaaatgaacagactcggcacactattttcgcaaataatttattacttgctgaaaaatccaaaaggtgaggatttgatgtggaaaagaaaaggcaagtttataaatttggctgcaaaagtacaaagtttgtattccaaatggtttactatttttgcagccaaactcgaaatgaagcttagcaatactgcaagtttagatttcatagagtaaatggtttactatttattttgagggatgatggtttactcaggcaccagtaatacaaagtttgtgaattgtgaaggaaatccaagaagaatagggattagggaacttgtctatcccctcaaccagtccctccctgtccctcgtcctattacccaaatgaacatcaccatagttgatacatagttgagaggtgagaacttgtgcgaatggaaatgttggtagttccatactaaagtacagatcaaaatccccattgcatcagttgcatgccaaagatcgatggcggtacttaaaccctaataatcctcctcgagcagactgaatcaccagacaagagagcgataatccactaaaattgccagtttagtagataactgcaagctaggaacggagcacggctacaagaagcaaaatcgatgaagaaaccaagagagcaggcctaaacctagggtggttatgggtagagaagaagaggaaaagggatgaacggtcttggaggcgtcggcgaggacggcggaggtgtccactccgtcgaggttcacgttggtggaacacgttgaggcaaggcatctttccttctccgattccgaatccctcgtcatcgtttccctcctcttaattcctgctgcagaaaaactaacctacggtatcccgtccgggggagtggggacgggatacataatgagctctcatcgtccttatccgtccgcatccttttccaccttactcaatccccaatctccctgtcgcttttctagttgcccatacgcctctcatccaccaccgctcttctccttcctctcctcttcttccggcaccgcccttctccttcctcccctcttcttccttacttggctggaagcctgaaaataggttgtgctcctttctcttgctcacctaccctcctgctctgtcccccctcaccatcaaagagtcaaggagggcgctgccaatatcagatctggagatacctagggcctttccatcattggatccgcttgagccatgtcagtgatgaggtgatggatcgcactagcccccgtggcctccacctcggtgtcatgccgttggggaggatgccgatcgatgcgaatcctcctcccacgctactgttagtggtgatggaggggaaacaaatgaaggtgctagatctgaagtttcgattgacaatcgacgtggtgctgcagacattggctgcttgttgacattgtgcgcaggtatgtcgtgtgtgcggcatatcaccatggcttagctggtacctacaagtaccaggcacggtacctgtggtaatgtggtatcatggttgatacctacacagggctggtacctgtggtatcatggttgatacctacaggtactagacctggtgccaatggtatcatggttgatacctacaggtttcagatctggtacctgtggtatcatggttgatacctacaggtttcagacctggtacctatggtatcatggttgatgtctcgggtaccagctgatacctataggtgctaaccgataacccataggtactaagtacgaggtatcaaggtatcgggagagaacgtacgttgttgcctcttggctgggtggtgagccatctaccaccagcgttttgtctcgtcttctcccttccattcctttcactatcaccatcctttttcttctcaatgtggtgttgatacaagggtcatcatgctattgcagggaccaactttgtcacctaatccactattagtgtcgtgtccttctcctagcgcctcacgcgtgctcttccaccggctgtggcgtgagcgtgtagggcggtgctaagtcgtggactcatgagtggataaagctgaggcggagctgacatcatcaatataaagtatcttgtttggacgggataccgtaccctagcagacctcttactgctgctgctgtgcctctactcccctcccctccgctctatccattccaaccgcgcacagtattattgggcctggcttggagcttattgggcctctagctatgattacaactggcccatagctttcctgtgcaattggtctgcatcttcgtatatgttgatgctggcatgctgccgatccttaccaatatatatatatatatatatatatatatatatatatatatatatatatatatatatatatatatatatatatatatatatgaatcgaatacatataactagatatatactcacaatttgaaaattttgaaaaaattgggcgaatttgtgtattgccccatatgagtgtcctatatatatatatgtaatatatatatatatatatatatatatataactggtgctacatggagtatgggctccaagattcaaattgagtatatacccaatttgaatgagtatgaaatttttttaaatgtttagatatgaacattaacttctttactaacaagtttgaactgagtttgaactttttttttgttagattttggttctaggtatataacatccaaacatataattcgttaggtatataataatgaattgtgaaataaagttgagtttgagttgttttgttgttaggtatttgtatgaatcgaattcatacaaatgaatttgagtttgagttgttttgataccatggtgcccgggcaccatggtgccccatatgggtattatatatatagtagttttgacgaagtcgcggctgacatgagcctgacgaatggcgtgagagctcctcgccctctgcagcatcatcgacgcccctccatcggctgcggtgaagaggatggtacgcctcgccatgaagaccccggtgcaacgcctggccaaggccaaacgaagcatctccttgggcagcaaggccatggcgcgccatggccttgctgcggttgctcgaaggcgcgcgctcgtggcggcggctagggtttaggctcgagggggaggagagcaacgaggaaaaaagagatatcccgtccgtatatatatgggtgccaacttcacgggccagactgggccgtctgtatcttctgtcttcgactgggccgcttttcccagcaaattcccctcgtttcctaaaaggaataagttcactttgactcccttaactagtgacaaaatctgattcataaccttgaaccacaactattaaaagggtgtaacttgactccctcgacggtcttagagagtgattttgcttatgtggcgcctaggtggcggtgttgaccttgtcttagttacacgtggcgttgatgtggcgcttatgtgtcattaaaattaaaaatatatgtgtgggacccatttgtcatcttctctcattcccttcttcctcatccctctctcttccttctccctctcttgtgcttcaatagggaaattttatgctaagctaacgaccttaaccaggtatgagcagggaccggatcgacggcggcggcggcgggttacgaccaccaccaagccgataaggaggaggacgacgactacggttgtgactacctctttaggtcatccgttgcgacaaggatgatctcatctcgcggttcatggacgtcgccatgtgcgacagtcgagacgctgccactatcacctcaactcttgacgacagcctcaacgaagtcgttggcctttacttcgcggccgctgcggagaaactcatccgcccgtccttcgtgaggctgagtggccaccgtcctagacgctgatcgccgccccttgttcgactgcagcccggtgagagctcgccaccatccaccgctgctactaccctcgtcctcctgctgccgtgagcctccatgaggctgagccaccaccgtcctccttggctctgtcgtcctagccgcacgaccgcgacccttggttctgctgtgtcctagtggaagctcgcctccaaccgccgccgctccgctattccttctgctgccattgatctggtccccgctcccccacgtactccctccatcccaaaaaacacaacctaggatgggatgggacatattcatattctagtacaacgtatctggacatagatacgttatactagattatgtcccatcccatcctaggttgtgttttttttaggacggagggagtaggtctgaaggggaagagaaaggggatagaaaaatgaggagagaggagggaagaggaagaaaggaaggagagaggattatatgtgggccccacatgttagtgtgtcccacaatattttgtagtgtgaatgataaatgtgtcacacatatatattttagttctaatgtcatataatcgctacatcaatgccacgtagaacaatgaccaggtcaacaccatcacataggcaccacgtcagcgaaaccatcctccaaaactaccgagagagttatattgcaccgattttaacaattgaggcgtcaacatattcggtattgtggtttaggaatatgaattagatttggccacaagttaagagagtcgaagtgaacttattccttcctaaaataaaacgatcgtcgatttgtatggtttataccttttgctcaagcatcatctacatacagaagtattttttttcttttttttcctttaagttcagtatagtatagtgttgattcagcgttcagttgcatcatttcatttcgctttaccagttaagattgtcgatgcctgttctgcaaatattgagcaaacagtgaaacaaacgccatatttaccatcccacgttctgaggaacgccaacaatacatggaaaagttgctagtacaaatcaaacatcttgcacatattagacgtgcagtgatatactaacaggataattatgcctttgattccacagtagccaaaatggcgagcaccagcaaattaaaaggcagtaaaataaaagagaaaatagtgtgagtagttaaagtggtcctccaagttttatccgagactcagtttaatccttgatgttttaatctatccatattagttcttcaggttttcattttagttcaaacttatccttagacccacttagaagccatatggctaaacataaccaacaactctcttgataaatgacacttatatcccccatttacatatataagagaaaaaattacatgcaatgggtttttttatagataatacatagtaatttatgtaaagcaaaaataaattatgtacttgcaagtgtatatgatagctattgtttaagttttatgtgcacatattgaaataatgggaattacatatgcaatgttgtttattcatcttgattttctctttttctagtgtatacttgtatacaaattaagggcaaaagggacattttctaatataaatattgactagaaatagtcatatagaatattatgttgggccaagatgattttaagccaaaataaatacttaggggatatatgtggacaaaataaaatatagagaaccaaattgtgcctccagtgaaaattgaggactaatctagctattcacccaaaataaaacccaacttttccagtcaaaatacagcagtatctgaaggcactaacattggctagagaacaaggccgtgtttagttccaaaataatttttcaatctttcaacttttccatcacatcaaaacttttctacacatataaactttcaattttttcgtcacgtcgttccaatttcaaccaaacttttttaattttaatgtgaaactaaacacagcccaagaaaattttgaaattgcaagtcaatctgctgcggagagcggggtcgtctcgcctgccatcctggtgtctagctctactggcatcgcgtttctggataagaggccatgtttaattccaaaaaaaaaacttcacgctgacacatcgaatatttgatacatacatgaagtatttaatataggaaaaaaatcaattatacatattgcgtgtaaattgcgagacgaatcttttaagtctaattgcgccatgatttgacaatgtgatgctacaataaatatatgctaatgacgaattaattaggcttaataaactcgtctcatagtttactggcagaatatgtaatttatttttgttattaaactacgtttaatattttaaatatgtatccgtatattcgatatgacaattaaacacgaaaattttctccaactaaacgaggtataaatacacagagcacaatctaccctatgccccttgattttgcttgacggaggtcgccagaatatgttaatgagatcttcaggaccctgttcaggaaaaaaaaaagttctcaactgcaggaaaaacaaagcttcctgtccatactcgaagactcatgaaatgatacatacccgtgcagcggttactacgaaattgaagagaataagggcctcatcgaatggctatatgcagaaaatttggcatattagcaaaataaaataatttgtgattaaaatttttacatttatgtttgtaacgacttaaatcataatattgtaaaagaaaactatgataaaaaaatcaaatataaatttaaaattaagtttaaaaaattaaattttgacattggtatatgttgattgggccaaaagatgagagccttacataggagccaatcaccagaaggaacagcagatcaaaagtaacacttgcaccctgcgaattggagaaacaagtcaaagaatgtatgaggttatttcaatgtgttgatatcttacggaagtccctttgaaatgaattatctcttactggtaagcaattcgtaaaggaatgcattagcagaatattataatatgaaacaagaagtcacaaagcagggcatatgctttccaaaataagcttaggtcctatttagaccctggcaaaatttttcgccttatcacatcaaatgttatgacacataaatagggtattaaatataaaaaaaaactaactaaacagattgcgtgtaaattatgaaatgaatcttttaagcctaattgttctatgatccgacaatgtggtgctacagtaaacatttgctaatgacgaattaattaggcttaataaattcgtctcaaagtttacaggcggattctataatttgatttgttattagtctacgtttaatactttaaatatgtatccgtatattcaatgtgacacgccaaaattttatacctatggatctaaatacagccttattagaccattccgttgtgagatttgattattctacccaaactgaacaaatgacacaaagcttacacgcttacctgatatgggcgacacttcggtgcatagtataatactaccggtagaactaatctgaaccctttatttttatttaaggataggctagcaaaagtgcccgtacgttgcaccgggaagcgcatatatcaaaaaaatatacaattaattaaaatacaaattcactgaaatatttggtatttttaagtaggtatgtgtataattaaataaatttacaagtaaagcaagtgtgagaaataaaatgacattgttaaatttaattttattaaattctcaatgattagttacgctctttgaaattttattagaattttcagagcttaattgctaattttaataatacaaacatcatttaataattatttaattggaaaaagaaagaaaatcctttcttttaggtttgcttagaaataaacacattcaataattgtaaatgcttctgaaggcccgagggacctaatatagacttatttccgtcccttgccggtcggcccacggccttatcaaaacccgaatccaaaaagcagagtcgccgcttcctcatccgcgactccggccaacggttgcgcttgtaggagtatatcgcgttcccttccgccgacggcgaaactctccggcgccccctctccttccgttcctcttcgcctcctccattaatcggcgtcaacccacttctccgccgtgtgtgcgtacgtgcaggagcgactgctgtggagagcgcgactccggccgctggcgttggatgcgcgcgcagtgccttccgcgtgcgcccgatttgcgtcggcagcgcccacttcggaggccgctctgacgaattccggcgccgccttcacgatccccgtccgcgtgcggccgagacctgcggcggcgccaacctcggaggccgattcgttccattcctgtgcaagtctcgtgcgcacgacgagtactgcgaagaacaacccttgccatcacatcctcaggtttgctgtccggttttttattgatttgccttatattcgtttaacattgtttacctgctaagataattgcaaggccaacagtgagttgcttgggattagctctgcatttttaggtgaaggaaatctgtgtttcatttgagaacaattaatcccaaactttggttgcagcatgtagcgatggtagttttatagtatattagttttggcagtctgatcacagtgtgtattgaaaatatttggttaaatttttcaccaattaacgttccatttttttttcacaaattcttattttcaacccaagttcatgttcgaatagcaatgtagtgtgagcataaatccttggtaatgagcagacatttgttttcttcttatgcacgaactgattcagtttctatgcttagatagctctgaaaagacctatatatgatcaattgtgatgtacactgggatattataccttgattcttttattaaccttatttaagaaactatatatgataaagatttagacaggggacactttgtgaaggatgcaatttcagtcatctcaagtattgagcttcagttgtgatgtatcctcaagccataaatgatgttactttgctaacagtatctgggggcggacgctccaggcagtgaagctgggactgggagcagccgccggcgaatgcttctccaagagcaccaagattcacagatcgtagtggttctggaaaaaaaaagtcctatatggcgaatgtctgaagctagtggttgatggaaaacaacagtcctatgtgtgaagctggtgagaatattcagagatgctcgtgtatagattattatcagttagtactctgtttgtgatctatttactccctccgtccaaaaaaaaaaactcaaccaaggaaaggagtgttttttgggatggatggagtattatgcaaggtaagggcttgtttagttggtgaaataaaaatttttggatgtcacatcagacgtttaaccagatgttggaaggggttttcggacacgaatgaaaaaactaatttcataactcgcctggaaaccgcgagatgaatcttttgagcctaattaaaccgttattagcacatgtgggttactatagcatttatagctaattatggactaattaggctcaaaagatttgtctcgtgatttacatgcaaactgtgcaattagttttttatctatatttaatgctctatacatgtgtccaaagattcggtgtgatgttttttacgaaaagtttttagggaactaaacatgtcctaaatggtatgatctgtaattgtaagcgagatgcttgttcatttccacgtttcggcttgcaaaatgagatagtgctgaacatgccctgtggactgtgtttgactgtgattgtcctgcacctgaaaatggtggaacctcccggaatatgcatatttttaactgtacgtggagttctcatatttacacgcccattctttagaacacaggttaataacggcaaggctgctacatgctcaaactgacagcggttgacagatctatcaatactacgtaataagatggctgcgatcctgttcgttcctcttgtcaaaatttgtgtactgcttactgtatcagtataaccaccagaaaagatggtttcatttaagaaacatgagctctgcactctacagctgaacatatcgattccatttaagagcaaggctaataatacaaccgacttgttggctataaggccattcctaacacaatgactaggatagtatccatagcattaaataaattatcacctaggatgaaaaatgatgtggcaagtgaataaatgaggaaagagaaggaaaccatgtcttgtatgagacatggtttctacacaacatccaatacatcatgtgagataagtagtattaaatttaagtatggaatagtggtgtttgtattggaagggtagtgtctagtactagttttttgatgatgtgaagtttatggaaaccatgtctagtgtcttggggttgggaatggcctaaggtttttttcagccttctcttagcccacacatataatagttagctatttacaattaatatatgaccac

SEQ ID NO: 8364 - DNA, 18503 bp, Oryza sativa
taagctccatggaaggaagaacattggtaggatgcattagctacctgctttatctgcatggatccaatgtcgccctggccgtcctcgaactcgaccagcagtgacagccagaagttcgtcgagccctcgtttacacggaaggctatgttcttcccgccgtacttgcacgcagtcctggtatatttgaacactgcactggtcagtttcgtcgaaaagaaacacaaaatttcggggttcgtactaactgttagttgaatggacggtacacgtggcatgcgacagcttttctatgatcaggtagactgatgaacggagaagcagcattggcaaaggaattatagacaagaggttaaatgccatttggatatctgttgctctgactgagttatatcaagcagagctgcagaggcatgtgtaactcagcagcaggcagatctaaataaggagctgagctagcacattcaactctggacgattttaattccctgtatgcgcgtaggcaaatcactgtgctagaaaaaaaatttcaggcaggggtccagtgaccatgcatttactttgcctgtggtctctcctaataacctactgtagatgcatagctaggggggaggttgtagatacacatcgtaacgggccaagtgttatggccgctgctcatctctccaaaaggattcatgccatccgtaagaatcgggttacgttgttgcatgctgctcaccttctgtagacgaccgacagctggcctcggtctcgcaggtggccgccggcgccggcgaccgccatcctgctgaatgcggcgccgctgaggtcgaagtgcgtgcggccgaaggcgcacagcccgccggggcactcgtcggtgacgatgaccgtgacggcgcggcgggagcagatgccgtggtcgaggcacttcaccttgtagcaggcgccgcagccctcgccgtccttgaacagcaccgggctcaccgaccccacccgcgccttcatcggcaccacgtccaccagcgatccatacccacacgccccgcctgaaaaatatgacaagaaaaacgttttgctttggttgaacccaacaaagaaattatcgccaatggcaatgccaaattgcactatactagattgtagcgtgcaagaactggacggacgccaactgtttggccgtaatcagtgatcacagagtcaagcatgtggttacagaggaaaaacagtagtagtactacaacggaaacagtcaagtcagagcatcaaagcttaattacagaacacagagcaacttgctgtaaacagggcgaatcagtggtggaggaatcacaggttgtactgttccgttgcggtacgacgacaaaactgtaggtagtctaatgcaagatgttgtgactgcaaagcgtaaatggcagtaaaaaaacttcacttgtactactgattcgctggattttactcgtaacaggagtactatatttaccagcagtgtcggtggagggacgagtgacgagcaattgagtgcatttatcgtgaatatctcagccgttggtaccgagtaaaaatcgcggggagttattggaagacctgacacggtcttgctggttgctgggctgaacgcactgaaagcctcgcagcacgaatcgtaaagcgccggagcgactcgatgattgacgcgagtacacggtgtgtagcgggggcccgccgaaattccttccggatctcacgcgatccgcggacgccggaggtcgcgccaaaaatgccgtaacgggcggaatcattgtccccgggaggagaatgatggaaaaactaagtgcatgttcacttcgatgtcaaaaaaaaaatcttactaaattgacaacttgctaaaattttagtaggattttttatatagttataaaaatttggcagcaaactaaatgtagctatttttttttataattttaccaaaatttgatttgactaaaaatggcataaagtgaacagccgcccgatgcaaatgtgacggatgcgaacacaataatcctcctacttattttacaggtatctattcctaattatcagctcagtgaaaaaaaaatgcgaggtacagtactactacgaaatacagtactgattcctgcgtatttgctcatatggtatatgcttccaattaaatgctacaggaaccagtatgctttggtactctctactgaactgtgaggagctgaaaatggagagacgagttcagagagtttaccggtgctgccgtcgccttcggcgtcgccgtaccacgtcgcggtcgccggccgccactccatgtcgaccgccgccgcagccgccgcggacttggacttcccgccgtcgaacaagaacgaggcggagatggggggcgcgagcagcagcaacagcagcagaacgcagagcgagaaggagcgcgaggaggcagccgccattgttgggtgtgggtgtggttcccctttcctccccttctcgcactccccctccactcgctagcactgcggctgcggctgcggctgcggcggcttggagttgggagagttggtaggcttcgttttggggagctttccccttttatggcttcgagaaatcccaagccccaatgcgcggcagagatcagaggaatgggtcgctctcgcttgggcgcttggctggctagctggctcttctgtacaaatggcaatgcagggtttagcgggcaggggggctctgggcgtgtgtagtgtaccacagtggtggcctgatttataatggaaagctggaaaagaaataaccggcgagctgcgaggtgtgcaagtgcaactgctgtgctgagacctctcgctccatatgggtgtgggtgtccagtgaccagtgtgtggatgggcagtggaagtgtggaagtggaaccccctgcccgcttgtgaagctagccgtgatgaatagccttgaccttttttcaggaagagaaccgtggagagagagaaggggccggggaaaggcactgatgactgagcttgtattattgcgtagctatactagaccgttcttttcttcccattactacagtgtgtttttctcgtgtaccactatcgttacaagcactgtaaaacaagcatggccgtggcttttctcgtcacgctttgtcgccccggacactccgggcagtgggcaggcaggcagcgggcagctcctctcgtctcgccccatgtgcgcgcgacgtgctgggtgaccgggtcgggcagaccgttgatgtgcgtgacccaccgtgcgtgctgcatcgggttcgcttgaccgttgccgttttcacgtcactactcaacggcacaacacgcgccacaggaagacagtaccagactagcagttgtatttttaacagtagttaggactggtttagtttgagagctaaattaggaatttcaatatttgttaattttaatagtgtttagtatctatttgatttgaagctaaattttagcatatataagaaaatagaccattttaatagtaaacttatacaattttgccttaccaaaattagttatgtcaaaatttactaaaatttagcattgacaaaatttgataagacctatttagactacaaaccaaaccaacccttacggccctcttttacaacgtgggagtgggatcgcggtgacaccgtatgtattcgcggccgtatttttagttggtcgttggcttttgcagccttttccctccggtgaacgtggaggcgaacgtgtccgactgttcgttggcgccagacagctcctcactccacaagaagtcaggaatgatctaccgaggctgagcactaagctcgctgttcgtgatgtgtaatctccgttgattttccgttgtctattcctccagcttagtacgcgtcaagcagggcttatttaagaacgagcgagaatctgtcattctgtctttgaagccgtcacgttctttgattttacggcacgaaacaaatgatctgcccaagaacgagcacctctcactctctgttaaacgatgatggagtacattgcgtgtcaaagcgtggaagcctaaagcggcgggaagggaaggaaggtacacagcctacgctgagtggtgatccagaaaaaaatagcagtagggtacttcctctcccatctacatatgataaaaaattttagtgggatcttcgtagaggctcttattatctttacattaatagtgggggctcgagactctgccgcccccaatgctggatccgcccaggtgaagcagatggatgcctttctggtctcgagtccaggctagcagagggtacaagtacaacagccaaggggtctgtctgttcatacgcaacgagagatccgatacaatcgcacttcttcgcttccgttctagggacgggtaaactagtgcaaagtgcggcagctgcatgcaactgcaagagagaatctcgatccttggtcaatgaccgggttggagaccgttccgaaaagctccaagagggagtgacagacgtcgcggcctccgtcgcacgtggaacaaagcaaaaggacacacgagaacctgtgctacaaggtgagagtatatacacggcccaaaagataaacaagacttcctgctggatcggcccattttcagagccttcggcccaccatagactccctgtcatccgcgaccagccaccagccgcgagccgccgcctcggctccgccgccttgctccgtgctccagtgctccgctcctcctcccttcgcccctacggctctcggcggtgatcctcacggcatcggcgcctttccatcgcctgcggctggccccgcggagcgcgggtagggcgctcggcagctcgctcgacgccgttgcgccgaccggtggtgccggctcgtcctcggcgccggcggcttgggctcccgcgcaccctccttcgtcggcacaacggcagaaaacgaagctacagaggtgaaatgaatccccagtccgctgttcttactattcgatttaccagctgttgattttttaatctatattgctgaacatgaacctgaatgtactgtctcttgtaaaatcagttctctgtttaccttgcgtttagcaggagtggacttgatacaaagacacacttattagtagtgaaaatgctatattgtgttttcacttatttaaataagttttgtgataaatcttactgtactaattggtctcccacccgtaaaccttgcagatacgttggttggtatcttggtgaattcagggtttattgctgattaggagaaattccttgttgaatatgtcagagactcacgagaaagataagcaatttgagaaagaaggagaagaaggggaagaggaagagtatgtcttgcttgagttggatgattgtctttattccgacgtgcaaccaaatgcttcatatgtgctctctgtaagttcatccttctccaaatcagtggcataatggaacagatggcatgttttgagtttacaatttttttttctctgaatgttagattttatagatgttagggcctggggtaatgtaatatctagagatggctctaaaatcaaacatcaaggaagaggttgcttatttcgcaaaagaaaaacaaagagcctggttgatatttgctgaagagaggaatgtgtatgggcatatagctggagtagtgagcttgatgctgattacctaatactccatccgtcccaaaatataagaacatagtatgggacatttcctagtactacgaatctggacaggttgatgttccatctggtactaggtttttatattttgggacggagggagtagaactcttgccattagtttgagaaagatttaaactaaaattcctaggaactaaatttcatggaagcgcaaaaggataaagattcataagtttcatttattttcagaaataggaactgaacttagttcagttggttgacttgaacttgggtgccttgtctattaaattgatactaagtttctccttaatatccatcacttgtttcatgtgtttttagcaaccttcgttggcatatatgttcagaattcttcaaagtcctttctgctggcaattggtattagtttcagctacaaactacatagagcttctagtgtgtgttatttagccgttcgattcccagcaatttagagactttgcacttttgtatcatgatttatggacgtgcaaacaccaatgttttcacatgctcatatctattttaaaatgtttgttcagttcatttatgtatacttaacaagtttggtcatgttttccagggtctggatacattgactcctaccttgatactaggtgatggcctgaaaatggtgagtactttattagtttagtttctcttttatcgcttgacttcttgtttgatcatgcccctgagatgtggagtatggacttgttgatagtgatcgagatcctttgtgccctagattcattacagccatacattgcctgtaagttcttgcgagtatgcactaatgtgtcatggttcaagctttacctgagattatactagaaaatcagcgcgcctgttggcgtgcttactatatgaccatcatgtgtttattttatatgcccattagtcaatggcacatacatatgttttagtgaaataagttgatttttttgaattttctacaggagcttcaaagaacctcttaatgtgttttagctttcaatgtaatctgtatcttataatattgtagtgaagtacttgaaaacagaacataatatttccttttttctaatgctacttttcctcatctatttattttttattagtgaccaaattaatgaacctgtaaaggagtaagatggaaaatacataaatatatatttagtgcataatcagatcactgagctagttgggtattgaaacaaccgatgaagaataagagagcagacttctatttcattctagttcagatttgagaaagttctagacttccctttcttaacctcttccctctgtttttggtgcagcacaaatgagtttttcatttctttttttttctattagtaattgcttgatttatctcagtttttatagtgccatgtggtccaatcacaatctggtaaaactgccggcttgagaataataagattcaaaaaatatactccttccatactcataaaggaagtcgtttaggacaatgtttaagtcaaaccttgggaatataaatcatgaataactctcaagattatatgaggtttgaaaatataaaaattatatgaatagatttgtcttgaaaaatactttcataaaagtatacatatatcacttttcaataaatatttttatagaaaaaagaagtcaaagttgtgttttggagaccgtgtctctgtcctaaacgacttcctttacgagtatggagagagtatatttcaatacctcctacacgatcaaaagttagaacatgtttaactcttgttattggaaactgtctatgaagtaatattcgttaggaaaacaggtaatactgtactcgtgtatcttagagtcctgacaggacaaggtggacatatgacacatttgaataccatacgttatttgttgtagcttcagtgacaacgtacaacaatcaatgcattagactaaaaatatcaggttgacgctgattgctttgcatctgctcaggagactcgattgggtttttttttcctctgctaactttgacttctaaaataattggtttgaagattagcggtctgtactttgggtttcaaattataaacctgtttgctcattgaaacactaaacctccttgctgagctagctgtccgttaatgattgtttaatgacagattggagaataccaagagactattggcacatgctatttgttctcagaaacaagtaagttcttttattcaaaccattacccccttttcttcttttttgtaaattaaccggccttagatgccattaactagtatattgatttgatacctgtgaagatgctgttgttgacatgatatttcctgaagattttagatggtagctttataatttatacacggtcctacttgcacctcgtgttctaaacccccattagtgaatcctctattaggatatggttgaatcaaaagaactttatatatatatatatatatgttttgaccttgtcatcaggcagtttaatcaatgtttattaggacctaggagccccttgttgcagatagtgtaaagaaaacttctctttcatctaatgctgtttttacagctaattcgttcaatgttctaatccctttttattgtcagatgctccaccaaaacccattcacggtgagatggcacctcctgaagaaaacaaggacaagcaagccagctgtagcaaggaagtgccatcaaaggaggtgaagcatctcgcaagcgttcagaagatcctcaaatttcgctctatcaatgcggatcatgagcagcgtagagcctacagggataatgagagagaaatttgaaacagaacttgtagcgttttttttttctcatcaccaacttgtacagtatttatgctcatctcactgtggtcctctaatattattctcatcttactgtgacgctgtctagcttggtttagcttggaaagttgcaatatatgcgaaactcttttgcctcactgtaaacatctgagaggcttaaaaaaatcgagcatcatggtggacaaaagagcgaggctgtttttctgtttcttaactcttataaaggagtttagggtgtgtttagttcacgtcaaaattagaagtttagttaaaattagaacaatgtgacagaaaagttgaaagtttatatgggtaggaaagttttgatgtgatggaaaaattaaaagtttaaagaaaaagttgagaaataaaccaggctttactgctgcatgctatccagcacttccctccaattcttttttaccctcgtcgtgcgcaacgaaacggatctgaactgaacctccacaaagtctttaaacatttcgatgcgaatctgcacccgtaccacttgcagcatagaaaatccatggccatggccgccgcgaacgtggagaagactctaaaataaacgtgaaagtccaggcatatgcattcgggctctccttcattacatctgaacgggtgcagagcgcgcagcgaagcaatgctgcagctgcttgccacaacatcaacgcccctttcccctgtcaagatgaggccggcggcggcggcaatggcgacgaagagcgagtaccggaggatggaggcggaggaggaggaggagctggacaaggaggagtgggcgcgcagggcggaggcgcagcgccgcaggcgtcggagcggcgggagatacgtcttcacctgcgcgctcttcgcgtcgctcaacgccatcctcctcggttacggtcagtctccctctcctgctcgatcgatctcacctcctccttgttcttctttctcctggctcctgccatgattccaagcttccaactccaagcttcagcagttcctcttaaaaaaaaagctttgcgtgatcgagttaaacgcttgaatcatgcgaaacttgtggcgacgcgaggacacgaacttccagatgggccaaaaaacttgccagttggttgcctggttacattccaagtgtgttgggagttttatttctcgtcggttaggtacgtgtacattgtacagtgtactgagatagttatatatatgcgagcatgctgtttgcaactttgcaaggaaatgtcggttgctacaaagtgttaggcagacgaataggagcctgtgatatgaatgatattgttgatgtagttacatggaactttctgtgatttttcgtcgtcgtactcaaggattgattagtccaaaccaccatgtctttgcttaaacttgtaggaaagtgacacctacaaattgtactatactactgttagttctgttgctgatttacacatttacaacagattttttaggtcaggttacaccaaattaaagaatttagaccacttccgagccatccatcttccacgataaaagaatcttaaacacaacccagatagttttttctacgctctaaatcactccattctccagtaacacatcactctcatggtcgatagaatagtcatatacggtaggagcgtccggacacgtagctcgtccaagtccagctcccgaatttttcctgtcaaaaccgagtggttgaccctgacaaaaccaacagaaatgttgatcaaaccatgaggaaatccacaaatttatttggagccctcgagcaacccacaagaaacgaagttggattcaccagaccgttccgagaaaaaaaacagggagttaacgttttgtcagtttcaattcgggaagtccaatttttggcaaaaaaaaaacaaaacaaaacggtttttattggttttgtaaaccctggttctccttctatactactctctcgttacataatataaagatttttagggttaaataaaataggtagaattaaataggggaaaattgttattgattgaaaagtggaggtatatgataaaattgaatggtggagggttgtgattggtttagaagagaatgttggtgaagaagtagttatattttggcacaaatcttaaggactagaagttattatattttgagatggagggagtagttgataccccgcgctttgctacatgatatgtagatgaatgcatcttatgtattacataactagtacatgtatatatgaaaatgatgtgaaaataataatttgacgttgtttgcatattatttaaaatactctacataataattactagtgagtgatgatgtgacacacttataaatattagggtgagtttgagagggggggggaagagaaaattaagatacgcaaaatgaggtgagccattagtacattattaattgagtataaactattttaaacttaaaaaatagattaatatgatttttttaagcaactttcatatagaaaatttttacaaaaaacacaccgtttagtagttcgggaagcgtgcgcgtggaaaacgaaactaactaactcacaaaactcctcctgccgaacgctccctagttttaggagttagtttatagtaatattaggattatgtacaagagaaaaatggtgaagggatcatcttgcaaatatttatagtacttgggatcagaatacacaaaacattagagaaatggaaatcctctctcctcctgtaggaaagggaacaggcaaccttcgagggcgaagcacatcgacatctcccacctttctcgcgcccccattggattgggggcgtccgccattgatgaccagctccgaatctagtacggcgaatcgcccgcggcaaggagcagcgtcgccgtcgcccgtggatcgccgggagcccggagggaggcggcgatggcgggcgcggaggccgccaatggcaggaacaagtacgcggttcttgatcccagcgacgagccggaggggcggaggaggccctcggcgtgggagcggaggagcaaggagcggttcgtgctcgcctgcgccatcttcgcctcgctcaacgccatcctcctcggctacggtgagttcttgcaatgccgttggcgtgcccccctccccgtccccggggatccgagcttacgaataagaacagcgcatttttcttgcaaattcgtgcgcccgtgagtggaaccgcagtttcgttccgacagtgatagcacttcgttaatcgtaaccgcttagagagcatgctttccgtacattcacgagaaaaagaaaatctttgatttatttctgaacgctatcaacgacgagagagagaggggaaagggggcaaagtcgcagttcttatgatttgatggaaatgttttgttatctatagttatctggaatctggatggtcctcatgcaggattctgtccttccttgctccaaaacgacgagcaaatcagcatctgaaataggacaactgagttattaaaattaaagattccaagggattgattccccgcagctgccaagatcttttataacccagtgctcatgttgtatctgcagatgttggtgtaatgagtggcgcaataatctacattcagaaagatcttcacattaccgaatttcaggaagaaatcctagttggttgcttgagtgtggtttcactcttgggaagtctgtcaggaggaagaacatctgatgcaattggcaggaaatggacaatggctcttggtgcaattgtcttccaggctggtgcagccataatgacgttcgccccttcattcaccgtgctcatgatcgggaggctccttgctggtgtgggcattggctttggtgccatggtatctgcagtctatatcgctgagatatcccctgcagctgcccgtgggactctcacatccctccctgagatctgtatcaatttagggatcctccttggttatgtttccaactatgctttctcgggcctttcagagcatatcaattggaggattatgcttggtgttggtatcctcccatctgtcttcattggatttgcactttttgtgatcccagaatcacccaggtggttgatgatggaaaagagagttccagaagccagggcagtattgctgcagataagtgagtctgaagctgaggttgaagaaaggattgctgagattgaggaagctgcaaatcttcttaaatcgacgaaatccgaggacaaggcagtgtggatggagctgttgaacccttctcctgctgttcgtcggatgctatatgctggctgtggtatccaaatgttccagcagatcacgggtattgatgctactgtctattacagcccaactattttcagagatgccgggatcaagtctgatcaggagcttcttgcagccacagtggctgttggttttactaagacagtgttcatattggttgcaattttcctcattgataaagttggacgcaaaccgcttctttatgttagcaccattggaatgactatgtgcttatttgtcttggggattgcactcacattgcaaaagcatgccatgggacttatttctccaagaattgggattgacctagcagtttttgcagtttgtggaaatgtggctttcttttcaattggcatgggtccaatatgttgggtcttgtcttcagagatatttcctttgagattacgagctcaagcatcggcactaggtcaagtaggtggtagagtgagcagtggtttggtttccatgtcatttctttccatggcccgtattatatcagtggcaggaatgttctttgtctttgcggttatctcgactgtctctgtggcctttgtgtatttctgcgtgccagaaacgaaagggaaaactctggagcagattgagatgatgtttgaaggtgggaaagaatggagagggagtgagatagagcttgaggatacacaacatttaatacagagcagcaagaagtctgtgtctctaggctgacactattagaaacaataaattcgaaatcattcgatgttcaatgatgaaccatacttatcctgcttccatcgcctacgggattctgaaattcaggtctgcaaaatgatcaggctgccttggactgctacggattttgagggcttaacacgagtatattaggtgtaggcgcaaaacagcatgtaaatgtctgctttacacaactacatcccaaaatgttacctgggaggacacagatgatgttgtatatggcggtatcttccacctaccaaaaaatatagttgttgaagttccttattccacagtttaattttaatagaggaagaggtgtgtgatttccaactgaatgaattctgtgtgattcttgatccagctttttgatttagtccttcatgatattgtagtactgtggctttgttggtctagtataaaaccttcaagaccatgccatgtctatagctttgcattgacgtgcagagttctgtaaataccagatttggatgattcattctgtcaaattaattatttactgaaagtgcactgtgactctgtgagtcaaagattagcatagcttcatatacatatttttttttttttgccgtgccgacaaaatcttacaagtgcaaagccactgttattttgtcattgcttacctgccaagtgaagatgtacattttgtctgacatcccacatattccaatctcgttatctctttgcatttgtgcaactattcatactttgcaaacatggaggaattgcagaacaagcagctgtctgagagtaaccttccaatcacactgccctcctccatttccaggctcctgctctccctgttccacagatggatgccaaagctctcacctttgatgctctcaaccttggccttcacccacctctcgcccttcctgtccttgggtgcaacgaacagcccgccgatcttgttccagtcgacggggtagaacgccgccggcggcagcaccgtcaggtcagcctccgcctccggcctccggcggcgacgccacctcgccgccaccctcgacacgaggtacggcccgttgtggccccacttgctgccgtcgaacttggcggcgaactcagcgatgaactcgcggagcagcgggtggccccggtcgaacaccatgacggcgttgttgaggcgcatccagtcgccggtggacgcgtccacggcctgcgcgccgatggcgttgcggaggtcggagaagggcctgagaacgacgacgtcggcgtcgaggtagacaccgccgtacttgtagagcagggcgaggcggaggaggttggagaggttctgcccgagcgggatgctgccggggctgacgtccccgcgctgcaccgcgcccagccacgcctccgccggcgtgccgttcaggaggtaggccatgtccggcgaggcggcggcgacgcggaggccgcggtcgaggaacgggccgagcctgtcgccgccgccgtcggagtccatggtgtcggaggcgatgaggaggcaggcgtcgcggtgcgacctgaagaggctctccacgacgaggagctcgcggcggccgaaccgcgcgagcggggagagccacgtcatgaaaaagcgccgcgtgcacggccgcggcgaggcgaagagctcgcccgcgcgcgccgcgaaccgccgcgtccggggagtctccctgagcagcagcttgaggaggctcttgttcctcttcgcggacgccttcttgttgctcttggcaggagaagcaggaggagccggcggcggaagaggaggtgtcggtgtcggtgtcgtcgtcgtcgtcggtgtcggcggcggcggcgacgatgcatggaaggctcgcagcgacttgtccatggatacatcaagtgtaggaggagcagcggccaccgtcgtcgtagccatcgtcgtggcattcggcctcgaagttggccgcgggaggagtgggcagagcaggaggctgaaggtggtgtgcgagaggaggaagacgagggagagaagcaggaggaggaaagggagggagagggagaggaggagcaatggcaatggcttccgcggcgtcggcggcggcgccatcgtcggaggaggaggagcaggcgccatggcgttcgccttggtggcaactggcgccatgtgcacgtacgtgcaccgggcgcctgcctcttggagccaagggattttctgcgtggacccttcgaagcaggggaagggagagcgcgctatcagcgtgtgccgctgcacaacacaagcacaatgctcgccgataggttaaaatttttctttaagcacacttgctagttttgtggcgttttgttttggagaggcactgcctgcctcagtggtgtcaatgtgtggtgtgctgtcatgcattctctccaatttaagtctagtgtatgcttttacttagtacggagtattaggatatctgtacatatatgagtctttttgtgtccacttccaacttccaagtttgatttgcgtttttccttaggtgcatcaagtttatttctgaagtgccttgcatgcatgttctgatgatgtaacaggctaaccgactaaacacttaaacagtatataaagtgaccactacttgatctcataaatcatggctaaatttttgatgcagtaaaggagagcaaatgagcaaattagaccatcatgatcctaccttacgtactgctaacttttacatccagtcagcttatgtatgatgtatcataacagacagcatattggatatatcagcattgagaaaacttcgcattcagatcggcacgcccatagcattcaggcagcacgaaatgtgcgatgtacgcagcttaattggattagataatcgacttgcatgtggcacgctataaaatttgacatggtatataaactgaaacagctaggagataagtcaaagcttggcgatgccaccgtgcgaggatctgaatagatccctctgaaaaatatcaggaactactttaagaaactactaatcgacttatattgctgggtgaattccttatagaaagtagaaactgtccctcgacttatagtgcaggacatattttgctagcctcaccattgcatcacagaaacgtagttggagtgaggtgcagtagttagatcaaggaattggcgtgacgggattatgagataaaggacaacaataaaaatttagacctgctattctccagaatttgcagtctttactacagcttgtaagttacaaactactccaattttcaccagaagaacctctctcggtgccatgagctacataaatttgttactcctatttgtgtttggatcagaatcttacacagtaagattaaatctgctgcacttaatcagaactttagacaacggagaaatgaaatatatgctaatcataaaccagataatggtagattggatatgcacacaatcatatgcaagatacaagcattagaaatatcattcgagttatccattcatctcttcaaagttttaaccgtaggttactctccatatctggaaatggatacattagtaaatttagcgaatgtgactcaaagttcataacctggaaacctagaatcaagggggttaatcatgtccagaaacaggtaagccattccaacttgtccttcaaacaaggaatacggctcatcaccactgtgcatgatgccatccgcaatcagttgtttagctcggtcaaggagaaagcaagcgaaagctttagcacggtagaggtgttccttctttttcgttaggcggaaaagtgctagaaatgtataggcgttcccacttactccatggcatattccaactcttttgagcagccctctattccaaacaacctctgccgcctctgcaattgcctcaaggaatcgttcttctgggaacacctggtaaggatatgacatagtatatgcagaatgtaacagattgccagaacgaaacatgcagccaaagcaggtggttgagatgagatgatctgagaatagaaaacaaacctgtgaagcctttgctaaggtgagggaaatgccaggagccccatggcaccagtgcacaaatcgatcatgcttatcctcctcagtaacagggtaattaccactagggaaccggttctgaatcatgtagcgcaaggttccctttacgcattccgtgtcatctttagtcaagtccatgtccagcaaaacatgcatgatcccagaaagtccatgagcagcaccccaatacttctcaccataccattcatacatcaatgggcagcctatcgtggacagtgttctaccatctctgataatatctctcatgacagtgtcctacaaatagttcaatagaatgatgatgatcatccatcgcatgtgcccagcgatcatccaacaagtatgaatggaagaatgacaaatgaaggcactaaagattgaactgtgtacttactgtagtggttggcggtatagtattatctccaaggtgcttgtttaggaaggtgcatgcccataggtatccagctcttccatatagaagctcatcaggtgatttactatgaattttgatctataccaggataatacatgttatgtcacatgaacatgggccatactaccatagataacatattgctttgtttagatggatgaactttcaagtgagtaaagagacatacttgggactaacattttttttctataaaacagtgcaaccgatcaaacgtaaaattgttattgcatactgtaataaaacagcagtaaaatttctatggttcagtgttgtttgatatgtggcttcttatttagaaacagcaatttcatttcttaggagctcaagccaagtcctgataattaatctatctattatattattaaaaaagctttgaaaggaggcaccacgttcgctgtgagggctagaaattctcacattaatcggagaaaaagaaaaaaaaaagaaaaggagagtccaagtagaaatacaatctaaaaatagctgaaattcggaattaaaaataagcaatattgaaagaagttttcatataagaacccaatacgagatttatcaaaattcaaaataaaaataaaatcaaatccaaaattagaaaaaggaaagaagagtccaagtagaaatacaatttaaaaatagctgaaattcggaattaaaaattagcaatattgaaagaagtt

SEQ ID NO: 8365 - DNA, 1994 bp, Oryza sativa
tgttgcaagttgcatgctcaccgttaattttctctcctttttcctccatctttcaattatgtacttatcaggaatcttgctcattttcagatacaacatcactttcaaaacatggctgcataggattccatctttggagaactttgcacatatgcacacgaagttttcttgtggtaagtctgtcatcacaacatatcttcttggtctgaattcttgttgtttcagatttggcgctgcatatacttcatatgcttttccttgttgtatagctgccacttctagatttagtgttcccttcaattcatcttgaaacttatcaaatatcccatggttgtataggtctgctgcttgttcttctatcatgtaatttgaccaaaaagactttggcttcttgtttctggattcataatctttcccatactcagtgtcgaagatgatgtcattgattgtttcatattccagtagaaaagtcatgacactatgtgttgggccaactccccttttaaaccttgcatttgtgccctcactaagtgctgtgctatgtataaatgggcaaaaatctgttttggaatacaccggtataaaattcttccttgttctccacattatttccagatatttgatatttttcaagttgtactgtgcaatcatttgcaaccataggctttcaaattcagctcttgtcaagctattgtgcacaatgtcattaaattctgcatagagatctttccttctcttgtctgaaaatgtatttcctgacctttctctacatttcttcaaaatgtggaacaaacaatttctatgtttgctgtttggaaatacttgacgtatagctgccctcattgccaagtcttgatctgttataattgtttctggatgttttcctcccatggctgttaggaacgtttcaaaaacccatttgaaagtttctgtagtttcatctcctaaaaatgcacatgcaaaaatgcatatgtttccatggcctgtaacaccaactattggagcaaatggcatattatatctgttagttttgtaagttgtgtcgaaactcacaaattcaccatattgctcatagagttgtgttgacctcccatcagtccagaacatgctcttaactttgttattctcatctagagtcagcttgtaatagtagccaggatcttttgcttctttttgccttagatattccatcacttgattcatgtcagtatttcttgtctctgagttaattgctgttccaacattgctgacgtcttttccggtatatggcagtgctgctatgcctcctctgagaaatgacaatattgaaatcatatttctcgtgggtatgttgcattgtttcaaagtccttatcaactttttctcttcatccgtcatatgtttgtgtgatctgaggaactttgcttctctattgggtgtgagtgtatggttatggttgagattcatgcttagtattctccaaacatcaccatcaagcctcactgttagcatgcatttgcaatcagttctgtcaatcacctgtgtattcctctgctgctgagttttcttttttttcttcttctgaccatcatcattcttaccatacctgtagcactggtatgtgtacttggtgatctgaccaaatctttttttgcttgtagatttgtagtggtgtgtgatgactacagaaaatcccacttgatatgcatagaagttgaagaaactacgcgcttcttcatgagttctgaatttcttgccaatgcaaggtatgtgtttcttgtcaattactacaggagtgttatcttggctatcttcttcattagccaagtagttgttaatgtcttcttcattgatagtgtcattgtcctctgctgaggtagcttttgtctcacttgttgtttctgcttgcccaacatgttgctctacttgttcaattgctgtgattgtattgatttgggaatcttgctgaagcatgtttgaagtcccttcctgaaaattttgttcaagtaatatgt

SEQ ID NO: 8366 - DNA, 39097 bp, Oryza sativa
aagaagagaagagaagacaacaagagagaaaaaagaagaaaaatggaagaatgaagatatgtggggctcacattattttctctcacttacgtgtgggccccatatactttatttatttatttttgctgactaggatgtcacgtcagcgaaaccaggtgtctatactgctataggatctagattgggaggttttgtatagtttaggggtgaagatttctcgtactgaggataagggatgttagacaaattcggtgtaaagttgagggacggtagatgtaaagtttgtttgcaaactcctcctgctttattcctttcgcctcgtcaaaaatcccacattaaacaattcaaaacccttgttatactgcgattgaacggttttgtacagtttaggggtggagatttctggattttgaggataagggatatcaaacaaactcggtataaagttgaggggcgataggtgaacttattccttagctttatttgtcatctcctcattaaaagcctcttccagtgatcgcagggactgagcggtccaggcctagatattgggcttcaaaacaaggttcgagggtccaaaggtctgcaggtggcccattattgaaaccgtcgaagtctgaagaatttccggcgaataggctatgccgcagtgaggactgaggagggtctttttttgcgaacacgcggtgaggagggtcatgcactcatgcttaggctgtggtcttatccccaagtttcttaactcatccccctcagtttttcgcgcgcacgcttttcaaactattaaacgatatattttttaaaaaagtttctatacgaaagtcgcttaaatcatattgatctatttttgaaaaaaagctaatacttaattaatcatgcgctaatgtattgttttgtttttcgtgcgtactgttgggaacaggctggagcgcgaacacaggcttagtattgtcagaacattacagttcacagtggaggcatggactatatagctgtgcaatcagcaaatcacgcagatgcagcctgcccgtctgaaccggcaatacactggaaaacttgatcctaggcatatctcttataggttcgcagtgaaatgtcgctatgtcagatgccacattaattccgattttcactttgtgttattgcatcgcaatgattgagcaatatgtgtgccgtttaagcaatatgtcattttttttatggttcgtttaatcaatatgatgatgccgatcatatcttctggttccggagccggacggatgaacaatttagcatagatcatattgatatatctgctctttaatttaagggatctaaaaaaaagaccgccagaatttaattattctgttcaccctgcagtgtcattttattagatcctctgattactcctaattaattagttccatttgtaattgacttggtgttgttcgtaatgtgtactatgacctacctacagtacaccatgctgtattttcaatttttcatctagcattcgctgttacggtgcaagctagtcagctgatgctacaataaaaggttcaaaatattttaccattagctactcttggtgctttctactctgtccgttcctaatatcaatatttttagcattcaaattttatataggagtataacataagcatcttttagttgtcccgttcatcatatctcatttaatattatccgttttaccctaaacaccttacggcttgtttggcgatatgagggaaggggattgggagtttacatgagggaattgatggtgagattaaaatgagaatttgatttttaatcccagtatcttgtttggtagagttggtggaaattgatagggagtttagttggagattaggtcattaatgaaaacggatggctgagatttgtttagtcaaagtaaaggagaaattccctcccaattaccacccctacacaggtattgaaaaaagagggagttcctccctcaattccacatcctcatcccaccaaaattcccatgtatcccaaccaaacaaagcagttaatagcatcatccctctaaactctcaatcctttctaaaaactccctccaaccaaacgggctgttaacgtactcccagccaggtattatagtttttctttaaaccttattctttctgctataaaaacctaaaaatgctttagatctcattgaagcgttactgatcagctactttctgtattagatccaaagccaatccagaacccaagcaaccattttgcatccacatctcttaagtgtgaagcgcggatcaatcaaatattcaaatggatctaattaagtggttcgcccataaaaaggtagacatccaagtaacaacgactaacaagtatcatgtttttgctgtgagttaaaagctactattaattcccctaaaaaagccagttttaataaacagcgatcagaaccgatcagcctcaaggattgtcatatacagtagtcttctctatttacttttaaggcgtagtgcatttcgtcaaggtaaagatttgtacgttctgactcataaacggacaagaatatacgtacgtaggaggagttggttatattaaacgtgaaggtttccgtcgatctcttctttcgcatgttgtcttctttatgcaccaattattcattcggtaaacactaaatgtgagatcacgtaaagttgtttgaaccagttgcatgaatgttttttttcttgtcttgctgctcacagttcaattatcgtgggttataccgttatgtcgttgtcaattgaccagtaaggtagagtccaccacgaaaaacatgcttgtcaacaatcgcgaccctcaattaaaaatcccatgcttatcaagattgtcgttttactgtctgaaacaaatccattttaattcagttggacgacatcatctaagccacccctagcaccgctagctatatgataggatgacgagattcaccttagcaatcgtaaagacaagcaaaaggctagcccgagtgcccgacacacccaaactaaattcacgtatgctatactccaccgagtctaatcctctcagcatccttaaaatttagtgtctttctttctaagatttgttaaaaaaagttatcttccaaataagaaccattatatattaatttgttatttccttttcgttttagttgtcaaatgaggaaaatgacagggctcgggcgcccgacaggggtggagccgatcgggcgctcccccgcgcgcccctccccccacgcgcgtgcatgcaggtcctgggcctcaccgcattctctgctccacctgccattgcaacaaatcacccacatattttagaaaccttctattaagagaatttggtttatttttttgttccacaaaaaatattttacctagtgtactcacaatgttttactatgtatagatctaatgttgcagtgaactaaaatatttcattgcaacaaaaaaacccacatattttagaaaccccctattaagggaattcgtttcattttttgttccaccgaaaaatgtttcacctagtgtatttataatgtttcattatgtatggatcaaatgttgcagtgaactgaaacattctttcgctatttgctgaaatattgtttatatataaggtaaaacaacatccgatttaaacgagtgaaacattttcgatctacttagtggaacaattccgatatacctggtggaatatcgtgtaacatttaaaaataatttaataataagctattttttcatcggaatatatccatgtgtggtcttgttttgaagatttaattgcaacgaatttaatgatgcaatcggatcatgatttggataagtaatttaagagaaaaatcagtttaaagtagttttgcacataaatcgggcgctgacgttgtgctgacaacagcgcccaatttttctccaaaccgatcgggcgcccgacccgtagactcgtccgtcaaatgaatatcattttattcttttcgttttccctctacaataatgaaaggtataatagtattttaatattttactcaatctattttaactagatactaaaacccaaccctttagggcggagggagtactattaatattaaatttatacaatttatctctcaaattgttagaaacttcaaattaattaggcgtgtaggattaaatgatacttcctatgttttttgttataagacataggttagagcaaggattcgaaaatagacatacaaagcataatcataattcacgactccaatttcgtaagttctttttactaataacatcaatttcgtaaaagaaaaactatattccaataaaataattggtcaaaatcttatcccaatgaaataaaatacatattatttttttaacggagggagttctatatgtttacttatcacataccttttttattctttaatttttattagggcaatttaattctccaatttatcttagttgctccttttaatgcaactgtttgattaatattcttctgttactccctccatattaaaatacatggtgtactttgttttaaacaagactttgactaacaaatttttctaatatattatttatgtgataaaaaatataatcatacaaaagctagttaatcaaagtttgtcccaacaaaacaaaatatgttcctatattttaaaatgaagagagtatttatctataaccatgcttcaatagcattgtgatgtatatcaaacacgcaagcacatgctaccaatgtcaatatacctgttacagatgtcctttgctcatgaatatcctatttctagagtctaaagatctcatcttccatctcttcattatagtgattccgtttatggcgtgaggtgaagtgtgtatagattctagcagcccagctgacattgtcagtggtacatacaaataggaatgtagaccagggaccaattgtgttgataattttgttaatttgtactagtatatgcgttgctagctttcttggatgctctgatgctcagatgcaaatgcagcataacattacaatcgaatactaaattctcattgtagcgatttgttgagcgaagacttaatttagccatgcgtacatactacgtaatccaaagagtttaggtgaaactgaaaggccttttttattcccttgtgaagtacatatgttttatatttgaagatgtcattaccacggaatttgttatcactgtcggttttccgtctggattaggccgtcgacaatgttaaatgagagcaacatcattagttttagaaccgatgtatcattgccagttcatggcgtaattatatggcaataagtgaagtatcactaccagtttgtggagcatattgcaagtgaaatatggacaatcattgctggtctcctcgtgaaccgtttgtgttatcggctcatagcaagtttttatagtggaggtgatagccacctctaaatttatacacatcatctagtttttaattaagaagtaatgcatacaacatgatacttcaatcacacttaccccaatacaacatgataattttacttctcttaatctattggtctatttgtttcatctcccttggagtacatagctcagacagtctgcacaatggtgtaccttagtcctgtcgatattatcactgtcggctggtggcaagaagtgacagtgttgtaccactatcggtttgtgccgtggggcaagcagtgatcgagagtgttccattgtcttttcgtggcacaaccgactatgatactaagggcctatttggcacagctctagctccagctccacccctcctggagctagagctcagccaaatggtttcagctccaccaaaaagggagtggagtcgagtggagctctctcacaaaataaactagagttgtggagctgggtttagacagctccacaactccactctagacctaactcgatcctagagttaaatttaggagttggagctgtaccaaacatgccctctgacgtttagtgccactaacctagaaataatgagtgtcactgccgacttgccggtttgggcaggaaatcgtgagaaactgtggtaaatgggcaatggtagaaccggaagtgatgattgtttctgtgatagtgtgccaacaataaacattttttctctggtcataaatatttaacaagattttatcattttctattgaaattttgaccaccaatatataaattcttaaatatgtactttgtttaaaaaattgtataggtagattggtactggagagtagcatcataataattatgaccgtatgaagtatgtatatatagggcgtgggtcaatggcggtgggtgacgtgtaaacgtgctatgctttctctcacaaagcttacgagagcatacaatgcgcatttgcccccaaaattagtttgatatagtactatagccaagcctcacattgagtactcgttgtgcgcgcgagctaaatagttgcaagcaacgcgtatttttcgtaccttgcaagagtgtgaaagttggacgcgacagaatcatctcaccttcgatggagactggggagtaagtggtgaccagtacgtagtaatatacctgctcctcaacgcaatctatatgtggcgtgtactaagttgtggctagtcaaaaccacttgtacaatttcggactcgatcgataaatatcccaacgcggcagcctacggcagcacgcctcgagtgctaatgactttgcgcggtggcggcgcgtgcagcttgacgtcgcgctgctataaaaagggaaggaaaaaaaaaagaagtcatcgcgcgcactacttacatgcggcaaggtcagcgccggagctgccaatgcacgcgatccatcgagcaataagctagccctgcacggaattgaaaccacacaacgccagcttggtcggtcgcggctgacggcgccggcgcccacaccaccgttgcaacggccccggccacgcgcgcgcgcccggcgcacgcacagcacatacatgggcttagccacaagcgcacgtagctactcgtacgtcgcggccggtgctccgttgggagtgggtggggttgggcggctgtccaccgtcacgcggggcggccgacgtgggtggtggtggccgcgcgggccagcagcctgcagcttcgatgccctgccgtattttgtactagtagatttttgtgtggcagtgtggcacactggcacgtacgcgcgcggacttttttccgtgctggcagggtgtgtttagtttctgaaagaagttggaagttggaagaaagttggaagtttgaaaaaaaaagttgaaagtttatatgtgtaggaaaatttttatgtgatatgatgtgatggaaagttgagaataggagggaaactaaacacggcctatatagtagagattactagagattaggccatgtttagttcccaaaaacttttcgcaaaaacatcacatcaaatctttgaacacatgtatgtagcattaaatatagataaaaaaaattacacattttgtatgtaaatcgcgagacggatctgttgagcctaattagttcataattagtcataagtgctacagtaacccacatatactaatgacggcttaattagtctcaaaatattcgtctcgcagtttccagccgagttatgaaattagttttttcattcgtgtcaaaaaaaattcttccgatatccggtcaaacgtccgatgtgacacccaaaaatttttatttcagcaactaaacagcccctaatgcctgtgccgctcttgccgaaagcgatgcgagatcggcgccggccccggccccggccggctgctgcgagagttaggtatctgggcaggatgtacgtactcacgcacgcgtgccccaagatgcgcccaaaaagaaagctggggagcggtcgcgaaccaacggccactagctgcctcgatctcggtcgatcgatctggctagctcctcctttttgtcacatatctccccggggaatctgaacttggtcgatggaagtggaccggcaatcacacaatgccttgatgcatccatggcttgatctttcgagaatcaagtgacagcgttgcctgcggcgccaatcgatcgctatacgagtagccggagaagatcgatgcgtgctttcctcggaggctttaaactcaccggttttcggtaccgtcagatggcgatcgagcagccagagaagatcagatatgcgtgcattcccggggagctttaattcactggttctctgtaccgtgagatggcgacttaccatgagagctttgtgctcgtcgtggtctcagtctcgttcggcctttcacagatgggagaataacaataatcgttgctagtattgactattttacttcgttttcagtttcatcatagtactaattgaagttcataaggacctacaaggcctacgtaccctttcatcaacgttaccccgatatggcagctgaccctcgtatcagtatctgatacgcgcccggatacggatacgtgcgggatacggccggatacatatcccatacgtatccctcatttttctctttttcagataattaaaaaaataccgatactccttcgatacggcgggatacgtacatgatacggggagccctaaatcacacagaacaaaacgcatctcccgttctccccctccaaacgcgccgccgcttgcaaaacccaatccccatcgcagcgccacccggccgccccgaccacgccgtcgctgcgtcgcctcgccgccggcctgccctacgccttcgctgcgctgccttgccgccggcccgccgccagcgaccggcgccgcaccgcgccgtgcgcgcctatgccgtcgctacgccgcctcgccagcgccgcgccgcgccgcggcctatagccttctccgcgccccctcctctgcactctcctccaggagctccagactcctccacgaggcattgcgccgctgcctctgatcaatcctgcatcacctccaacgacaacgacgttgaggacttgaggtaaatcctgcatcatctactatgtgaacaatgttgcctaatgtctaccatctatttgaagaactatgttattttcatgatttcatctactgtatagtcttgcacttatttatgcatgcctcttcaataaatggtgacttggtgagatgctgtgagcctgtgaatctgtcgtactgagatatcatatatatgatgattggtgcattggtggtttgatgctgtttgcttcctattttttcagtctatattccacactcaattttttatatatatatatatatatattcgcgtatccccgtatccatatttttaggaagatggtgtatcccggtatcgccgtgtcgcgtattcgtatcagcgtatcggggtaacgtagcctttcataaccgcgattgttccaaagaaaacagcagagtttacatcagtagatatacagctcgtaaaatagcaagctaacctcaccgtgatgatgcagtgcatgtagcaagtgaccgcaaggtgatcaggagaggaagccaacaggcgtgcttaattagcctctgagagaaaaggagagagatatatcgctagccctgatcgagaaattcacgccgatggatcgtccagacaaatcacgtggtgaggtgcctaattaagcagctaacagtacgacaaaagaagctctgattatgttagcctgttaataatttatgcgacaaagcttatcacttcccttaactaattcggggagataagatattatacagttctaacagttcgatatgatttaattaatccattccccttctggcatgccgctagaacatgccaatcgcgaagccctacaagccgggttgtcatatgtcattaagaaaactaatctccctaggcccttcgtcacctactgaatatgttattaacacggtccaacaggattcaggaacatcagaattttcctctcttttttcttaaacatgaaactaacaaagcaattattggcagcgtgatcggattggcggaaaactcataaactcgagtataaaaacgagccactaagctagtcctctcgagagattggagtacaaggaaagcaatgggaggggtcaatctagcaaagcccacattgacaagtatttctttccagatcagtaccgtccacgcagccgtgacagcaacagaaagacgccatgtcgcgatcctgacatcgtccttgagattcgtgctcccgtgacgtgtcggcatcggagggcccctcgtcggggtcaatgggcggtggggccagaccaccgaccgggatctttttcctggcgcgcagaaccgtttgtttccgccctctcttttttcacaggagcaccggtctctggcttttctctcgacctttttataagcgcgggggttatcggtcgcacgcgtcgcggaatcagaaccaaaccccaccaccacacaaacgcatgcgcgcgcgctcccccgcgcgcgccgcaccggtcgcccactcgcccgcggacgccaagcgatcgtctcgtctcgcactgtttcaccggtcgcccaatcgccaccgcgcccgtacgtctatacagcgtggcaagaggtgcaagttggtgtcaggatcagtttaattacaaggttgtctgatctatatattgctgcagcacggcgggcgcggggtacgtttggctgcaccctgtctcgcggctgatacgtttgcacaggcgttcagatacagccgatacaccggcggcgctagctgcgtttcttctccgcatggacgctccgagcggcgagagcggcggcggcggcggcggcggtggtggcaggaggtggaaggggaagggggtgacgcccatacagccgcggcggcagctggggacggttttggaggactcgtcggcggcattgctgcggccgctcaagaagattgggcggagccccgaccgcctcctccgctccgcatcgtcgctctccacgtcctcgtcggctccgccttcgcctcgctcttcttcggcttccgatgctccagtccgcgtcatctcgtcgtcgccgtcgtcgccctcgccaccgtcggcgcgacacatcttccccttcgcgtacgaggcctccacgacgacggtgggtgggagcccaaggctccacccgctgtcgtggcagcaatccagcatgtcccagcccgcgtcgccacagcaacagcagcagcagccgttgcagcaccagcagatgatatcgttcggcgcgtcgcctccgtgctcgacgacgcagttcgtcgtcccggagaacgcgcagcagcagcagatgctgctgcggtactggagcgaggcgctgaacctgagcccgcgcggtggccccggtggcgtgccaccgtggctgtaccagcagctgctccgggtcccgccaccgccgcagaagctttaccgcggcgtgcggcagaggcactgggggaagtgggtcgcggagatccgcctgccacggaaccgcacgcggctgtggcttggcaccttcgacaccgccgaggacgccgccatggcgtacgaccgcgaggccttcaagctccgcggcgagaacgcgcggctcaactttccggaccggttccttgggaagggccgcgccggcgggaaaggccgcaccagcgtaagctcctcggccgctgccgccgcgtcgtgctcgtcgtcgtcgctatcgccaccggagacacctgacgacgcaaacacgcagcaacaagctcctcagcagcgagaacagcgggacacggcaggagtgtccatggagaagaaacaaccacagcctccagctccaacctctcgtcaagaagggtgctctggcggcgacgcagctgcgccgtacccggccgaaatgcttcacgcgccggcggcgtgcggcggcatgtgggttgctcccgacgagtcatggttcagcacgtggggccctggcagctccttctgggacgactacgacatggacagcgctcgcggcctcttcctccaccctcgcttcaccggtgacgaaactagcatggatcattccggcacgcaagcaaccgtgccggcagtggcagcaacagcggcagggatgagcatgccatgcgatgatgttccggtaacctcttcttcttcagatctccctccccaagggacacctcagactcctaccttcatgtggaaggaggactaagcatgcatgcacacagccacgcacctcgacgagacgactatctcttccatctcccatcgacttcgacgatctctttcattactcatcgacttcaaccacaaaggtatgattagggtagagatgcttgcagattgcagttttaaagacaattttgcagcatcacacagctctacgtacaacagccacacctatatcaattctcaagacttctaaaccacaagggaacccctgttctaggctgcgatttttaggtcagcttgttggggtgaccacagtacaattccctttatttcgtatcttcccaagattgtgtgtgtcagatattcgttgaactcgacttcaaaagatttgaagtattcatgttttcttttactcatgcgatggctttgtcgatctaactaggtattgattcttggggagattaattactacttcagttaatttactagctactagaatatttcatgcatgtatgtgttcaggtgatgattagttttacttatatttaattatcctgtaccctccgttttctggaacatctctggcattccactgtttttgtgtatactctggggaggtgattagtaacttcatactatttgcttctcgagatatttagtgcagatagttcagagcaaacgatgccaaactgttgcgaatcgtgtactaaaggcaagcacattataactctcgtaagttcgagcgagcagagcagccggggagttcttgtcaactacacaactcacaacgtatgtacgtgacagcgtgcgcaactgaatcacacggcaaaataatcaaggcatggcgcaacttgactatggcagcgtcaccacgataggtggccaaccacttatatcagatgcaaccctgcaagtggtagtccgacactccgactgataagaacgtgcgctgccatatgccgccatgtatatgtaaccgtgaacttaacttacgtgcctttagtgctgtacgtgcagggaaacacgcgagtctccgatcgaccaatcgacgacctcagagcatctccaacagtctccccatctcactctccaagctaaattttagctattctagcaaaaaaaaaaaaacgtgctccaacagcctctctaaccctaaaccctatccggctggccaaaacctcccctccactagccaaatttggctagccacaaatcacttgccaatcgtgggccccacacagattctccaccaccccccatctccttcgtctctccagcggtccagccacgactcgacgccgccgccgccgtgcacagccacgatctcaacgccaccgccggcgcagccacgacctcctcgatgcggcgcagaagggcgggccggcggcggagagaacaacggcgcgcgtcttgaacccacgccaaagcgccaccatcgtcgtcgaggtcgccagccgctgtcgccgtcgtctgcaccgtcgccagtcgtcgccatccaccgctgtcgtccccgaggttgccgttgccgtcgtttggatccggatatgcccgacctccgttgcctccggcgtgacgtgggttcagggcggcgcggcgtggattcgggaggagggggcaacctctgtcgcgcggcctccgccgcctccgcctacacctccccggcgctgcgagtgcggctcgggagggcggcgaggaggcaggcttcgccctgcacgccatcgccgtcgttgaagctggaggtggcggcggcggcgggtcccggatgcgcaggagcaggatggccctcgccttcggcggcaacagcggtggtgggctggacggcgccggcggcgtctcgcttcgttgtggtggtggcagcggcgccccccggcctgcgtcagccttgagaaggggaaaaaaggagagaggggctgacgtgtgggtcccatggctaaaatagagaggatgaatggagagactgttggagtgaaaggcaaatttgactctctaattttttagatggatgatcaaatgagtatttggagagctcaaaatagccaatctgttagagatgctctcactcacgccgccacgcgagcgctcgttaaattcgtcgtcacccagctgcaggtgtagccgtgtaggagtcccagcaccacgcccgccgcagtctgtgttgtgtgttcctcctgggtgggtggcgatcgagtttgatcggcggcatgccgcatgcctcccacggacatgtgcggttgtgcgcgctgccgtcggtgtccgcggatccaatctgctgatgccgtgccgtgacttgtgaggtagtaggagagtactgtggacatgcatcctggacctggactactggagttctagcggtctactagtggatatgcatgttgccgcagattaggcctagataatcatggcctctgggccctggggtccaaaaaaagctttacgtttagatttgtgaaggacttgataggcccatggtatggaagtggttgaatccttcggaccactttaatgggccgaacagtcaataggcctctccggcgagaatgctaattagcgcagacgtgctaattagatatctccggcccagttagtcgcgtgcggttccagccgacccaccagtgaaaaagaagtcctacttttccaagcaaaaaaaaaaaaaaaacgttgggagcacatgctgacgcgctattggaggaaaaatcgcattccataataaccgtattaattaatcttttctttttttattgcaaatttgaaaattacgtgaaattttaaacatttaatgcagatttgaaaacctttccactcaaaatttgaattttttgaagtcaaaatttgaaaactttcaacttttcatttaaaatttgaaaacttttgatctagatttgaaaacttcaagtcaaatttgaaaactttcaacacaagattgaaaactttcaacttgaaatttaaatttttcgaaatcaaattttgaaaactttccacttttcatctcaaatttgaaaaactttcaactcaaatttaaaactttcaatccatatttgaaaactttcaacccagatttgaaaactttcaagtcaaatttgaaaactttcaattctatatttgtaaagaggtatgcgaaagattgaaaaaaataggaagaaatgaaaaaacgcgtcgagaaaaattacaaaaaaagaaaaaaaaagggcgcgtgggggcccagctgacgcgcgcaccagctaaattgctggcgcgtacgcgcgcgctaggagccccccttctccagagtcctgaacctactccgttgcgtctgttgtctcgtccacgatttcgggggttcacgtgttgtcatcatcgtagaccactcgtgtaacaaatgtatccaaaatctgtctattactaacttataataaattagtagaaaaatgagcctccatgttcactctcacgatatagaaaatcccacattaatcgaaagaaaatatgaaaaaaaaatgaaaatgaaagtgtattaggattaggttgtgtaaacggacaagaaaattttaagtggaaacggacaaggaaaaaaaggaaacaaaagtcaaaggaatgatataaatattgtgcaacagaccaagattctttgaaatccacgtgatacaaaccaaccataattatagtactttgtatggccatcagttatccgttatcaaaatttaaacaatacttacatgccatgtcaacaaaatcatactccaagcacaacaaattaattcaaactaacaattagcaccatagaaaccttttcaccacagtccgcttcgtcaacattaactagcagaaatcctctcttcgcaatccaattaattcaatcacgccgacaatctttcctttcaattaattttgtcttaataattaattgaaattgtcatattaatcagacaaaagcaaaaagaaatggtgaatagctaatatggtccctgaaatttcgcttcgggctcagtttagtccttgaggtttcaaatcgtccaaattaatcatttgggttaatatagtccttggacccataaaaaataccacgtgaatacgcgaagtcattcttgcatgcagcggtatgaatgaaacgaacattctacccttatataccatatagaaaagaaataaaagacacaaacaaaataataacaggctagcccaagcccaacattgttgcggagggtggccgagaaaggaatttatacgatcagtgcttggctgcagcaatcataagtgacaactctaaaacgatcatacatgtgtgaaatacttgttttctttttttttctttcttttctatatggtatataagggtagaatggtcatttcattcatatcgctgcatgcgaggatgacttgacatgctcacgtgacactttttgagggtccaagtactatattaacccaattgattaatttgaaggatttgtttggacgatttgaaacctcaaaaactaaactgagtccgaaacgaaactgcatgcaccatattagttattcacccaaaaagaaaaaagccaaatcgaaaaataatttaaagtatatgaaattcgaatttagaaaggaaaagaaagagtcaaactagaaatacaaagttcaaaattagaaaataaaataaaggtaaaaaaagaagagttcatgtacaaatacaattttgacaaaaaaaagaggggagtctgtcagtgttacggataaggtataccctttatacttggatatacgttgtatactgatacggtatacccgcgcgtacacgggtagttcctgtatacgttaaggaaatctattacatgatagaaacagaatccacaaatggaaggagtcctactcggacaatactgggtcgttaccatatcgtgaggggtccgatatctccgagtcctacttggagatcaactgacccgcggtataaaagggaccccttgggcagtatcgaagacatcgaatcttaccgccaacatatccaccacagcctacagagtcggagcttataggagccaagtcgccgggtgatctagtcgaaccaactcgactacggtttcgtcggtatcatcgagttccactattccctttgtaatctatggtttccatcatataatcccataccaactggataagggctattacctaccaaggggcctgaaccagtataatccttatcttttgtttgcttgatgtcgtattacgtagatcctcgttccaacgtactccaataccctctatatccggtctacgggtatcccccgtcgacagagtccaaagtgaaatacacttaaaaatttctgaaattaaaaggagaccccaagtggaaatacaatttaagaaaacaagaaatacatatttaaaaaatagtaaaggaaaggaggaagagtccatgtagaaatacagtttttaaaaattttaaattcaaattaaaaacaaatgataaaatagaagattggatttgtaaatacaatttgaatatctgaaatttagaaaataaaaaaactccatatacaacacaatatgggttgataaaatttggaataaaaatataataaagttactcaatttgatttctgtacaacgtcatacctaaattagtcaatcacaaaattttagaataaaataaacagatatgcaaataagtgtccatgcaaaatttatacaataaaaggcctgtcgacgtttgatgtcgcgattttggtatttgcatagtatggggatcgttagtactaggatatatgcgagattgtagtaaaagagatggagacgaggatttttatacaggtttgggcccctgaattgtcaggtaataaccctacatcatgttggccgaagccggtattactcttattcaccataatcacaccagtacaatatttggggtagcttatctaactgttgtcgacatggcggtctgaaggtctgactcgtagtcgacaacagggtagtcttcctcctcgaatccgtgcccggcgagatcagagatagcgctttcgtctctcctgacagtatccggagacaccgtaggggactagtcgtgcttatccctgaagtcgatatccggcgtcttgtcttggcgtatgttgacttgtattggctttgtggctttgtggcgtctatgttgtccgtgtcccctctcctcccagggggccttgtatttatacccataggtgtcctcttatccaagtagaactagggaaaccaatatggatacaatccgagtagtccttgtcgtttccatatagaactctagtcatcattccttatacggaactcctcctatatccgaaggttgtttccgtataacacatggtatgtggtggatcatgttgagatttagtcaactactattaggtatgtggtatctataaccctgacaaggcccaaatttaaatacaacatataaacacccaaagttgtgattgaaataccaaaagataataaagattattggaagacgaatctagactctatataggaatataatttagaaataactaaaatttgatattaaaaataactaataactatcatgtatgtacaatacaatttgaatattccacattactagtttggtaaagtgagtacaaaatttaaaattattgtcattttaatatattttaataataaaataagaaatatatatatatatatatatatatatatatatatatatatatatatatatgctattatataagagaaatataagaatgctagccaccatgctagtgttaaagaaaaggggatcagattattgcaaatttgaatacaatttgctagaaaaaaaatcttaatctcaaggatgcatgaaattcggcttctttaaactggttggctcggaggaccaaatgacccttgggatggtcgcaggtcagtgtagacatccacctcgccaatcgccatccacccccaaccttcagctggctcggcaatcggcatctcttatcctcacgtgcgcaccacctgctcgatgaaattccccacacggccaccaaccgtgccgatggcacccgccaccgccaccgccgtggcgtccccctccacctcctcccggctcctacaccgcagcctcctctcgccaacacccacggccgctcgctgcctccggccgccgctgtgccgcgggcgcctccgcaccgttcgccaggttgtcgccaacggcgacgtctcctcgccgtcctcggacgtggccgccgaggagtccgcggcggcccccaagatcggcaagcgcgtgcgcgtcacggcgccggtacgcgtccaccacgtctccaaggcgccggacctggacatctgtggcatggagggtgtggtcaagcagtacgtcggcatctggaagggcaaacgcatcacggccaatctccccttcaaggtggagttcgagctcagggtggatgggcaggacaaaccggtccggttcttcgcccaccttcgagaggacgaattcgagctcgtcgaagacgaatagctgaataggtctcttttacagaataatgtgctctcgtcgtctgcagtctgcagatgcagtatctgtatattagaagagaagattgaagagggtgcgaggagatcgcaagtaagttgttgtttgtttacttgtcgcgtgctcttcctcactcttttgtagttctgttaaacaccaacattttgagatttgagaaactgagaacggttcggattatgacaattatgaatgaaagtggttatactgatggttctgttgttggctgtattcagtagtattttttccagttatcttttcaagagaattcgctgcttataagaatatgttactcatcaggatggaaatcaatctctctgactagcgtaaccttttagcatttgattggaatatcggatcgtatttatctattggtctgttcacttgaacatttatcccacagtcccaatttcaattgttatgagcttatttagttgctgcagtaatagcattgagaacttggctcagggttgctagccaactaaactagacatgttaattcttagtagcacaattggtttctcaagacctcggttattgttggtggctcggtttactccacaaactagtaaattaccagtagtgttcaccaggattttaccgtaggcttgtttcgtccctctgcccatcaaatgtggccttgctgagttagccttccatgtttccaattgagttacatggtttgaaatgtattcactgttctggttgaattcccttgaatcttgatctgtcgagtgagagccatgctttaggtttggcctgtgcacatacatatttggacctgaccaaacatagatggcacatgaactggattgtggagggtatttaagctactgtagtttgcctcaactttagaccttgtgattaggtcctgtgtgaaggtaaagtgcacatagttatttatagcacatgttggtggtgattctctccagatatattacaccaggtcattaatgctggaaaacttacttatgtggatatactttctcctcgtcctctacggtgcttgatggagtgcttacttataagcaatagcttgatgaagggactattactttttaagtctataatatggatgatctgaatatattctttgtaggtgataaagggatcttgcatattatcttatccaaggagatgagtgttatattgcagtatatctttcaagtctggtttgatctagaaattagacatttgcttctctatgctttcaggtgctagaaaaatagcgtaagttctttcttttaatttttttctagttcattcacaaagttagtacacatcaccataggttgctaacctgctattgcaccagaattgctgctaacaaattttatgatatgacgctagtctggatgtgatcaagagtgagagtttgtcttggggccttatcgattgccctatggcttatattaattttaagccaaagccaaaattttaattttgaaacttgattttgaaattgactttgatgttttttcaacatagttatttttttcaagtttggcttttaagtcgataagaacatttatacaaaagttttactcacatatcattttttaattgctaataagccgttatgacttataataacccgtaagcaaccgatggggaccttgctgtgagacctttatttttgttgattggggggggggggggggtagattctttttattgtgcaagaaattatcacaactctttttctttaccggtaaatacatgggaaatcctatatgttttcttttcccatttataatgagaatatgcaagggaattatataaagaaaagtaaatcgtcaattttctctatttttttacaaaccttcaacaaggaccaataagtgtttttttaagactatctatcattcatctttaaacggatacttccaattgtgaaaactcattcttaaaagtataaacgaacttttgattttgcatgattgtgacgtgaatcataccttgatgagggtcaaattcaagctgagttcaaccattcctaatgttctttttagtttgcatgctggtggtgatatactgattctgtggaggcaatttactgtgggagatgatagtaacaaattctagagattcaagctgagttcaaccattcctaatgttctttttagtttgcatgctggtggtgatatactgattctgtggaggcaatttactgtgggagatgatagtaacaaattctagaggtctgacataatgttcattcgaaggaaaatattttcttcatttcctttatgttgaacaaaatatattgaaagaagagtaatcaggttttgtccctttatttccgaacagatgtttttgtggttcattggtatggatttctgaaagaacatgcatctgttctggcatgatctatcacatcctgcattatttgttgatcataaggtctcaacttgtggatttggtttccccttctgctggatcctgagtttctgttggaacgtgttcacattctgaaacattgttcatttatcatatttctgttgaaggttacacttcaacatagtaactgacagtatgctgcatttttcttccattctctggatgtatagttaatcaggtcaatatacacgtagaaattagagaaaaatctttatttatcgttgcataatggaaattaatgcttacattaccacatggaacttggtcattctctgaatcgacggaattgcatcagatattccaaaaggtcttatctgaacaaagctttcttcttttattttacactatcgcactatattaatatgctttggtcatgagactgtcttccaaatgaggcatgtgatatgtcttttattcgttttaggcgctcgtacaaattacaatcatgtgttccatgtctcccattaatacgtaggaatgtaggattatgttgacagttgtgatcatcaaaagttgggtgtgatgagggtagagaatgagacatgaggtagcagtgcattgtacttctagcgggtaagcgttttgtttactttgctagatcctgttttcgttcagcttttcagcttttgtgaatgcgccaactttgtacagtaaacgtcagcttgggttctgctgaaaactttggattctattattacgaagtgaaagaaagttggtgatttatctctcaggccatcaccaatgtggtgcttcggaccgtgcccctagcgacagctgttcgcttttccgtcggcgtcgtctccttgcgatggaacgcgtcgctctggtaggggacgcggctctctccgcgcctcaccagcttttcatgggagacgcagccaggcgccacgctgagcgcgtatggagctcgtgggtacggcatcgtccccccaaatttccccttgcaccctcgcctcactctcgctctcccctcggtctcgtcgtgtcgcgcccgacatcgccggtgccacgtccaccaccgccgggaccgccaccgtcgatgcattgctgatggccttagagagagagagagagagaagaaagaggcgatggcgacgacgacgacggatccacgacggcgatgaccagatatggccaccgagcgccgcagcagccgtcggccactagccggcgacgggcggagacggcttcgaggagcccgtgctcaccgcctcgcgcgccttgcccggcctcctccgccggcgccttgcccgtcctcgccggcgctgcggggggcccagatccgcccactacggcgccggatctggcgcccccgaccggccacagcgcgaggcggaggatgccggggaggacgccgatgggatagagggagagagaggggcgacggtggatgcccgcaacgggagaggtggccctcctcgtcgtcctcgccgacgctcccgtggcgccccgtgacgccgctccccgggtccgacgaggccaaggaccgcgccatcgccgagcaaggggatgtggggcacgcctcgcatctccggtgagcagcggcgcgctggatctagcgcggtgtggcgtgagatcggagggggggcgtgggtctggcgacagcgggagcacggagcggcggtggaaaaacgggagaaggggtagagacgggcgacaggcagaggagagtggcgagcggcggcagtgcgagggagagtgagagagagagacgagcggcggaggggaggaggcgagcacgcgtggaggcagaggggaggaggcgcgccggtaaatgaggggaagagagagagggggggagaagagaggggtagtatagtaaaatacctacatgggctctttgggttagggacactcgttgggctactagtggtatcctctattgtaaggggagtttcccagagagcgccctcagtaagtgagggcacctatagagtgtccctgattgtagatgccctcagcccattcgatgtgttggaaaataatgctatgcaatcgactttcgagtgcccttctacagttgtactcacctgacgtgaatggtccacttgcgagttaacccttgatgcatggttgatggccgttgccgttagagcaatcctaacccaggaactatgaagtcggagccattgtttcgacatatttgcaaatgaaaaataatttgtgaataaaatttttatatacgtgttattagcgatctaaaagcaaatgctgaaaaataaacttcgatgaaaataccataaaatcagcttcaattttaaagttgaaaatttaaattttggcgcataagcataagcataagtgaaaagatgagaccatatagcttcttcgtttgccccagttcacatgtgagagttgctagtaggcatggtaatgaaatgttcagatgcacgtactccctccgtctaaaaaaaataaatctaggataagatatgacacattctagtacaataaatctgggctaaggtcacatacaatactaggtttgttttttatgggaatgaggaagcactgcgtgagctgaagttttatccggctggttggaggaggtaagcgtacttgaaattcagtgggatactccaatccggtcaaattgataagagaatgtcaacgaatcaagggtgacggaatcgtcttctaccccaggaactgaaacatcagctgcgaattcccatcacgtgaaaaactgagatgctctccaaacaaagctcggcgagtcgctccaagccaccaatggtttgcttgtttgcaagcgacgaatgtactgtacaggattacaacggtcgacccattcaagttcaaaataatacaaagaactagctgggtagcccacgcaattatgcggctagcagaaaaaaatcatatattttttaagtataattttacttaaaatttattaaagagctatctcaatgttaagactttgaaagaccaaaccttatcatcctcgtgtttctaattacatagtttttaaaatcacaccagttgctacctcttatgtcatctccttctttatttgcttgctcgatctatcactatttctatttattattcttagagcctttaaaaattggattttatagtttttagagtttattgtcacgtttgggtttcgtttttataatttctagatgtcccgtcaaacgttgccattatactcctgtccactatctcttctctttattgttattgagattttaaaaatcgaacataattatagtttgggttcatttttactttctagaagttccgccataccgtcagcggttttgccattatgctcctctacggctcgcccgctgcctcccttctttattgtcattgagattttaaaatcgaacatgattattattggtttttttttttactttttagaagttccgaacctttaaaaattggacttttagttttattttttataatttttagaagtcccatcaaacgatgccactatgcccctctgcagccctcgtctgccgcctactcttaccccgcccgctgcttctccttttcattgtcattaagattttaaaaatcgaaaataattatcaatgtggttttttttctttttactttctagaagtcccagcaaccgctttacttgtttgtttcacgtcctacctgacgtccctccttttaatcgtcattaggattctatttagtgtttcattaacaatttttatatgccatatcaaccgccaccaactctacttatttataggcctgttacttaatttatttcgtcgtgtgttttagatggtcttttttttcaatagtctttatttttatcactaattttagttatttataaattttattcctaattgaaatctttttttttctaatttcagaatttattttttctaaaaaaattagttaataccatattgtgttcttttaatgtttttatttcttattttcaacttcagttgtttcaaaattgtatttatacttgaactctcttttagtttttctaattttggatattattatatttttatttgaaattttaattaatctcgtattgggtccttatatggattcttctttcaatattgcttatttttaattcggaattttaattaattttaaattgtattcctacttgaactcttctttattttcttttgccttaatttcggatttatttttctttttattccaaattttaattaatctcatattgagttcttatatggactgttcttttaatattcattatttttaattccgaatttcagctatttttaaattgtattcctacttggactcgtgtttccttttctaattttggcttttaatttatttttatttcgaattttgattaatctcgtattgggtttttatatggaaacttctttcaatattgctaatttttaattccgaattttagctatttttaaattgtatttctacttgggataaatctcgtattgagtttttatatggaaacttctttcaatattgcttattttttaatttcgaatttcagctatttttagattgtatttctattggactctccttttcttttttttcttttttccgattaatgtgggaatttctagccctcacagcgaacgtggtgtctccttttaaagttattttaataatataatagatataatagttagatagatagatagatgcgagatggtccatcggcatctatctatcacccggccttctctcagaacagtgaagtaccccagtagagtatatactatcatacggcatcgtatcttattacggcttgatacaggactcaattttgaatccactcaatagctgatacagtactcctactagctggttgaacggtaggactacacacacagtacagtgtgcttccttccagatgcatcaacgcgtgcctctgccaccttgggaccagacagctgagtaattatggtgtattttgcagtaaagaactcctttttgggaaattatcagcacaaatccctgggattagtatggacccaaattctccctgggggagtagatgacgagaaccgtagctactgtaaatttggaggtagcacttgtaacttcaagcttgttgagtgagttgtactgttactgttactgttactgttactgtacgccgtgccaaagcatactctgtcaccccaacggctttctcctgtggagcacgcgcgtcgtgcgccgctgcggccgcgcacgaaccccgacgacgcaacagaaaaatttgaaatccacccacccctcccccctcccccctccctcctccgtccaccgcagctggcttcaccttttcctcggttgctacagacgccacggttcaaaacacactctccaacgcacaaaaaaccctcccctaatcatccacgcctcaccggagccaaacaccgccaccacccatgggtctctgtttcagcaagaagcagcaagtgaggcggcggcgagaggagcagcagcagccgccgtgccatgaggccaggaaggccggcggcggcaagaaagctggtgctaaggaggtcgcgatagtcccggaggcggccaagaaggcgccgccgcccaggaaggctgttcccaaggcggaggagccggcggccgacaagaggacggtgttcgtcgtcaaggcggccgcggccgcggctgctgccgaggtcgccgcctcggcgagcggcgaggcggcggatgaggaggcgaagaggcccgccccggaggaggaggaggcgaagcccgtcgtcgtcagcagggtgccggtgcggacctcgagctgcaccaaggaagaggtggacgccatcctgatccagtgcggccggctcagccggagctcgtcgtcgtcggggaaggtggcgtcgggtgagggcggcggcgggcaccggaggtactctggatctaagaggagctacgatttcgaccgcgagaggaggggcggcggcggcggcggcgtggacgacgactgcgactgggagaggcagggcgccgccgtgtccaggccgtcgccgcgccggaggacgccggagcggaagcggtcggggagccacgagaggagcggcggaagtggaagcaggagagtgagccgttcgccagggaggcgcgcggacagcgtccccgcgacggcgagcggcgagcgggcctcgcggcagcagccggggaagatggtgtcggtcccggccagggagaaggggcgggcgccgtcgcccgtgccggccgcgtccgggaagaggtacccgtcgcccaggtccaactccccggcgagggcgggggccgcgggtaatgagaacgccgccgcgcagctggcgcacgggccgtctctgagccggagctcgtcgcggaaggccgagcactcgccgtaccgtcgcaaccccatggcggagctcgacgagaacacgctcggcaaccaccacagttgcaacaacaatggcaggccccaaaaggtaacagacgcatgaaagcttcacacttcagttcacccaatctgagccatcatttctcctcgccgaattactcaaaccatcgaaatgcattgcagaaacctacggagagtggcggcgccctgccgcagaaggtggcggagtgggctaaagatcaggtagccgcaagccggacggcggcgaaggagaagcaggagatcgtggaggtgcccgtggcatcatcagacaccaaaggggggaattccgggaggatgaaggcgacgcactcggtgagcattgtggccgagagcgtcgtcaaccagaagggccggtcgtcgaggagatcttcccacgacttcgacaacaatggcaactcgtacgcatccctgctcctcgaggacatccagaactaccaccagcagagcaccggctccgccgccgccccggcgccagcgttctcgctcccggcctgcgtgtccaaggcctgctccatcctcgaggcggtcgcggacctcaactcctcgtcgtcggagaacaagagcttcgagctggaccggtcggccaacgacaagtgctcggcaaacgggaggtacggcgacggcaaggtcgccggcggcggcacgctcgtcgtcgagtcggaggttgttgtgaaggacgacctgatggagccgagcctgcacaagtacgtctccgtgcgtgacatccgaggcgaggcggagccgcaggaatccgccgggagcaacagctttgccggcaacgcgtggacgccctcgtgggagcccagttccgtcgattccaccgaccggacatggacagcgtcgcagtccaacaacggcgacgaggtggagcagctcagcagcggcgcggtcagcccactggagctgtcgtggcagggcaagcagaagctcccgtcgcaggagccaagtggtggtggccgttcgcgggtgggtccaactggcaatgctcaacgcggacgcagcgctcatcgtggcggcggaggcgctgtcaatgcgcgatccgatgttcgtgctgctccggtgagctcatcgattgcttaacaatgtcaggtggagattgtagtcaggttctcatctttgtaggggcaagataggttgccgtttcagctttgagtttgcgttctttctggtgatgatacattgtttaggatgtaaccatggcggtgacatttgcaatgtatactttgttgttcatttcgctgagctttggtgatcgatttcattatgatttggtgatcggtggttgatctcctgataattttattgatctttggatgaatttcttgtcaggaatagaatgctgtaatttctgatgctgatttgcagagtactatgcatgactgctagggctgctgtaaccattttggtactgcgacagccatgaggaacgcatcagttatccagttactccagtcagttcgagttgggctgacagatcagtcctgaattcagttctcaatgaaaaccatctcagtgtttagacgtatgtatgcagcatcaaatgtagatgagaaaaaaccaattgcacaatccaactgtaaaattgcgagacgaatcttttgggcgtaattacaccatgatttgacaatatagtgttacagtaaacatttgctaatgacggattaattaggctcaaaaggttcatctcatagtttacaggcggaatctgtactttgttttgttatatacttcaaatatgtatccgtatacttaaaaaaaatttggcacacgaactaagcgcagccttagtttacatttcctcatagctacagacgaaaatcaaatgtaaattcaaggaaggaaataaaaaattggcggtcctaattgctatacgaatttgtcaatttggatttgactatctggtgacatgctaccatgaaatttgcaccaggttccagcccaaggggatgtggcttctctattccgatccatgtcccgtagtcaatcaacggtagatgtcatctgtggtgggtcacacacgtcatattcgtcttctcgattggttttctcatctcgttgttcatacatcatactacatccttattattgcctcctctctctcatgccgttaaacatggagggatcaatcaaatcaaaatagaataactgtgtaaaaaccatcgttcaaacatagttttatgtgatttgacgaccaaaacatgttgtttaaagcggagtagagattactgaaaccaatctggaatcgattttgctaggaatctgtcgggtgattttttttgttgctatttcccgtttttgttgccgttggatctgcgccgagatttgtgccaggaatggggtggacgtggtcatacgtggatagggcctcgcgttggattccctggcctgattactttgcactatgcaaatttcgatttccgcgcttgtccgtagccgttttttatttcccctcgctgatcccgctctctcctcgcatttctctctctcgctttccccttttcttctcttctcttctcgttttctccgcgaggcgagagagagatctcgtcggagtgagtgcttgctggagaggtttgtctcgtcggtgtaagtgctcgccggagaggactgtcttgtcggtgtgcgtgctcaccggagaggttggtcgctggcgagatttagtgtttagattttttttgttcgatttgattcagtccaggtccgattcaaattgtgttcgggttcaatctcggttttagttgttttttttgttcgatttgattcagtgtaggtccgatttgctcaccggaaaggttggtcgctggcaagatttagtgtctagatttttttttgttcgatttcattcagtctaggtccgattcaaattgtgttcgggttcaatctcggttttagttgtttttgttcgatttgattcagtgtaggtccgattcaaattgtgttagggttcaatctcggctttagttgtttttgaatcgatgtaatacgatggagagctcgccggagacgttggttgccgtagttttgtttagtttgtctcatcatttttgtgtggcatccaatgttttttggtcggtgaaatcgtgatgctgctgctgcttcgccaagttgcgcttccaggtttggagatttgttcttcctgggctgtgggaagcgttcacggaatggatctgagattttgttgtttttgttgctgcaaagcgttgcttttgagttggggaatggttgtttagcccgcggattcgggggttttaggggaggcttttgattttaggggtgctttttgcttagcaaatccagtttctgtttttgtgcttgttgatgtgtgatttagtggcaaattctaggcgtgaagcaatttttcagaatcatgacatggctttttgttatgtttgtattagtgaatttttttactgaattactgaatttggtagccagcaaatacatgatgtgttcattactttgtaaagcttcacagtgattatattttttatgtcaatgtaaatggatctggatgttgtacttgtgctaaagtgaagtttctacatgattgtgttttttatgtatgatttttgttgtaaagtgaagtttgtattgtttgttcattttaactcatgtccaagctgatgtttatttattgttctttcagatgcctcgtgtccaaacatcaaggttgggtaaaaatcccattgaagttgattctgatggaggtgaagattttcatgttgattatgaagttggtaatgatgtaagttatattttaaatttttattattgtattatgctgtttaagtttacctttaatttggtattacattatttttcttttttttaggttgatgaaggtcctgaacatggtgaaattgatggtttactctctgttgtgctcaggaaaatggtatgtgaatattttttttgttgagttgtgttaatttaattttatattgtttaatgggttgctcaatttcatatttgtagattgttcaagaagtgaaaaagaatttggttgacacttcttctgtcaattttcacaatcccattgtatgtatcttttttttattagcatattttattatgcatggcattttatttgttctattttattgggtttcttgttgcttataatcttgtgttaacttatcaatgaaacggagaattaattcggtcaaaggaaatgtagtactaatgaagtggatagttattttcagattggaattgttctgttttttttttttgcaaaataaaattttatatttgttctgtttggtccatgtgtacaatgcggtactctgaaccttgctaccatgctattataggctactgttagttatgttgaagatgtgagtatttttcaagttgtagttgtgactatacagattcgtatctattctctcaacacagttcagtacagccaacgttgttgagttttttgttttttcttctctcgttgtttggcactaataccttctttgttttctttcacatatcctgcacctaagtatccttggtagctttcatgcatgcaacgtcatattcatgtttcccatgtaactaattcaatctagtattatgcaaacatagccaccataacacgtgttatggatatgttttttttgtgtgtcattgtgtctaattttttctcaagtatatctgttttgatgtgtaatttgtgttagtttgcttggattagttttctcaagtgttttttttgttctacacgcagcagcttttaatatgatatgagcttaaactttttttcggggttgtgcaggtttgtaaggttgcaaaataatagtctagtagtgatggtttctgcacttatagcttagttcaggtttccaaaattttacagacaatttctactaaaattacagtacacttacatgctatatgcattgaatttacaattgtaattttaatttcaaatcactgtaatttctacttctagtgtttgattttgcatatgtatggcagcatggatggtgctattaagattgggtgctatctcaagtatatctgttttgatgtgtgattttgtgttagtttgcttggattagtttcctactagtaaggtttcagatatattatgattttaaatgttaggctatacagccgggaccaaattttatatgtttctgttcatgagtgtatatggttgcctcttaggctttatatggttaccccctcactccctacctccctatgatttcttttgtttttattcatgctaatgtactgttctggtatatgtaattgtaattattatttctttctcttttagcttttaaatattataatttagtaaataagtttttaacacacttctacacttgttttttaggataaaaaaaaatctaaagttcattcgaagactgagccctcatatagcagattctcaacaaaatatttctcaacagttctatcttctttatctcctgatcagaagcgtattattggtgactatggttttaattctttgctgatgtttgacaatgcttatgtcccaaacaaatttgcttcttggattgcaaatcatgttgatgtgaagtcttctcaaattgttttaaaagataaagtcattgcaattaataaagaatgtgttcatcatattttgggtctgcctattggtggtatggagttcccaactgattgtgatgctggaaagtcttttattctttcaaagtttggcaagagcgctcttccatctgtgagattctttggtgataagttcatctgaaaggaaactctctctgatgatgaagttattacttcatttttgattgttgcaatggcttgttttctttgtccaaactcttctttggtccctagcaccaagtatttgactgtgtttgagaatgttgatgagcttcggtcatatgattggtcaaaatttgtgtacgaatggatgatgacttccatcaaaaagatccaaaagtttagtaccttgggtggatgctggtttctctgggcagtaagttattaatttttttttccattctctttgttccatattattattgttatttaattaatttttctttgctttttcatattttattttgctaggtgctttatctggattatgttgagtttggtgacaagaatgttcctattggcaagaatgttcctattggttttcctagaatttctcactggaagaataatatgattactttgtattctaaccttgacaaagttgatgaagaaaactttggccttagacccattaaggatttcaatgatacaacttatttcaaggtacatgttcagttcaattagttttatttatttttacttgtgtttttcttttcataaattaattcttatcattcattcatctttacaacctaaaattttccttgttttaggttgtaccccctgaaaatagaattaatacattcagagataaattggagtctgctattggaaccatgttacctgctttcattaaggagaaaatttgttcaatggttgttagtcattgttctgccaatcacattgttgacagtgagtcttgtgaagatattgctatcagcattatgctcttgctatgtgaacatgctggttctagatatggtggtgatcctgatgaaaacttaatttttgatgatatcaaccctgggtttcagcctaactatgcaattgatgttgaaaatgaaatcccttgtgatgctcataacaatggaagtaagttttcttctatgttcttttaattttattatattttttaatttttcttctatttatatattctttgatgttttatttttttaggtaccaataaatctgttgctagtaaagctaatgaaacaagttttcgccatacaccttctcatgataaggaattgggggtatgtgtctgcttcttatgattataatttatttttttagcttaagttttctaactttatgttcttgtttaggtaaatgatgattctgttattgtctctaaatctgctgttagattttccctttcaccaaactttgaaaaaggtacttggtgatgcattgttaattttttattttcttaagtttgcgttgctgttaattttttatttttgctcagatcaaggcttactaacccctgaagttggatatgctaataactccaattcacgatttgaacattttcgatctggtttgtgatttttctttgctagattttatcttaaattttctatttaaaaatttgtaaattctgttagttcttatcatagttattttgccagcttcaggtcctactgtatctgctgttgctgctgttaggaatgttgcaaataaaattaaatcaagattatctcaactcaacaatgatgacaaaagaggaccattgttccctgatttaattgattcttgtgaagatgaagctgttggttatgctaagtcactttcatgtcaaaaggaatatcttaaccctcgatatgtcacttcctcttcatcacaggtattccttttttattggcttgtgtcttttcttttttaaaaaattcttgaatagattttgtgatgtcatgtttctgtatgctttattttttgactttctcttatttttttatttgttgtagcctggtatatctttacactgtcttgacaattcacctgttcaagtaattggtataaataataatgaaggaacacgcagaactcattgtattcagaatgtgaagaagaggcgttttgatgatgttattgtatgttcttattcttgttgactatatttatatattgtcctaagttacttttttttctataattatttgtttctgcttttttttttagaattctcctgatgtggaatattttggtcattctacatttcctgattgctgcaaggtgttgtgtacccagactgataatttgtataatgccaagaacatgttgaaaagtaacaacctggatttgagttctaccggtggaaaattacctccccatggccctagaagagtcttagttccttctcggaaattttcagatccttatgttctttctgttagacgccgatttctagtgtcagatcaagaaaagagacattacaatgcaatatgcaagttgtccgagagctctaaatggcataggtacagtttcctttacatatatttttatagtttttgcattatgcatgtttcttactttgcttttctttttatatcttttttttttgtagttatgatgctgtagacattgataatgttagagcaaaattctcttcttttgggcaatctctcatgaaaggtggtactgtattgagctatgttatcaatgtgttttgccgtgttttgttcaacaacaatcatccttcaaactccaagagacactatttcttctcttctattggtgtaagtagttatttttcaaatttgtgcttttttctgttaatgttgatatgttacatattttttggtatatttatttcacttttaattttttttttcaggaactattgttaactgatctatcttgtgctgatttgagcaaggtgaaaagatcgtctcttggagcagctagtgctaggaagttgcacctttctgacatggtatttttttttgttttcatgctcatgtaaattttccaaagttatgttgttaattctgaatgattttttgcagctatttttccccatcgaacaccttgaacattggttcctttttgttgttgatataaaggacagaatgttggtcctcttagattctttacatgaaaaaggtgatccctattttgaagacattgaatgcttactggtatgatattttaattttaaatgcgttttcattcagtttttttcttcttgtttttttgtagttgattgattttttttattttgtattcagatcaataatttacagacattctgggattcttattatggctcttcaattgattttactactttgaagaaagtttacccttgtgttccaaaacagagatcttggtatattttttgtgtttaatcttttctgttcaaataattggagcattgcaaaatacgttatttcaggaatgtgcagagtcacgcttgtattacattacttatttgttgatgtccaaattctcaatacttctttattttggccaatgttttctaattttctaaatatcattaattgtcctctcattggggcattgtagaatgttcttgcttcatttgttaactagtgaaattaccatgtaattctgtgagctagatatttttttattctgtgtatgctatgctcacacttttgctgtgtattttaatttgtgatattactgtggtgagtagtttgtgtttacattttgtgatattactgtgctgcatatatttttatatttttttgcgtattgcatatattcttaggatgttagtaataacacttgcccaatttttaacatactaataataataataataataataataataataataataataataataataataataataataataataataataataataataataataataataatacaagaaacaagaaaaaatgccattgtggtacaactaaattcaacaatatcatgaacagtactacctaggttttatttctttgttttttgtaatttaaagagttgtttcaatttttttttgtagctttgattctggaatttttgttatgaagtgtatggaattgtggtcaccaagggttgttctaccaaatgaattttcttcagatgatattgacaatattcggatgttgtatgcaaatcagttattcttccatccaacgaataaaatgctgcagactgaagttgaagaagttgtgctcaattggtttaatcctgtaagtgtgtttttatttttttttcctattcttgttttttgatacatttttagttatgaaaaaaatgtttttcattttttatttgtatgctcaatttgttggtgaaggctgaaatttttcagaaagatagttgctatgaaaattggtttaatcttgtaagtgtcttttattttttgccattcttgttttttggattctttcatagttttgaaaatattatttttgtttgttattgtaggatcaatttgctggtgaaggctgaatttgtccagaagattagtcgctatataaaactgtagtgtgtgctagcatagtggaatgtataggatcatagtgaatgcatttttgcagtgccattacatattcctgtagtgaatacagatgttcacttacatcaaatacttttagtatgaatacacatatatagtgtgtgtagtgcagtaatacagtgaaaaacattaaggtctaatactttcagtctcaaaatttgacatccttgttttctgtcttctaatttgatttgttcttttttgtgcttccttgatctttaggtagcttgcttcctttgtcattttcttcatgtttcttcttcctagcgggcattgcttgcttctctattgtccctgcaatacaaaaatttatatccattagcttgatttttttgcttgcccatgtttgtaatattttacatattattcatttcttttacttgttgttgtagacttctgtattttctttgtacttcttgcaatttgcatcagcgggcaattttctattgtgtgacttgttcttccacatcttgtacaatgtttttttggctgttcttttatcttctctaccatcccttttgttcttgctgattttttcccctttgtgttagctatgtcagggtcttgaatatcttcttgctcatttgttgtttctttttctgcttgatcctcacttgtgttttccaccgtgttgctttcatcaattgatgcttgattttgagctgcatcttcaattatcaagtcaaggttgctatccag

SEQ ID NO: 8367 - DNA, 69850 bp, Oryza sativa
tattagatcagtgtatgttgcaattgttttgttggagcttgtcgacttggtagtttagaaacttagttagtacctaaatggggcattttgctgctgcttccttcaccctcttgcaaattgtagatattaggacttcttgcatatgccagcctccctgtaaaatttatataaatcattagagcatatgttagaatcaacaaacataattgtagttacctttatttattcttagagcaaaatttattcaaatatattttctgacctggagccatgttgatgtttcttttgcttccttcaatctgcattgcatcatttttgctctcctctgattgttgtctaattgtttctccttcttgtattgcttcacgacctgtgccatgggagaaatgaagtatatgaggtactgatttgttaaataggtatgtcttttgagaatcatttgtattttttagcatgtattgagctttagcagtatatgttcagtgtggcatttgcatgttttatgtcaaacatgaatatatttttcaaatacattgtggttgcaccaaaattacaatacacatacatgttacacttcaattataccaaaattatagtgtacttacatgacaaataaactgaatttacaaatctaattttagtcataaattgttgtaattttagttataaactgaaccacatttgtagtgcacttacttgtcatataaactgtttttacaattgtaattttagttataaatcactgtaagttttatactttttggatttattacatgttgtatcaactgaactttcaaatgtaattttagatataaagcactgtaattttttgccataatatttaggtcaaattatgattgttagcctagaatggttttgcatatatttttaaaatttctgtatttaggcacatatgtgattgtatttctgtgtgtttggtattgagtggcaagtgaaaggagtggtatatatgtgattattatatttggctatgtagttgaagtttttgaaattgtgagatgttttgtacttgaataagtagtgtagtgtttcaataccttttttctccatggatccaaccttgactggttcagtaaatttcattcctgcaaaattcatggaataaattagtatacatgtccactgaaaccatcttactagaatgttaagtattacatatttatttacatagcttattcacaaaaattacagtgaagttacacgcaatataaattgtttttacaactgtaatttctaattttaattttaatttcaaatcactgtaatttctacttccagtgtttgattttgcatatgtatggcagcatggatagtgctatttaagattgggtgctatgttaatgtgttttgagtgtttaacccttttctagttttgataacaatggtgtgaaagtagtagtgtttaacccttaatgtattttttaatattttgcatccttcaccctgcagctgaacattttcctgtgattttttttcaaagttgtactatgatattttttttaaatttctacatgatgttcagatcaacatagtatgtgatttttttaaaagaaaatacctaattgtagtttttccttgtttgtctccccagattccttgttctacctgatgctaattttgacaggatctgcatatgacttcatttctgcaaaattttattgaatgtattagaatacagcaatacatcatagagtaatacattataacttacacaacaaatgtataaaaattacagtacacttacatacacaatgacctgaatttacaaatgtaattttagttatgtaggacagtaatttttgtattccatgtgtatcatctagtcatgttgatctaatgaatctatcctgatctagagatatagatttgatgtgcataaatgattctcaatgatgatgtaactgttgcataatgtatatatacttgtagttgtattagttaaataagtactaaaatattgtggatcgggctctgcatgtactaagattgtttatatggcagatcgagtcatcacacatttccaagatattgagtaccctagattgtttactatgatgttcttggagtgatattcttttaatcctagatttgatttgaatggattattggaaggtactgctcctatataattcctgaatgttctatataagagtattaaatgtgatctatggtctatattctaagccaaatatatagagaactatgaatctattttgctagttccaaattggaaatcactaaaattttatccagccatttgtcttaaatgagtgaatacctagtattgaggagtgaaatatgcaggtgttctgtatgacagattactaatcaagcatcattttatcaattacacttcaataatgcaaaaaattatgttacccaaatttacagtgcaattgtactaaaattacagtgcacttacatgccatatgtactgtttttacaaatgtaattttagtgcaaatgcaatgtaaatttctacttttgagcatatatgaatgtgaaattggtttggtgggttgttttttagtttctgaacttgtttttcattatttatcccttgtgcatatatttgtttttcatatggattgtgccctataccaattggtttgtaactgaagtttactgtggaacatgtcctaattcatgcttgtgttctcttaattttagtttggttctgactccatggatctcaactatcctatccagcatcaagaccaaacccagcagccatcatgcaggttagttgtctctaacccatatcaccatactactcactattgtggttttattttcttttttgtgctgcccaactgatacatatatgttttggaatatatgatgtatttggtgctggaactcctgagttcatgtttgaatagatgtattcaatttttaggtagtaaacaacagaagttgttctgtatggtctacttgtttgattgattgataattttacagtgcatttgtactaaacttacagtgcacttacatgtcatatatactgtttttacaaatgtaattttagtgcaaatgcactgtaagttttactttcagtgtatgaactgtgccctgtattttgttcaaaacactccttatgcatatgggatgggggcacgtatggtgctatgatctaagatttgtagacaattttgaggatgagcacaggtttatggaacatacctaatttggatttcttccttatttcctgtttctcccctgtgatttcactttgatttgaagaattttgctttggttcaaccttttttctcttctttctctcctactcgttctccatggtgtgcgtggtgttgcttttttggatctggtgtgttaatttggatttgtgtttgtcctttttcttttagctttcttggcagccaagttgatgcttttggacagggttgactttacttctttgggcctctcagatatgttctttgtttgatttatttttctaatttgttgtttgggccagattgcagcccatgttttatctgtttttttagtgtgttggcccagtcatttttggccttttttggctgtctgttcggtttttttttaactctattggatgaaaatctaagggcaaggaaaaatctggatgatttttgagaaaaaatcacccgacagatgcataggtggttccatctggaatcatttttcttcccgagttgctttgccgttgtgtactttcagcggctttggttcgtgttcctcgctgaaacgatagacaaaaatcactcacaaagtaaagcgcccaacagaaatcactcaggattgcaagagattggaggggagaatgaaatctccattttcgttttcgatggagatgattcctccaatatttattctctgacatgtaccaagtaccatggcctgtaaagaagggagaagatgaaaggaaaaggctgcgggtgattaggaccaaaaccatagcccatgtcagccgcatccgacccaaagggcctaaatttccgataggccgagaccatagcccatgtttctctctagaaggaagacggcccattacatctaggcccaagcgaggcgtgacaaagaaggacccgaactgcggaactgctgctacacatcaacggatcaacccttgtccttcactcgcgaagtcccctcgaactcccaggcgcgcaaaaagtcccctggggaacttccagcggcgcacccaccgccagcagcagcagcttcgccgcccgccgacgccgtagcggagggcaagccatgaagttcaaggccttcttcaccgacgacggcatcgctctcctcgacaagcgtaaggccctcggggggcacgacttttcctccgccgatcccaatctctctctctctaccccgcaattcgtcgagcacctcacgcgcgtcgcgccgtcttgtctgcccccgcagggttcctgccggcgatggacaaggtgggccgcctgtgccacgtctacctcacgcccacgcacgccatgctcctccacaacctcctcggacccacggggacggggcccgacggcggagggccgcagtgcgtcgcgcagttcgccaaggacctcctcttccgggagtacagcgtgtcgtcgcggaacggcaaccgcgtggccttcgccgtcgacgtcgcgctgctccaccgcgccctccgcagcgcgctcgccgtccacgcccagtcgccggccgccggggacgcctcagccgcgatacaggtgaagctcgtcaacaagctgccggccgggtcccggtctgcctcgccgttcctcactttcgagaccaagggagcccgctctgctgtcgtgcaggacgtgcccatctcgcggcccctttcacgctccgacgtcgagcggctgcaggctgccctcgactccgcccaagagctccctcaggtgcgatgcattttactgaaatgctcgtgatatttcattagattatagatttcctcggagtcggatttggacgcccaaatgtggaactagttaatcaaagttgaataggttttcactgaacaatctctgctgggattattttggctttagatggaggcatcaaatgtacatcccttagtgtaggcttttctcattcgaaagcttgaactatggaattagtgatgagttggattcaacttgggctgccttatcaaattgaaacttgaaacctcacgtgacatactcatagttcactatagcaaaagcactagtccagtttatttcagtcataagaaactaactgcattatttgtttgtaccttgagaaaatttataaatagccaacaagactcaggatcaccgatcacaggcggtacacactaagttagtattacagaagcaaaatgtagaatagcaagtatactagtctggaactgccattcatgttttattttcgtcctgaaatcttagtcatgcttctttataataccatgtcaaggagactaaattagacaccccaactaagttttcctggggaattgtgtattcactcagggaggtttatgttgatttaatataaacgtcaagaatcacagacaactaaaagtatcttctatttcgatgattctaatctctaaatttattcttctttgcaaaaattgtagccctaaatcctaatggatgttgtcatgttgatacttggtttctgttctttctgtagactctagttcaggttccagatctgccacagttgcagagtttggtcgatcgtctaaaaaatgtcggcgatcttctgacagtagctgttactcaatatggtgacttacatctacacgttgccacttctcttgttactgttggttcagaattcaggaaacttcgtatccttggtgttcgtggtaagctgctctacattccaaagcaagtgtcaataatgtctttttagcagtgctgtcattatgttgaaattacctttttgttttaacgtgaatgaaattacttatcttatccatatttttatatgaattttctgcatttcagcaaccgcacctgttggtgatcaaaatttgagtgcttccactcgtaccaatatggcaattgagagaggggaggcgctctcagtggtattactcctaagagcttcacgttttttttttttaccatttttcatgcagctgttcacaagtttctgtctttctgtgtttttacagcaagtgaatatgaagcacctagctaaaagtctacaatgtcatttggctaagcccgactgtaccttctatggtgtgctttccagctatttctgtaatcttactgacaagttccaaatttgtgttggagagtcactttttgcttaaatactgtcctttttaatggcacaggtatttctcctggtggtgcttgcttgactgtgatattccagtatttcattccaggaactagactgacggacaagtccattagcttctactgcaggcttccagtccttgaccctggcagttaaacatattacagcgtggtaattactgacttgcttctgatatcatctaaggatatgcaatactattagcttagctactgtacctttctgttcaatatcttactatcttatgtgttatgacttgcttgtggactcaatatatgttggctcagcaataattcgctattttggaacatagcatttttattatcgatacctgcaaaactgaactgcttccactcattgttgttgtgatatcacttcgttccaagttgagccagtctcctatgcatgcgatctatttcctaactactatttacaatcccactgcttcaaacatccagatctcagtatcatagaaaaataaaaggaaaccagatttacggtaaatgataattacggaattatgttttttattaaccgagtacaaaattttcagtacttcccttttgagtgtatgaagatagtaatcatttttggagcaaatgaaacatttttttatcaatgattgcatggggcaaatgtatactcttgagccccatgtccttggtctggcataagagggaccaaaatcactggaatcattaatcttcctgtacacgcgtcctgtactagccacctcgacgctcttacatgtatggaacgtataatcctacgaacagtttttttatgcagtactaacagtaatttaacaaaaaaaagtgttggtttttacaaaatacaaataaaacttgaaatattccatgtttccatgccaaatgtttgtttgaaacaagtttatctatctaaacgttacaactttggtactgatctttcggcaagcgagcagaatcaatgtgatggtgtagtgcgtattttgaacggtgctttcgcctttagggccccaaccatttctttcattgttaatattgcggtactgccattctagaggaaggattttttttactgaatgtagaactgtaaattatctgtaaaagaagagacaggtaaattctgaaccaccagctatgtgtcaactctgcatctctgatgccatttttcacacattacatgtctgtatatacctgtattccgatcagcttgagcttcagtttcaaaacgtataaataccagtttctctgatcttagatacatattccaccaagaaccggcaagaaatgggcctatatctgctaacagtttatattctagctttcgttaggaccaagctctggatccacaacgtagcctctgagggagggtgtcttgccaagaggttccttcttttgaagccttttccttgcaatgtacccccgaatccatggcagtgcatcctcatttaccttgatcatgaggaagaacagaatgcggtagatgaagatcatgctgaaaattactgagagatcaatccactttgaccggtgcacgttgatctggaatatgtacttcagaatgaagtctccagggatcttcggttggtctgggtactggttgtcaaatacgagaccatccatgtcattctggcattgcccctgtcaggttgataaaagtttggtgtcaaattttcttcaagataaaaatttagtgtgtttcccctgtcaaagagtgggatttaatttacctgcagcgcccagtaatggaagctgatgtactgcatggggtatctccaaacaggcttcggaatgtcgtaaggaagtctaaagtatccagagacaagcataaatattccctaggaaaaaaaaagtaagacgagttatgtttactgagttatgaagttctgaaattttaattgaaagaaaaagcgtttcctttgtaaggcagcaatgtaatgcggccactaaaggataggatcagcagttagaagaacaaaacataggaataagatcttgaacgacctcaagctgtctttaaactgggatgggagtagtgtacagtaatgctgggtagcgtacggtaaagttgtgctgtccagcatttatttctttgtcaagcttgctggtttatttgactcatatcagattatattagaacctttcaaagttttgtaagctctcattcatgaacatatcttaaatgccacatgatcctctgggacaatgccatggaaaaaaaaacagacttaagaactgtaccagacgggaacaaccgagttcggtgtttcgatccaatctttctatagcactatatttaatacatttggtcctaattaatatgattgttaacatgatagtactttaaagatagacctaaatgaacatccattacttcaacaataaaccaagagatataggttaagaaagcttatgaaagaagcataaagatgtacctgaatcccagctcctataatgatccccatgaggaaattagggatgacacttgcaatggccatcatcaagctctcaaccacagtgacgctggcgtagaggttgagaacgaagaagatgtagtgggagaaacctgggtgaaggcgcaccatgaagtagcatatggtccctgacaagaagcatatcaggaccaagaatggcagcgccgagattgtgttgctgatgacaaaagccgcgacaccgtaatgcccattcagccgctccctttggaaaacctgtcaatgaacaagggaaaactgagcaaatttggcatggtaattctagcatccagatgaaaccgtttgcttggaattcaccttcatttcttcaacaaatgaagggaaccctccaattgacatgaaagtgacgaatccgaagacgaatgcggtacaggcagccctagcctgttcagagtgtaaaccaaaacacatcagaaccagccaattaatggattcatgacagattactcatctgactatgttttttttaatataaacttctattacagcattccagtcataagaatcgcttatcagttccttcatttcttaccaggatggatgtgtacttggtgccgacgtcatagtagatggtgccaatgcagacggtcacgaggagatagatgaggagcctcagccagtaatacccgaagtcccttgacatgttgatgaaggagcgcttggtcagtgtgcctgcctgcatcaagaagctagcctggcttcctcctgaatccagcacagttcctttctgcaacgaataacatgggtgtgttagtgttcatcctgttattgcctgtcctggatgcagtcttaactatacgtgggggcgcaagaaaaaaaaaacagagaggaaaaagagtgatatcaatacgcgctgctgtattagggtcgccaagaacacgtaccagtcgtgagatgtcattaactctctcccttgcagcgtagtagtactgggacctgctgtaggatgcaaccaactttctgatggcttcagatgtggtcatcctgtccagaggatcgtccgacctctcgatcttcaatgagaatgcccaaaaattagatcattttaagtgcatcgtgacacgaacaagtttgagcagatcagctatgaacattggtgtgtcttgatctcttcttacccttgccttcatggaacctttcagggtggccttcaccttgtcgaagtcggagttgacgcatctcaggaaatgatccgatggatttctcagtggcgggcacgggaagccggtctgggcgaagaactgcaagcacgagcacaagatggtcacgttagaaaccatggcgaatgatagtggtgacagatatatatatatactggttgctttctgaatctggtgactggtgagatgacttacctcgcatgcctgcgatgcttggccgaagtagacggttttgccgctggagaggaggaagagcatgtcgaagagctcgaacacctcgctgctgggctggtggatggaggcgatcaccgtcctcccgtccctggccagcccccggagcgtctgcgtcacgaagaacgccgacgagctgcgcgcatgatcaagccggcatcacatcgccgcggtcagtccagcgcacaccatcagtcagctcagctgtgactggatgcagggaggacgcgtacctgtcgaggccgctggtgggctcgtcgaggaagaggaggcgggggcgcatgaggagctcgagggcgatgctgacgcggcgcttctcgccgccgctgacgccgcggaggtgccagttgccgatgacggtgtcggcgcagtcctggaggcccatctccacgatggtgccctccaccagggcgcgcttgtcctcccggggcatcttgtccggcagccgcagcatcgccgagtacccgatcgtctcccgcaccgtcagcgtcccgatcaagttgtcgtcctgcgtcacgtacgcctaaaaaaaaaccctccgtaaacctcgtgtttcaccgctaaatgcacttgctttgctatagataaatgaaaatacacttatcatatgtcatagataaatattttttttcgaataggttctcgcttgtttgcagggccggccctgacttttcagtggcccggtacggaaaaaaaatgaaggcccccattcaccataaaaatacaagataatatttaaaaactcattgtcattaatgaatttcacactaatcagtttaaaatacaatcaagaagtcacgatatgctcgatcgccgatcggttttctatctttcctctaaccctatcagatctgataccatagtatacattttttggaggcccctaatttttagaggcccagtgcagtcgcaccgtccgcactgtctcagggccggccctgcttgtttggttattggtattcactttttggaaactaaatattggagtatatatattagaaaatatctgaggacaatttgtaataataactttaaagagcagtgatgagatggcaccgctagtagagtcatttaaatgagtatataatacgtaaatgtgacggtacaaaacggcgccgtagttttggtacatgtaataatggtgtgtacactgtaaattaaaagacccgcctgaaaagaaaaacgtagattcagaaatgagctgatacttttttttcatgctgggcgagcttggttacagctttgagcctacaggtttggtcagttattaaggcattgaaatttgaaaacgaccagcaaattaaacggcccaagttgtctcgctctatgaggataaaccatcagatttgtaatactattttttttgtatgcagaaaagtccccctccttccttccattactcctgtagtataatcgttggtaggacaaaccacgcggtcactgcagctgaatggttcatgtcaccataaattccccacaggttcgatcacgaacaaatccaagtatatccaactgtctgtatttatgctatgtaggtcgccgcaccacaacctctaaatctcgtctttcgaaactactcccactagttctccatctcttataaaaaaaagagaaaagagaaaaaaaaatctcgcgtactacgccccaaatgaatggaatcagagatcgaagagagaaaacagatcgaattgattgctgcacctaacaagcagcagtacacgttatgtgcacttatgcttcgttggggggttatatttacagcctttcgccatcggggacatggcagatgacaaaagtaattaagccctgcaacccgctggatcaacgagcggacgtaggtacgcgttgcgtttgtccagtatgttttgatggcgacgataattagccggtcgatcggaccgtggtcgcctactcgtaaaacgccacttgatgggagtgtgactgtgtgtttatgcacatggcgccatcaacacaggctagggctagctagttcgttagttagcttgactattaatgctgaaacgggatggatacttattatggatgatgactgaacttatctagctaaggagacagtaaagtatagcaagggctgtggtacgagacaattttgattcctagaaatggagattttgttggataaaacaagtgaagcaagaagctaggtatggagtactacatgagtatatgatttttgtatgcgtaccgcggcgccgaaggagagcttggccttgcggccgttgaggaggacgttgccggagaggaaggcgttggcggcgaggcggccggcgagggcgtcgaggagggtggacttgccggagccggagggccccatgagggcggtgagcgagcccggctcggcgtagccggtgagctcgtcgagcacggtctgcgtcttgccggggccgagcgccacggtgaccgagaggtccttccacgtcagcctcgccgacacgtcgccgatgagcgccgccgccgccccgggcatcgccttgctgtcccgccacagcgtctcgctcagcgggctcagccccaccaccatcccgccgcccgccgacgacgcgttcgcctgcagctccaccatggcctgcccggccgccgtcctcctcgtgtcccctcctcctcctcctcccgctctcatggcgcgctctagctcgcagcgaccgatcagctagctagctgtgagcgacgacgcgatggcaagcgaacacgaacacgagagagagagagagagagagagagagagagatgcaatggctgttttgctagaggggagaggcagcaagggaggagttataaaggtgaaaagcatgcaagcataataaagaagggaagttaatggatggatggagcaatcagagagagcaaccatgggagggccactacttaacaaaccgccaaccaaaatgtcttcttttaggctttggctggcaggcagatgagcccttactcctactcgaatcgatcactagtcaccactcctgttctacatgcaacgtgtggtacccaagtatggaacacagtttttttttttcgacgaagtgtcgtgtcttagaaatggaaaatactgttggtacgtacagtactagttttgttggattataaggtgtaattttcatcattaatcccaggtagtttaatgtaacatcccgtgatcagtattctgtacagataaaatatctacagagcgtgctagcatcaaataattagagaacccataagtacaatatactgtcactatatactagcaacgaatggacgaattaaaaattttatgaaagttagaaagggttttaaataatttcatggttgagacttgatccagtctaatttatgctcgatggtgccggtgcagtcgctggatcttatttgtgcgcctgcgagagacgatgacatgcgtcacagtttctgatcaattttgatcatcattcaaaataggggtataatatgtacttcgattataagtgatcaattaccgatcaaattgtaagttgtactataataatagctgtgcgtgaaagtccttaaacattttgactcttcctagctagactaacacattcttacaaccctcgatgatggtatcaatttattttatctagattaattatttttttattaacaaaaatatccaataacaaataatacatgcacacgtatatgccgcgcaatgccaattcacaggtcgtacgtacacgggtagaacaaaaacagtgcatggttttacatgacgtctccagtggcaaaaataatacactccacaccaccacaactacatgttgttgtagatgggagggaattaaaagagcactagtcaatttaattaggggctggctggcgaagcagcaacacgttacggcgtgtgataccatgtccacacacgcacacagagcacatgacgagacgagatccggcagcagcgagcaggtgcattaatagggtactggtagacgttggtgtcgtacttttattgcctgcccggccagcccagccaagccagccttctttctctccctccctctcctcctctactactctcccttcatcccgataataattctcggttgctgattcccttcatttaatctcgaccctcgccccgtcttacatttcgaaattctctttctggaccaccatcaccgcatagtcacaggccagcggtatttccctccatcgcggtgcaagacgataattagtccatgatcgatccatcatgcatatacctaggaccgaactggaagaagcaccctagcgtattgccgctagtagctagctagccaaatttgcttcgacttttgcggtgacgtacgcgcccatatacatggcaactttaggcgtcatcaccggggctcgtgggcgtgtccgcttccagatcaatggagtccagttgctcgtcggcgtcggcgccgcgagatcgagctagctagcgagcgatcgagtcgcggtcagcaccatacctgcgcggctgggcggcgagcgctactagcccatctggtaatacgtagtactgacactgtggcgcgcgtctcacctaccatctccccaacgagatagaggagtcgacggtcaaacgtcaaagctgtccgcttcggcgcgggagaggcagagtagtagtcaacgaggcgttgggaggcagcgggcaggtagaggcagagccgccatccagtagcgttgctcgtcggggcactcgcgcgcgcgcgcgcgattcgatcagtcgggcaaaccgcccggctaacttacgcacgtacgctacgccgttggacgtccgattctggccgtaatgaggtcgcgccgcgtgcagctccaaccgcgcgcttttatcattactactatctcgttccgatccgtaatccgtttccgtccccgcgcgccccacccgcctcccatccctctaggtctcacctgaccggaaaagccatatactctcaaccgcggtgacggcgacgcgcgctgccgtgcgtgcgtcggtcgaggccgccgcccagcacgcagcgcgcggtgcaagtacagtgtagccgctgccacgccgatccgtgtggggatttctccgacgcgcgcgcggtgaggacacggttggatcacggatgggaacggggagatttccgcgtgggaggggaaggttctctgtcgatctgtcactgtacatgtagcgcacctgtaaccgttcggcgtatatgccattcagggtgtcaattcctcaactgcaaaccacacgcggcgctactcaatgcagtacaacgactgtaacagtgatcggtattgagagagcccttgtaataggacgtcaaatgttacgtagtatcggtactgttcacttgtagatactagatagctatgcatactagctagcttaatagtaccacctatctaggatgtgatatgatgatgttaggtccaaactggcgtacttactcctatatagttgcggtgaagttcaccatccaagccacatacgtgatgattctgtacgtagagattaacagtagtttgttggatggtgtctctcgtctatcgtcaaaaacctgaaagtgccatcgatcccctacaactgcactactaccattaagtacacggatgacggatcagtacatataggggtagtactaaaagtactggtatagtagtagctcgtgcagttcatcgatcattcacgtggaagaaacatagtacgagggcgaaaaattatatccgacttagcaaattctataactcctgcctatctacctcgtgcatgagacttgcctgcttattcaactgaatctatatatataggaaagtaaattgtggagagttaacatcacgacgaggaacaggaatgggtatcgatcgtgaggtgaggccccggggcaacccgcggaatggaatctcggtacaagggaggaaaatctagcaggtgggcacgcatttcttgcacttgacaacgcacttggtggacgggatgtggctgaggctgctactggagctcgacctgtagcacctcttgccgcacagcaccttcttcttccggcacatgtcggcggggatgcagttcgcggcggacttcctcgccggcctccccctcgccgtgctcctcagggacgccctgatcgcgtcggcgccgtcgccggtggccgcggcggcgtgccacccgtccgctccggcccggcgcggcgccgcgccgaggaagtcgctggccttggagatgagctccctgagctcgcggccgagggtggtcgggatgccgccaccgccgctctcgccggcggcgagcgagagcttgctaccacccatggcaacggcgagcaggagcactatcaggaagcatgatctcgtcatggctgtcacacctcgtgatgttacagcggtacacatgagttctcatgtgaatactgttaccctcttatataggagggtcattgcagcgatcaaacgaaggcatggaagcatttgcatgaactacctaatttgcagtgaacatcaaacgcgtgatgatgaacaggcagcccaggtgtgaagtgtgaaccatggacggaacagcttagcaattaatcggcctgcctttccttgtaatagttccggcatgcttgctgatgtgaacgtcggctagagaagggtgcatcgccgcctggtcaagttgtttgcttgattgtagtacaattttcttttcatacgccagtaaaagacaggtgtacagaaagaggcatgtcaagacacctggttcattatatacacagttttaactaggacaacttatttcatctatcctgaagagtgtgggttttatattatagtgtggttctttagagcaagcaaaatgcaaataggtaatatattcattgagttcgttctaattctacaactaccgagcagggtttcctaaaccgccggggccggggttaccgcgccccggcggtaagcacgataaccgcggtaaccgtgaaaaaccgtgcaaaatttatcaaaaattcaaattatttttaaaatttatttgaatttaaggaggttaccgtggtaagcccggtaaccgcgcggtaaggtaaaccctgctaccgagatcattcaaccacactcatgcataggattgtaggactaggatagctttcagtcatattcatacataaatgtatataagaaaaggtatgcatttaatcagcatgtccggattccagaagcaagcttcatcaggaaggcaagaaagccaaaccatgttacctgctataataaatttaaattggatacgaaattggtgaagcgataataaaatttaagccgctcacttaaatcattctgcaaatgttttatttctacttgttatccttaagcaagcacctttgcacttgatggcatagtttctccaaggcaagataagtcttattttcatcacttaaacccacacaattctccaatttttgactgacactaaactgagttcacatgataattccatttttcagtgaaaggttatggaggtgaattccccacatttcgtcagcattcaaagacaaaactttttccaacaaggggaagtcatcatcaagtagttagcagctgcattgattcattacttgtgtcacgtcagtggctttggattcaaatcagcaataacagcttacggttctggattgccagctactcagctactccctccgtttcatattactttgcattagccatattcatatagatgttaatgaatctagacacatatgtatgcctagattcattagcatctatatgaatgtagccaatgctacaaagtcttatattgtgaaacggatgaagtatttcataccttaaggtccataacaacctgcaagatggaatcatgaaacttacaggcaaaggatattctgcagaccagtcttgctatccatcattactgattaagatagttggaaagcacctcccaacaacctgcttagcccctgcatggttgagcggaagaaaataagagactataaacgagcatgatcagctagagagtagaggaagagtacgttagttcaaactgaaggttagacttgaatgaagaactcaaaatggtaccgactaataaagttttcctttttatcagagttttgcatgtggagaatctatacattgagaataaagcaacctgtccaaccccccatgttaaatgacactagaccccccaacattaaattagtagccacaaatctcccagcagacatataacaaacaccactgtactgtactgctgtactgctgtagtatccaactatccatgatggggttaatacgttgatcacctgacacaaaccgttgacaagaaaagcaaaatagtagcatgttacatacttatatagagaaatatggtcacctaatttctaattcaatcatgattaggacacaaaagagaactggcccctccaaaaataaagcaatcaacccaatatactccacgccgacgaaatatggaaatagaagctcattggaatgacaccttttttatgctcatgaaagagggagcacagaagataagcaatttggatagattttaacaaattataaagttcttattataaacctaagaagtgcaaaaatgagttccaaacccagaaatcccctataacctttatgcattaacagtagtgcgacagaatactatgattctacagttatagaactccttcggcatgagtatttcagataagcaaatgtagtaatttaaccaagaaatataagccctatttattttggaacaaatgagaacgagaataatcaaacatggatgtttgtctggtaagaatataagttactttattgcaacacatcatactacctaaatttaaccaagagtgaccataagtccacaacaactttgaacctagagttacatgagacatgaaacattctggctaaggaactgttttctcaattcaagatttaggtgttcacagggtttattcaaacatagaactgtagttattaagtatttatttaatccaactttgaagctcataagtaaatttgtggggatattattttctgcatagtaaaactatgttcatgagcaatgatcttccaaagtggttccttggctctaaaaaggtaaaaaactaactttcatcatttggaagagaagttgatacgatagactgcaacatttccatttgcagttcagtccccagaaacaattgttgaatgcatatgtatgccatgaaccaaagcactatgtttctaatagggtgtaattacctaaacaagagtacacaacatgttgaaagagttatcattaaatcacatccaactgaaaactcccatacaatctaattcggaaaaaaaatccccatacaagatgttcttcccttggcaaatggcaactgatggatagatactcaggctaacgcatttatcaaaaccacaggttcatgagatgaggcaaacgatatgcattttcatatcaggggaacaccatgaaatgcccacaggtggatgataaatacgctatgttgcaaatcaggcttgacaacaagcaatgcgacttttctagattttaaacaccacgtcatgttatttaccaagcaagcaaggttgaacttgaaagggcatatttctcagcatatcaaggccatgcaatgatttatgttcaactaaccatcaatagatgtcggaaagcagattatgcagttcttttaaattgttgttgctgaagaatgagtgctgaattttatggctcggaaataagaagcatctgacaggttgtatgaaaggatggtctgttgagaacaataggggagaacccaactgaaaaggatctacaggatatagagaaataacaataggagtatacgcccaaaaaatgcaaaaattgacagaacaaagtaaaagagataaccaaaaattgacaggtgtacagttcctacaaacggtcagaaaaggccatcaggccgtaaaatgaaataaacggaagtctagatggttagctaaatgctcggaaattcctggaacaacattaatataacaaaacgtacacatatgagttatatatggtctaagactttcttttgcacttgaattaacattttccatagtaacctattagtggtgcttttacccactaaggaaaatacagcttaaaaaaatcaatgacagaccgattttttttacttcaagttacaacacaaagacaaagaaaattcaaaactgggagaagcatttttattacataaatattacaaatattcggtataaattacaagaccgtaaaagatggcaaagtcaactaatgcacctcactcaatctcaatttgttggggcgcatcattttgagatccctcacttgattcatcggttcggctatcctcagcaactccagaagcctctaccgtcctagtgatccattccttgagaggatcctcattcaggtcaagcctcaataggccagcaaacacaccacccatgaatgcaactggctcctacacaagaggcacgcaaaccatcactccatcagtacatgttctggctttgggaagagcctacgaaaattaaaggcaattcccttgcactgatgggaatattgagcatctgcagcttaagaatcaactcctatggaccaattcctgtttagaacgctgaaatagctatatgtaaaatgtaactcaattgttgggtaaacctaaaactcccatggattcgtcaggaacctcacaaaagggtgtgttgtttcagaatttacaactagagattttacagcttgacctcgacacatcgaattaattcatgctataagcctacaactaacactggatcggaaaaaaagaactggaagagtcggggacgatacacaccttcaaggcctcccggaggatgcgttcgtccccgggaggattgaagcaagctcgcacggtccccgcggctcccctcctactccgcccctcgaacccaacaacgaagcccctcctcggaaccggagccctcctccgcgacagctacaaaaaaaaaaaaacgaagaagcaatcagtacaaggtcaaaccctctcgcctgatcacacgagcgttcctgctccaagcgcagcgctttaccgcggcgggagctcgcgagtttgggaggaggagtacagcggaggaagcagcggcggccatggataacgcctcgagtgttcgccacgccgcgaggtttgccggaggcggaggatttttttcctcgatgccgtgtacgcgctagatgggctcaggctgggccgaaacgggattccgctgacatgcggcccgtataatatgggccggaatgggattgtgacctacgtgaggcccatggagtgtaaagtgtgggtgggccgtactggagagccggagccgagttgcacttgcacgggctgtcacctgtttacgtcagcgagactgcgagagcatacgcaaggctcgcctgagccgtccgatcctatctgcgcggcggagattgaaacagctcagagacgctcgtggcggccgtcggtgaggtcgccggcgactacatggatgcctccggtcggatcgatctcctctccggcagagatgcacaaatacgtcgatctaccgtctacgagctattctcacctcgctcatatcagacttgttggatcgatctccgtttttttttttttggtgttcctttgtggtttattgctgctgctgttttttcgtgtcagcaagcacgcgtcggtttgtcagttacctacttctctctccaggagtccagcttgttcctcgcatgacgatcgaggagaggagcaatctctccaggctgggctaggctagctagaggctgcatgagatatgtacatgtcgacgacatgcatgtcgtgtactgttgactcctgcttctccgttccgcttagtggtgcctgaccacaggtagtgaggtagagggtagagatagacttcaagtgctcacgcatttcccctgtcccgttttgagtgataattaagcttaagctggactgatggatagaagcagtaactggcttcatgaaccaaggattaatctagtaaaacggtaacgtacgccagatttgatcatgagcaacagtgggaaaaaagtgaaaaagaaatttcagaaaaagctagcaaagcatttttattctagctagctcgctacacgagaaaaagctagttcattctgttttttcagaaactattatgtgtctttctcctgaaagcaatgacaagtaaagcttatgggtgtgatatagtaccacgcaacatatcatatatagatgcacaagctaacgggttgacagaaatataccatgcaggcaaaataagccaaattaaagaatgcttcttaatccatcgcatgacatggcctcgccggcagcacatattttccatctgaataaaggtttatctcatcctgtcatatgtatagcttgaagttttgtacaagatgcacgcacaaactagcttccacatcgcacacatagagcactaaatggtaaaaaggaaaaaaaggcagaaactaaaatgggaagataagtccaaaaggccacctcagcgatatctccacctgacaagtgatgattcatacgacccaaacccccaagacaaccagttataaatgtcagagactgtaccaagtaggaatgtaattaagatcatatctcctagatggctgataagttaaaacaggctatatatgcttctcttccctgagaaaagaaccagaccacacatctagctagctaggtagcccacctcaacatcggcttacttgttttggagtagatgtttcagattagaagcaacatagagatttgagatatgggaagtgctactgctgattccagatctggtattaagctttttgaagcttgtatcaattcgaatctgaggtccttccttcacagtgttacgccaactttggagccctacaccgttgccaaggtacaaaccatcatgctatcttttaagaaaaagaaaggctgtgcttctgcttgtcaaattcttttctcctttgatttctgtatgaatcagttatgtttccatagaaattacaagaaatgaaaaatcccatttgaatggacacctaggttattggagtagttatatccatggaatacaaaggcatcaagcctatgaggctatttgattagcctgggagttggctccgagactgcttgtctatgcgatcttctctatctttttgatgaaaaggatatgcatctccagctttcctcttttttccccccttcatagaatggtttcttgttttgctagttaaattctttttctcatggtttgtcattatttcccttttgagatctactttagaaggtgggattttcacatgaatttggggggaaaatatatcttgttatctacatatgtttcccttctttcttcatctttgtttttattgttggcctatgttattggcccattttcccttgatatggtggttttccattaattttcttgatggtttataatacatctactaagatgtagatgccttaacattatcacgagtttccaagaaccaggaaaaactcatatccttttctaggttgtttacttcttcccctatagaatgcttggtatcttctcgctgggagatgttaagctatgtatgatcatactaacttgttttgcagtaagatttattacttgtggattggtgtctttgtctatgtcatccttctttgttattccacgcgtatgtaaagtggcatggattcaaaatactttttggcgcgagacatgcatggtgtcttcgtgcgaacttttggcgcgaaacacccatattgtaacgtatcactcaagtcaaacatttgcttttggcacgtgcgagacacgtgtcagattcagtggcggagccaggaatttaaccctatgggatcaattactattagtttgtatttaagtgaggtcatttctctatttttttttctgggtttatacatgaaaaatggtcagattgatagcatctttacgaagattctatgtgggatagaattgtagaataaccatttaacatggaaaatcaccatatgaaatggatgtctaaaatggtgatcctttcatccataaaccttttattttgccacaccttgtggttatcattacctcctaacaaatttagccttttatgcgcaaacatgcatgcttcaccaagtgctaacctattggttagaatcctgtgcacaacagtaaacatttaatttattttcatatttgggtgcgtagatgtaatctttattagttacatttgcacacaaccaccttcatgttgacttttgtatttaacatctccacaacttttgatatggtcatccaatgatagaatgtattaattaaatatagaggacttatatagattgtattggcacttattaagtaggaccaaatcataggactaatataggaaactgcacatatggcaagagcagtcgtttcatactactcgacatcccgagttcaattccatgtgacacgctcccttccttctaaataaatgacacgaagctcctccttagtgtcccatattttttttaagaaggcaaaagttttgtctcgtatatattaatagagcaggagaaaaaacaatcaaacaaccaaacaagttatttacagggccctgccgaaaaaaaaacagagcccacaaaaggagaaactacgttggctctcctatcagggttgactcagcgagttttgcgactcccgccttgatccaggtcaacgcctcctctttgattttagtgatgatggtgattggggttggtggccacgtggtggaactgtgtttttttaagctccgctggcagcaactttacaggatgaattgcttattatagggaggatttttattttgttcttaagtagtgctttagttgagaacgtagagtacttggctggtagggtgctgccaggagatgctcaacgacttgggtttgaaccaaagttcctcaccccctctcctatctttcttaaatacattgatactaagttcctcaatatccaacatgttttcagtagtccttagttttagttttattgctatctactggcctgaattaaataatcataattatgatctgtgtctgcagccaggcggctattctggtagagtgcccgagttaggtagatgcttcttccttgtagacctttggaaccacttctacccgttgagcgcctatggtgtcggtactccggttcgtctcccttccggtcaggaaattgagcagtactttgtgccgtatctttcagccattcagttgcacaccatctcagacttcacttcatgcaagtaagtatatatatgtcagtttctttgtgtataattggccatcagatgcatgaagagtttgagagttttacatggttctttttgtctgaactgggcgtggtgacagcgagataatggtcggcaataacttgtttgatgcgaacaactacggctggtgcagtgcggcagataactggaatggtcagtatgcaacaacatcattagcgaggtatgacagcccgaggtcaatgaatggagggccatgttttcagtactttgaatgtgattccccttatgaaaggatgcctctcgcagacaaggtacgcatgcagtagtagctatagcttcaaacttcttctctggaaaggaaattccatcagtttttttttaagtttttaacttgcacttaactttaaagcttactagtagttcatagtatttgcatattccaatgaattgtacagattagttcttccattgcaaactgccatgttatatatcctctttctgacattctttctatctatcatgtattcaggtgtatgagctgtgctataactttccacccctatcatatcttagcagtattgagctctctccatctagttggatgtcagttttctggtaatttttccaaattcaaaataacttcctcatgttttttatttaatcatgtaaattcacaagtacattttagggcaacgttagctttccattaacttgaagcaggattgcagatttatttagcgtctctaatctaattgtgccaaccaaaacagaggtccattatctattaaaaaaaagagagcaaatcagttgccaatcttttatatttacttcaggtatcctataggccatgttcccgcgatgaacaagaaggacctgactacttgcttcttgacttaccatagcctgtcaacattagaaggtaaataaagacagtgacacattaccattaattttttttacttcctctctggaagaatgctatatattcaaatatgaataatattttggctccccgtttgcaaattgcaatgacttgagtttcgtcaaaatcctgctatgcaactgcacatatattggttcatgctcttcgaacaggctttctacacatagtgagatgtagtgcttcagtttttctccagaaatgaaatctttgttttgcatatggagtgtgaaattaatgttctcgatctaattcagaaacattgtgaacattttattgtagatcgtacgccgtttgacagcaaggacccgctgacgcttcccccaattggcctcgcgacgcacaagacggacggagatgtatggacaagcgcgaactccggcgaccaagagctgaccacctccctcgtcggcgcggcggactcgtggctgaagaagcttgacgtccagcatcatgacttcaattacttcctcaacagtaacaggaacctgatccactacaggtccttgaccgaagcaagtaccagtgcagtttgacatggcgaacttgactggctgaaagcggttgccggagctggttgttctgggtacaagaaggaagactgcatcgatactctctcttctttttatttttgcggtggtggtttgcagtaattggatcctaatcactgagacatcgtagttggtactgaataattgcttgttttagaccaagactttatcttgacattgagttttactttcacatgaaaaactgcaaggtgtgtgctcgaaagtatgcagccttcagaaaagggagttatttaaatgtcctcgcctgcaaatgttgggttattttgttgtagcgcagtagcatctgtggccctctctctcgtggtagcatttggttgctcggttgttcccgtgatgatttatttaggaacatggaaatctgctaattattccgtaattttccagccatgatatcaccatgtgcaatttgtggcttatggtacactagagcaaatatgcaggtgctatgattcagctcgatacatcagtaatcctcggcggccacgggaagccgagtatctgcagctgccggcggctcaggctgctccgccatgacaaactcgtacagcgcgccggccatcccggcgccgatgagcggcccgagccagtaaacccagtggtggcgccagttccagccgacgagcgccgggccgaacgcgcgcgccgggttcatggccgcgccgtcgaacgggcccccggcgaggatgttcgcgcccgcgaccaagccgatggcgaggggcgcaatgtcgccgccgccgcttctccggtcgacggcggtggcgtacacggtgtacacgagcccgaacgtcatgacgacctcgagcagcagggcgtgccgctcgtggatgcggtggccgagcgtgaagcccatggggcgctgcaggacaacgtttgtcaaagtgagacgtggcaaacatgacgcacctgtacacgctggtagtggtagatagctcatgccaaaaggaaatacgcaaacattaattttttggttttttgtggtaggccaaaagaagcaaaatacggcgtcgctaataatgatcaattgatatataacagcatgtaagttgtaaatgtgatttaattaagcgctaatgtaggcttttggtgacgaagagataaagaaaagtgagctagttaccatgcctccggaggccagcctgaggagaagcacggcgagcacggcgccgagcagctgggcggcccagtagagcgcggcgcgggcgaaggagatgcggcggccgacgagcacgccgaacgtgacggccgggttgacgtgcccgcccgacgcgttgcgcgacaccgccaccgcggccgccagcgccagcgcgtgcgccaccgccaccaccagcaggccgcccagcgtccccgtgtccctgtacatcttccctgcagcaatccaaacacacaaaaaaaaaatcttcagacaaacgcacgggagagcgtgcgggcgttcatgcatgcggttgggttcgcgtagctattttacagaggccgtagacggagccttcggcggcgaagacgaacacggcggtggctacgaactccgacagcgccgcgcgggtggcgcccggcaccaggggctccatggcggcggcagcggcggcggcgtcagcacggcggggagtgtggcgacctggcagcatggttgacaacgaccaagctagctaggaaggatttcgcctttctttttccgttcgtctgcacctggtgctcctgcgtcctccgggtgaagtgctagttgagtggcaggagccctgagcgggacaggacgacaggtggtcagcgaggagggacacgtgtggcggggatggcgccccgaaaatcggcggcggggaaagctgaaattggagacaaaaggtgatacattagttgcaaatatttgtggaaaccatcagcatttggctatgggctttggatcaaacttagaacgcattacttgtaagtcactgatacatttgaaagaaataattctgcttgaacatttgaaagaaataattctgcttgttctatatccgaactgctttcttacaataacatgagtagcactacaatactatcaaatttgtacttctaagctgtcgtcaaaatcccatgtagcagaagttgcggctatagaaacattgaatttcatcagctgtttcagacgagattagcgatcttacagaacagggaatcaaatctacaaacttggttcatttcctccagaagagacaaggaatgtaagtcgaaacaaaaacttaaaatatgtataattaattcaatcagcattctcgctttgtataactcataactaccaggctcttaaacaacacttttgccagctcaagtaataatagaaaggttggagatactgccacaagttataatcctaataggatttacaaaacttccagctgagtatcctggaactcttcttcgatgactcaaaactcagagcagcaccagctatccaccaaggtgctcagttatgttttaccattaatgcccttcatgataaaggcgaggggccatgccccagttcagaatcatcgaccatcttctctaatgactcaatatcactggtttcagaaagtatgtgaatcctaatgctgtctgcatcctcactgctcacatgaaaaaagaggaaaagcataggtcatgacagtagcattaacagcagttgcagtaaaagaaagatccaccacaaagtaaaattagtcatactctgtaactccgaaaatttctttgacaacgagtgagccatcgcgtgagcagaactctgggagctggatattcacaaaaaaacagtcataagttatatatagcaagggaaaatacagaaaatcagacactggaccagtttgaaaaactatgaaagatcttattacaggacctagacaagactttttaatccatttttctctctgggtgttgacaaagcacggtgcatcaaaacaataatggaataagttttataccccaaattttattattctccaaaggaatttaaatcataacaataatattacctaaacagattctgttgtctttgaatctagttgtttatataacttttgaaaatactgtatcgaattcactccactgaatccataggcaaaaaaacaaacatacaagtatcaccatgataatacaagtaacaacttctaaattctaactgaacaaagacagataatgtttttgaaaaatgaaagattatcatgagctgcaagcagagcaataagtgccctatcaagccttttcatttcagtacagaggtcaagcaaaatctggcttatcatcaacagaactggaccttttggtcaagagaaataaactatcaacagcttacctctgataagtacaggatttttccgaacaacgtttgcacagcaagcttacgcttaaaaccttgttctgtaaacccagctaagtccatgactactggtcctgcaagatcataaagatgcaaaatctcttgagtacttctcacagacttgttctcgcaaaccagaagcataacctcatgattaccaagtactgataggtgacaggagataaataaatcataaggaatcaaggatactctccttacgtatattcatactatatggctcatgcatctattgtatgaagaaattttgccttcaagcagtaagatcatagatttcaactgacatatttaaaaattcaccaaataaagcataaaaatgtacaagcataatggtatggcttacaagtacaaaatgctgcgttgatttcatagaatctttttcagtacttttgaaaaacagttaattagtttgcacctggcataaacaaaataacaaggaattgcagaaattttattactggatgcggattgctaccccacatacatgtatgttaaaatgcttcttgggaaaacatgacaacagtaagtcaaagattttacattatgatacagacatgtttttcacgcttggacattgtactattgcacgaaacaacataacagaaaatccccactactaattgtttgtcatggacatatctgaaggctagcagagcatgtgtaattgagaacgatgggagatacaaccgaaaggcatgcttagtatataagcaggggatgtcatccttcaataagtgttgcacaaatctttaagcatggtaattgcttcttcttctaccttgatttgttctttaaagtgcagttcccatggggtagcatataaaaacaactcgataggaaattgtgggacacacaactatcaattaccagaggaatagcattgagttacaaaagtacacaagccagagttgaatttaggaaatacatgtatccactattaccactagaatagtagaatcagacccaaagaatgagcaatacctttttcccgaacaattcgtcttgaaatctcattcaaaatttcagcaacttcagcatcttctaacattgacgctttcctaagatgtatgagatccacgactacatcagggttgaatggtttttcattcagtgtgtatcgaatgtacttccttactacatcatccatgtcaaatcctgtctgaatacatgccaaaaacaacagttaaatcatgtggttggtagctttgccactaaatacaaaggcatcaaatcattcctgaaacagaagtagatatcatcatatcaacaatggatgtattggtgcaaagaattaacaaattactatgtccaaaatcatcattctactttgtgcagcaaattttctaatttagatcataatcacaatgtggctagcaatctaaagatgtataccacaggataccaatatcaccatcagcagttgattgtcataacaagatttcctgttatcacaagatatccattaactaatgccggctaaagtacactcatcatccataaatagacaataaagcaagcatatcatagaactagtctaatataaaggttgaatcaagggcacaccttctccattagttcttggagagctggaaaatccactgcctccctgcccttctgaaacaactcatctagtgacttcagcaaaaaaatattcttgctcacctgcaaaggaacactgctttaccattaaataccaagaaggtatagcaccataattattctataaataaagtcaagttcaatattgcagtaaaaaagaggaagcaaactcagaagacagttctttgcatctgcgtaaaggcatggaggagtgaaattaagtcatggttgaaagaaaatcattgcaagttcattgcccttctgagtatgctaagttataatctagcttgaaacatcatgaatgcataaagtgaatatagttgatcctctctactcactagaaatactagactgcaacattaaaggaaataccatatacttaacaaactcaatcaaactgaaatttttagtggggtatacactactttatgcctagatataaacttccaaatatagaatcccctgctgttcccatcgcctatagtcactgacataggtaaattaaatgctagatcaatcctaagaaactacttttccccatgatgtacctaaatttccaagaggttaaaagtcgatctcaactctcaagagaacggccagctagaaaacgtaacagaatagaataatttcgatcttatagagcagctacctgatgatataagtgcaattacattccgaatcacgtcacttccccagcttcccaatgagcaccaaactataaacgatggctcttcactgggtatcaaactacaaacgattttgacacggaaaacttacccttcgcttcttctgggtgcgcggggaggtgaacctgcggacggtgcggacgacggcgagcacaaacgacacgcctacgtaggcaagcggcacggcgaggagccacggcacggggctggagccgacgcggggccccggtatggcctgcgtgacggtgccggtgaactccacgaggtccagcgccttgtcctggatccagggcatctcctcctccacctccacctcctcgtccgcctcccgcttcggcacgtcgctggggttcgcgggctgcctcgaggccgccgcggtccggctgccggggcgcttggcccgcgcgacgaggaggggcgtcggccgccggagaggcctcgtgcgggtggggaagggcagtgcgagggtcccgcgacggagccgggcggcaccgccggcgccggcgccggcgatgggggtcgtgagcggctggaagaaggaggtggcggtcgccatggaggcgggcggggtggcgacgattagggcttatcgcggcggagggccggaggttggaagcacttttgtcgaggacggagacccagtgggaagtagctgaaccaaacttgtgaagttggtggtggaagaagaagcaatgggccgaaaggccgaacttggagtactatcatatttgggcctcttgtcatagtgcgttggatgggccgttcttcagaaatctgaagaaaccaatcggtaaattgaacatgtttttcctgtcacaaattattactccatccatcccaaaatatagcaagttttatttggattggatgtatcctagtactacgaatctggacatgaggtccaacaaaaagttgctatattttgggacggatggagtaagtcacgcatatatatgaatgtagtcgaagttatatgtgctaagtgaactagagaggcgaggcaagcagtgaaatagcagtcgtctgatcagttcacaagcacggacctcacctcagacagctgatctgacgaacagttaccaattcaaggcaatacattgatccatcattagctgacagtaatcgcgagaataattaactttgatctttacccactcgtataatccgtctagaactgacgtcatattacaagttcgtcagttctccatttgaacagtaagtgtttgttgtaaattaaattgtggaaatactacttatttccgccgaagtgtcttggacgcttcattgctgactcaaatttatgtaccaccatctcaaaaacaattgatctaatacggaagcactcgtagaagaaacaaggtgatgttgtgtgtcgactggtggaggaatgcctgtatcagtgtatcagccaaacaccacaccatctaatcaaagctttggcttagattctctggaccatgctggtgctctaactttcaggttggacttctcagcctcctcgtcattctcctcttcttccaaaatctctttagaaaacgcctctggattgattttgatgcagtcctgcagtgcgataaaaggcttcacacaatctgatccctgcgaaggcaaagagtccaaaattgtagttactattccggagaaacagacgatgaacaaaaacttagcattcttccaaacgtgaacaacagccagttcttgagattttatttgaacaaataacaggtaaccgaataagtgcctttaattaaaagaatctgccctacattaacattgttgtgtaaccaatttgatttgagaaaatcttctttatgcactcattgcagccctaatctctgttctgccaccaacttgacctggggaaaaggcatactggtgatgttacgcagtgcactctcccatcgaggctagagcaagtgagcaacccaagctaaaaaattctcctgttatcacggccctgctatcacttctgataagagaggaagccttttctctaagatagaagtggcatctatggagtaaggtgactcaaacaacaccgacccaactccaagccgtagtgtgaaatcctgaccagattacttcgattcacctcaaaacttacacttctccttgtttggcaccactgtccagttactcagttgcccatcaagtttgcacctaaaagacccttatatagcatcctcataatttctctgatgtcaaaattttcaagaaagttttaaacatttaatgcaacatagatccctgaagttcttcagtttttgtgacattttgattttccatggattctcaaaatgcataaacacataatggtcttttggtgaacaattggactgggcaataacaatttgttggtagaggagaatatgactgcaaagagtggcaaaggaaaaagacaaagaatttttgtgcttttattatattggggtcataaaatgatttgctcataggaaaagattgaccttatgttcaattagatcaacgaacaacttgagggagctttttatatttgtataatagaaagaaacacagacacatttcctacagtggcatggcttcagcctgaatgcccaaatcagctggaaattatcagatatctgtaaaaacaatggattacatagaaatatatatatggcaaccgatagaaaggttacactacccatcagcaagactgcacatgagaaaattgcatccataaaacaactttttttgtaaatattagctccaaattttagaatacttattaatgtgattcttatgttgactaagtttttcatgaacaccattaatatattatcaccatggtgatgtgcatgaatcattcttgcattgcaaattgcaagcagctcggtgccatggagaaagaaataggaccttttcctcttctgtgcttttcaggaagcaagagaacgcatcaacaaattgacttccacaaggaccatttttcaactcagctacacatggacagtccagtgctttctgtaccttcacatcaattgactgaatacacaaaatactaagttcactgatcatccagggtgccaagaaatagtaaagcaaataggatagtgatatataagcatcccactcaaaagtcaaaagcaaaataaagtaccatacctcattgccatcctcgtcaaatgacatagcctctgcatttaaggaatccaacctcagaatgctagcatgagaaactatggagaacttaagtgatgcatttttttaaggaaaaaaaagagagagaagtccataatattgatggccattgcagtaattttgactcaattttttttgagataaaaagaaacgcgaatattagggaaggacctaatatcaaataaatataaggggtgaagcttcaaacttaggccggctagcctaccaccttgtggagctagctataagacccctgggttttgagatagcaagcttgctaggaactgagagtagtgaaattgccactaatactatattagctcagtgactcctctgacccgggtgttcttattcttttgagagggacccgggtgttattaacttacaaaaggatcagacaaaaggattgcctgccgatgcattaagattttgggggaaacaaggtacagtgtaattgacttattacatcacgtgcatgacattaatattttaatctatctaaattgtcaattccggcatgaatgattggtaagatatcagctatcatcagttcactatccggtacacggcctgccctgcacaatcacatactcgaattcgatctaaaaaaagagagatttggagggagagacttcgctccaaacattttcttaagaatgaaattatgagcatgttagggattgaacacagaaatttggtattaaaaccacacacctcttgccactgcactatctactgcatctcaaagcttcccaaatccaaagcaacacaacaatctagcgcggctaccgcatctcaatgaaaagtcacgagtgcacgagaaaatcgccattggatcacaatattcagagtttttggcatgtacctgcggcgagcgcctcgagggaagatggcgccggggcaggagacggcgacgacgacggcgccgcctcgacggcaggcggagaaggctcctccaccgcctgcgcgggctggctcagaccttgacccatcgaggtgtagcgctagagaagaagcaggcggcggccacactctctcgtcttcccgggctgcgacggcgagaacgggagcaagcggcggcgcggcgagttggagcgtggtcaagtcggccggcgtccaagtccaactaaataacaggcccgagcaccaccacatcaccggaagcaaaattggacccgagttcaactccggcgagcgctttcccagccgtccaaatcgcatcaagattcgtgcaacgcggagacaggcttactgggccggcccggcccgtttggtgaatggctcgcgacctcggagaacctaaagcctaaaccgcggcttgggttcgggggagctccaggccgccggcgacgatgggaaagccgctgggcgacagcgtgttcgccggccacgcggccgccggcgtcgcggcgatcaccgcctccgcggtcgccgtccacccgctcgacaccgtcaagaccctcctccaggcgagcgcccccctcctccctcagattctctcgctgatgctgttgctggccccttctcgggggctttgatttggtactcattcgcgggtgttttactttccctcctgtgctggctgtgcagttgagcgctacggggtcgcagcagaagatggggctcggccaagtggtggaccggctcatgtccgcctccggccctgcaggtttgggtttcttgcccagttgctagataattagagatcttccactgtttttagtggtggtaatcccatatcgtgaattgcgttagggcatgtcgatatgcatagctttccaacacctacaagctactgggggtttatgaggataggtgatgtttgagttttgcggttagtggtgagtgactacttgctcagcctgccatccaaaaatcatggtagcattgggagactgaaaattctaaaatggatggtaatttttatgtagtgcccacattataaactatcaaatttgtaaaaagaacttgctgcaaattgatcatattggtcatacttggcagctggtgttgtaatagaattccaggccacctctttagtttttggccatattcttaggtgtctgttccttataaaatttcctggtcgagaaatacagggagaaaccatgtgaatcctgcccttttttctaattcctgtgtgatgatttctcatcacctatatatatgttacattggaatgaaattattttcctttgaatttattgtgtgtgcttttaggcctttacagtggcattggatggtcagtattgggcaagctgcctgggttgggagcacgttttggaacttatgaactcttaacagccttctataaaggtacagcatggttccagaaatttattgctcaggatggtctgccttatagaatcattttgtctgtccatttgtttgcagttatgaacaaacaatacactcatttaagtatatgatttgccaacttctctgtcatattctcttgccttcctattatcattttcctctattacagaatggttagcctccttgtatcgtttaatgtaataattgccaaatgctgtttagttatttgtactatgaattaccgttgacactgcaattttttgctgctgtccaatgcaacaatctgtagatcattttgaaatgcatgcgtttctggatagttaaaagtattcctttcctaatgcaagtactttcttatgaattgtttgttacgcgaaacatcatatctataagtactgcaatatctgattataccagattcgttggtgacttcatcacttgatggtgaaatatgacaaatgacatttgttttgtatatctcccgcagatggaaaggaggacaactatgtttcttactctgaggctatgttggccggcatagctgctggtgctgttgagtcagttttgtgcacaccatttgaacttctgaaacttcggagccaagttggttctgtgaaaccaatgaaagccacagacccagcaaacattacaaaagtgcatttccactgctctccaaactgttgcctggttatgtccctgacatcagagtatggaatagcagtgtcagccttttgtccaatctttccccaaagcatcctgacatgatgggtgccctgaaacagcatccgtggatgcttactggttcagggaagcccccattgccctctgatgttcaggttccttcaagagtgatagcacttgaaggatggggtgctctatggagaggacttagaccagggatgacccgggactgcgtctttggaggaatgttcttttcaacttggcaattcatacacacagcgatgcttacttggagtgctgttaatatgaaccctcaacccaggtaatggaatgtagtatttttttttcaggaaatagtgatagtaatcgaatcataactgtttatctttttggcattaggtctagtctaaccttttgatgttctgttcttgtcagcaaactggaagaagcaggccctgtatccccttttgcttctagtcttgctgcaggcttctcaggagttgtagcagctgctgcttcccatacatttgataccgccaaaagtcgttcggaatgcactgttataccaaaggtattggcatcgccctactttgaatagtttgttctgttagtttactaatgcaaatttgtagttcattgtgttagagcttacaacttgtaaacactcaatttccctatttgcaagcatgccttacttctgcttgtattacttcagtatatcgcgatggagaggaggcttcttaaatggaaagtaccaggaaattggatagagagaaagacaggaatatctcctgccgataggaatgttctgttccgtggtattggtcaacgaatggcccgaagtggatttgcatcttttctacttgttgggtcctactattttgttatagatcagttcttgtagacgacatgaagagacatcatttaactaagagatctctttaatgaatttcaaacattctatgtgcatctggtgaataattgaagaacaggtaaccacttgggcatccatgattgttcctgtactttgttcatctcatccttgttagagctgcgtgttccaagttataatattggctgctaaaacatttttttatgtcaatcagaattcaaggctgcctcttttggtatcaggcttttgttgaagagataacaagtatcttgtatggaaaccgtattgttggtaggatgactgatgagtagcaactactgaagatcctttttaagtttttgataaggattttgtgagaaaaaaatatgtcttcattattgttcaaggttaatttcatcataagattttacttcttctctcttttttcttgtcattagaaagtaaacggtaaggctttttgtgaatatttttggggatgccataattccctgaaagctgccttctacttctgtttacggtactattcagcaatcctacaatatatcttggaatattttacttcaattgtactggcattccatttggatgggtggctgatcttgtgacgcatctatatgtctttagacaatggaaccaattgcacatatggttggttagatgatttttgttcttaactctgaagttatattataactcttggtcaacaacgcatcatccaaagccactttacatttgggcaaacttgacgttttatagtagttcaggttgaatagtgcccggttttaaatataaagttacttttacagtaccagaaaagtttagtattgtcaaaataaaaaggtggtagtcggtcacactgatgactatggcaaggagtataatgtttttggaaaggaatatgttcctgcctgaatacctgatagcaatattattgaacagaaacaaacctagtggtaaagaatagaattgatgtaaacagcaatcgtgtatgattaagagtaacatgtaaataacataatacaataatgatgtttctttataatttggagtctgtaaattgtagccatatatgtgctcacggcagtaggcaaactatatatgcgccatttcgcgtggttttctttgtgttatttggcacgcatacttgccttttggaccgattgtagaacatcagacaaaggcttttgaaacgagcgtgtcaagtttcgttttgttcgcttgtgtagttgtatctcagaacactggaaactgtctagatgatatagtcgctgcagcaggatcaaaatgtgacagttttcacagtactcagtatagatcaaaaccaagccattctgaagggaatcctgagaaaatggatccacgagtcatattggaatcttttgaaatggttagtttttttcttcttttttttttggcaaagcatttcctttgtcagaataagattcgcctgtacaatgctcttgagattatctccaggccttgtttaaattttgctgacaccacaatttgttgggacaaattttgtacacttcattcgtaccacgtctggcttcgacatggtatactagagcctgaacctctgaaagacaacattcacattcttgctgaatatactgctactgacggctgtcttctttgttccaaagtggatctaatggaggaagatcgtagtcgtcaggttttagagccaacgcaaaatccggcaatggaggcggtgttccaatgaccctgcagattccccacaacgaaaaaattcatcacttattgaggttcacaataccctgaacatcactagatgtagtactatttatgttgcaagaaattttgttgtatgcatattacaccacaaattcttagtacctctcttgcgtatacaggtcctgattgatcttgaccttgcttgaagcatcttttggaatcttgtcaagcatgtacttagctgttccgaaaggagtggggctcctgcaaaattccaggtattgacttcagtatccatgcttaagagtggatttttacactgaacagcaatagctattcattaaacagtatactgagtagtatcagtttaccatcttggtaaagttcttatgctgagaataaaacataagaaaatttgaaaagcgaaatgctcaaaaggtaaaatgtcttgccttgatgttggaggagttgcatggaaggcttcagaagcccttttgctttctttcagaaattcttctgaagcttgcaaggcagctactgccattccatgagatttctctgtgtttccctcgtctagaatcaaaccatggaaatagtatgctgcagcctgaaaaaaagtgcacattagttttgagacgtacaattgcaacttgaagtaatttaacatcaggaaaataaaggttaaaccaacttacacacctttgcttcaacatacttccacttaacaaacaataaatgctttttcccccatccatcggataccggaatttctggaatgctctcctgaatttgatgccaatatttgaccatctcgcaagctaagcgccgttttaccgctagagtggcctttgggctatcaattgccagaccaagttgcatgtcgactccctataggtcaaagattaccgattgctcaggacatgatatcaaatttactgaccagagaaagcaccactgcaccgagaataacttggaccaatgtagaacagtgaatcatgaaatttgctataaattgaattagtgctaatagtttctacttcagcccacagaaaaaatgcaaatagattactaagcatcattcctaatcagaatataggagcttcaggggtaatatagcaaatatgtcacttgggactatagcataaaagtttcagcttcataaaaagtactacaacaaatgtaatgcccattaggtttaggaatgcagttcttgagttcatttacgaaagagccaaatgagctgagcccagaaaattgtacctgacccagagcttgcaggctaagagctttgagatttccttcagccagatctactggaagttgtctcctgtaatgcatacattgaaatggatgtcaatacaccttctttcagcttaaatcctcaaaatcatctactcagcttctcaaaagttcataaccttaactccgacgatatttggggtagtacttgtctaattgcgcagtctaggtagccagatgccttcaagaaaacatcaacagtagctcgtctgctctctgtgtacattggcaatacatggtgcattattagcacaaaaacactgaaagaagtaactcaatggaaagcaggacatgaacattttcatatgcccatattgcttcagaagttcagaaaaacagttttataccttcagaaacccttggcgcataaccatcaccgtatgacctgggaagaagcagagaattggcctgcaacaagcagaccatggccatcaaatgcagaacggacaacacttcataccatgcatctgccatggccgtttcctgcagttggcaattccaatgttagatctaatggctactgtcgggcatcatggaggaagatgacacaccacatttttaggacccaacacatacctcagcattatcctcttggttagtccagacgaagtgcactccgtgccgcaattcgctacctgcagagttcacaggctgaatcaaacgaaacaacaagattgtcaaccaacagaacaccaatccaccatatcggagcaattcctcaccttccttcaccaatcctagcagcactggcagatagtcttccagagcctgtaggagattagcagtgctcgaacctgtagaaaaaataaccaaagaaatgagaaccaatccaaattttgcaggcaaaaccagccagcaattcagatgcgctaccaccaccaccctcactcaccgtgccgcgccgccgcccgccgcttcggcttcagcgccgccgccgattcttgcattgccatgtcgacgacccgcgcccgcagcgacgacagcctcgacgaggcctcgtcgaggcgaccggcgagcgcctgggagaagtccacgctcctcggcacccggagccccgggaggaacacgaccacgtcgccgacgctccccggccgccgccgtgggccgccgccggcgtccttctccctcgacagcccacaacccatggtacgcgcgcggcagacagcctacgacttagctcacctcaccctgcaagaaccacggtgcaatagaacacccagcaatcgaaaaaatatcagttactcgccggaaccatccaaaagggtaaaaccaagataaggtataaaagaatgaaacttatcaaattgagtaaaaataaaactacaacttgtaagcgagtacggtaatttcgcaattggagagagagaattccatcgaacaagaacaaaaaaaaaagggtgaggcgatggagaaaagctcttgcctttattcttccttccacttcggctttgtgcgtttcttcagacaccaagaaccgctctgattgaacccaccaccactatcttctcttcttcttcttcttcttcttcttctgcaggctggcgcgcagcaccacaccgaacgcaaacacagtggagggacaaaaggaagcaaaactcttatcccttggttcgtaggggaccgatcaacatcagagcaagagcacaacttggcgtaatgtacggccaaattggcatacttttcgcatcgaaagaggtagtattattctgtgtttagaacagttcctccaacttgtgccatcagaaagaaagaaaaaaacttaggaaagggttgcaattgcaatgcgtcatccgatatttagcctctgatatcagcgtacctctactgcagtttaaaaaaatcgacaaagtgcattcgcaaacttttctcaaagatcatggaaacgaagctggaaaatccggaggaaaccaagaacctacctaatcttggagctggaacgtcatgcgagcgaacgttgcttctcgctgcaagccagaggtggtctagaaccacaaaatcaggaagggctcaactgttcaagtctagggactagggagcatgcaacttgcaagaagaggaaaccagagcctattgctgctggtcgagcagtcagatggagagagaggcagagagagatgtttactaggctactcctgtgtatgacttgtcctatttaaaggggagaagctttgtgatcgtgctgatgcaaatgcaaatctaccccacaattattaagcccacacaccagtacaccacacagcacagctggtcagctgcacggaggccatcggaggaaaaaagatctctcgagccctcgacgacgcctacttcttcgacggagacaaactagctagcgatctcctcctcgtctgcacaccaacggtttaatcgtcacgtgaactaccaggagattcctcgtgtgatttactactagcctaatcggggacacctgtgtggctgtgcctggtcttcggagtagaaatgtagaataatgtcggtcgccaggtacaagtactatccgtctaaatgcgttgaaactgggaactctcctgtgaaaagagaagctgccactgcttaataaaatcgtaatcgaactgttattgtacagctgtttctgtttcctacgctaatagtggtcaaccatattaaattttgcctaaattttaattctttttaaaatatacgttcgaatttcttacaactccaaagttcttttctttttcgaggtggacgtggccgtatatactagatgctgttgctgtaggagaagccgtagtatatttcaagtaggtttttcgcaggcctaaccaaacgtcacaacgtaaccaactccagaattggatcatggcgtgacataatcaccacttgtttaatcctccggatcagattaaataatcatatggctgccaccgctcatcatagtatagttgggctcagactgctacccgtttggagtatttatcggtggtcatactaaatatacgtgcttaattaaaccatataattttaatcactgcttataacccttgtgagcaagtgggttagataccgtctgcactctggagtactgccagtaatacagccaattcgtgcccaatcttcagtttgtggatgcagattcttcagaccaaatctttttcagcaaatctgcacgcgtatggatgcatgcattcgctgctgaatttggttcgtctctttgccagtgctaatcccatgcgtatctgctgcagatgccatcttgctgtaatgtggtcatgtgtaagagaaacagtgaagaatctgatggcacctaccgtgtctgctactaacaaattgtggttgacatcaacgcgtgtgtcattctcgtgccgaaaggggaaaggcacggtgcctcttgagtgttgttgcaggcttcctccttttttgtggataagtataccagcgtccttcttagcttccaaacaaaggtttaggacacaggttattccacacgtgattgatgttatcgtgtaatcagtatgaacgacactagtacatggctaatcatttgacaagcgaggagacaattcctgctaatctcttggccgtggagcaaagctgtattgtgtgtgacatagattcgtagttgtttccgctaattacaccaagaattaacagttagcatttctacctcgcagaagattgacactgtatattctgtggagtgtacggacagttccctcttatcgacaagctagtgagctgtgcaaacttacgctacaatctgtgcagataaacacagcgaggaccaacagcagagctaggtagcgtgagatacatttctgatatcacacgcccgttgctaaatcctcgctaaaagttgaacaaaagcagggagaccggcccgagcatgttactactagagcttttcatgaccttttcgcccagagaaatgataaaagccaactttatacaaaagggcgatttttagattgtggatgatgatatcgtcgcctcctttcttgttgcagtaagtcgcttcagcttagccttttctgcttgcttgttcgatgatcataacaacttccaaaagcaacagtatggccaagaatttcaggttgccaacaattgcaaggcaacaaagggcatgaacagttgcatgattgcaacgaagagagactaacacgaactgtatttgacagatggcacgatccaatcgatcccgcgctcttatgtgtaccttcatgttcataaacaatttcagaaggggaaattttgtccggacaagtggcacaagtaccagatggtgtggcccggtacattgaccttcaagctagcgatatgatcccaagtgtcaaattttgatatggcagctgttccatgggaaatatctagtgcgtgtgtgtggatgcaaggacggccacggcactggtcaataatgcgattgcaggtcaataggtgaaccagttttggagttctttattgcttaagctcgatcagatttcgttttcagtagagatgaagtttgtgaactcctaaaatgagccggtgtgagttgtgtggccagcgtttcgacagcagctcaaactcccccttgagaaaaagaacggtcaggtgcagggtgaaaattcagtccatgaatctaggtaatggaaatctgaaagaaacaattatcttttctcaaccaacttctgaaatatgaagaacaatcgattcgtagcatctcatttccagtacagttaacaacgtgaatagctatatatattagcagtactgatttcagtgtcgcgtacgatgcatatggctctggcgggaagaagcttctggaagcaggatagaaggttctggaagcaggatattagccgggagggaaggacgcgatcgagaggtcaggtggtcagaatagcagtcaaagcttcggctcggaaggcgccgccggagctaccacggcgcgccacgtagcacacccctccctagcccctacgccggccgcttgccaaactggtccaaaacctagctttctgcttttccgtcgtgcacgctgcggccggccaggcccggggcctcacctccgtaaatatcccgaaaaggccatggcttggctgctaggctcgtgcccgtcgcatcaacgcgtgtgcgagcgcgcggagcggctcggcgggtgattttcccttcctccctcggcggcagggcagcgccgtggatggcccgcgggtcgttaccacccaaaagcataatacgtagatgcatcataggtactggggtgccaccgcggccgccaccaccacgtagccgcagcggtccacgcaaacacgcgacgtcgcgcatttaatcgcgcgcgcgccgcacccacgcgtgcggtgctgcacggccccggatccgcgcggacggcgccgtggcggaacgccaccctcacgtgacggacgacgtagacccaccacccagccgtgaggctctcgtacgtcctgtggccggacgaacgggtggggtggcgcgcacgcgccggtggtgggcgtttgaccggacggttggcaccgtgacattgcgcggattggccgggcgtggaggtacaccggtacgtacgagtacgatctttcaccaggtttcgccgagcgtcgtagatagtagggtggtggcgcggtctcggccggccggttcgagagatgcgcgtcaccgtcctggggctggccggatgtgaagcttcgacaaggaggcggcgcgggccgatcgcctcaaggatggcagcgcactgtgggcacacatgtacacgcgcctggaccggcaggggtaccacggaactcgagaggtaccggccgccttggctggatttgtttgaaaacctggtgctcgagggctaaagatggtccaagacattattgcaaatattggttcgagtatttttcacgggggagggagtcgattttgtatttttcaaatttgtaggaacccgaataaatgatgtaaacttgatgtcatgcagcgtcacattgcttggagattcgtgctcgccaccttcttctccaccaacttagtaggggcttctttttaggggtgggagtggcaccattataacgaaaacactatcatagcattaacaaattaatgctctaagaatactgtagcgagtggactgatatagcaatcgatctagacaatcaatccattttactagggctgtgtttagatccaaactttagatccaaacttccaattttttccatcacatcaacctatcatacacacaacttttcagtcacatcgtaccaatttcaacccaaactttcaaatttggaagaaactaaacacagcctaaatcagacggtggacaacaggggcgaacatcccatcctatgcacctctacggatccatttctaggaaggggtgatcgtgcacgtaaagtcaagtgtagatttctactatactatttactacctccatcctaaaaaaaagtgcagccgtggatatccgtgcccaacgtttgatcgtccgtcttatttaaaaaatttatgaaaaaattaaaaatatttagtcacacataaagtattattcatgttttatcatctaatagcaataaaaatattaatcataaaaaaatttcaaataagacgaacggtcaaacgttgaacgtgaatagtacaaaactgcacttattttgggacggagggaatatgtgtttagcctaaacatgattagtgtaatactacctccgtttcagattataaatcgttttgaatttgatcaaagtcaagctactctaaggccgtgttcattgcaaagggttcccaacccctctccctcgtattccacacgcacgcttttcaaactgctaaacttttttgcaaaaagtttatatatgaaagctgcttaaaaaacatattaatccgtttttgaaaaaaaatagctaatacttaattaatcacgcgctaatggaccgctctgttttccgtgcggagggaatgagttcccatctcccatatccgaacgcagcctaagggtgtgttcggttgggctgtggcttttgaaaaaatagctgtgtgctgtgactttttgaaaagtagctgtgaaaaaaccaaaagctcgtttggttacacacagatggcttttgtaaaagcttctcccctaacgagtagaccccacatgtcatatacataggtatcttctccatcctcccctgacgagcatgctggcggctgacgacttcgcacgtgtgggcggctagctcggtgaggaggcagaggcagacgcgagtggggcggaggccgccgcgcacgcgcgctcgccgtcgccggagctccactacggccacctcccatgcccgccgacgacgactgaacaacgacgacttcgcacgcacgggcagctcgactggaggagcggcgacggcggcggcggcggggaggaggattagcggcgatggcgaagtgaggaggatgaggagcgacgcttgtggaagggatgggagaaaaagaaaagcaaaccgttttttttaatggcagtggtaggtaattttttcctcgaaagcatgtgaaagcaagggtagaggtgtgtttgatttgtactacaccaaaagctggctttgggaaaaaaaacagttgtagcttttaggccttggtttttggattttgcaaaagcaaaagcaggttgaaaagcccaacctaacacaccctaagtttaaataagtttgtggacaaatatactaacattacaacaccaaattagttacattgaatctataattgaatatatttttctagtatatttgtcttgtgctaaatatattactatttttttctacaaactttatcaaactagaaccattttgactttgacaaaagtcgaaatgacttaaaggtcataaattgacaaacaccatgagaaaccattaatgcgatcccagtgatctcctatgtgatgtctgcagtggaagtagagattgtagtcttcgaaccgctccagggcttgtcatcgatatgtcgaagtagctggagcggtggcacgtacaagatcatcggtttgattgcgaaggggtccattagggtggtagcgtccctctactctatgccacctcgactactcaacaagggcaaccgcacgttcttgttctagttctagtcattgtctactcaatatgcattcatgattggtcttgcgtatttgagttggcaatgactacagggagggagggattagagacatgagataggagatggtttggagttaatttacaaagataaatttatatttacaagataatctattatacttattaaaaaaacagcctaaaaagtaggagattttttaaagataaattttataataataactaggagctgccgttttattaatttggggatataaattttatacttcctccgtttcatattataagattttctagcattacgcgcacgcgcacacatacatacacacacacacacacacatatatatatatatatatatatatatatatatatatatatatataaaagattttctagcattacgcacgcgcgcgcacacatacatacacacacacacacacacacacacacatatatatatatatatatatatatatatatatatatatatatatatatatatatatatatagtaaatttgtttggtgctccatggtgcccgggcaccattgttgaaattgagtatatacctaattcaaatgagtatgaaactttttcaattacttagatattaacattagctactttactaactagttcaaagcaagtttgaactgaatttgaacttgtttttgttagattttgattctaggtatatagcatccatacatataattagttaggtatgtaatcatggattgtgaaataaagttaaatttgagttattttgttgataggtataggtatgaatcgagttattataactaggtatatactcacaatttgaaaattttgaaaaatttgagtgattttgtgtatttgataccatggtgcccgagcaccatggtgccccatatgagtgtcctatatatatatatatatatatatatatatatatatatatatatatatatatatatatatatatatatatgtgggtgcgcgcgcgcgcaatgctagaaagatgaattaatgacacacaaaaagagactgctcttcatgctatacaaatatcctatctacggtccggtcaaaaccggcctcgactcgctttgaagcacgttgggctgggagctatgctaatcgctgcacatctccagttttggacgcttccttcaaaaccatagatgaacacgcttaggaagtggacatgaaaagctgcttcttagcttcttctcgacgaatcactctcgttagcttgtcaatcgttatcgtccatgatgttgccgtattcgttcgtgtgcaggagggagcaaattcactccgaaaatgactgaagaaggatggaggcattcggtcttggattcagcatcgcttcgaatagacgcggcgaagatgatggcacgcctgggccgtgcggtccaacaggcgtccgtggtccgggccaaaccaaattattggaacacaaagccctcctcacgctgcgatcagcgagctattcagttacggcccaatcccacgtactacagctgaagagaggaccaattcccaaatcccaagtcccaagttcccaactcgatttttctcgtctcacggaattttttttcttaaaagaaggggaaagcacttgccgtgtatcaaaaattcacaatacggggaaaaaaaaacaaggcagctcgttttgggctgcctggattttgacaacagggggggtcaaggacacaaggcagcagagtcagagtcacacaaaacaaaaattaaaatggagatgcgggggatcgaaccccgtgcctctcgcatgcaaagcgagcgctctaccatttgagctacatccccttgctgtatttcgagaaaaatacaatttaaacatcctataaatgtctctgaatatgacaaagttgtgtccccgcactgattttgatctttattcgggtaggatcagcaacacagaattctcgtccggtgccggtggtggcctgcgccttgtgtaggtaaccagctctatcattttcttttcgaaatcgaaaaccaatatgaaaatggatcatacataaataggagtgaatatcataatgaatatttgtcgaaatataaaaccctctaaactgagcttttaactttttagtaagaaaacacatcttcggttcggctcagtctttagtggatggtttgtttttgatcacccctatttgactatcttaatatataggagtagtaggccctactatttgggttggaccaaattgatgtttggtaatatgggcctttacttcaaaattctaagaatttttcaggaagtttctaggcaactttcgctttcctatggatagtgcctttcatttccaagaaaaaaatcaaatttgttttcatttccaaaattttctaaaaaaaatactccgaccggcactttctgtttttaaaaataggtcaggagtctataaactttccaaatcattttcgctcctagttgtgtctatgcgagatcatcgtcagttctctttctatttggttattaccaggttgacctgacagtttacctatttgaaaggccttgcccatattactaaagtttgggcaagggcaagggtcgcggcgtcaccggacggagtttggagagttagactcaggcgaggccgagagccaacgcgatgcgaggaagaataggaaattgtctcccctgcgtccgcgtggtgtgctatgcttgtgtgtgatgcgtgcgttgcgttggtttggccggcctcagcgtaggcgcggcaaataagcagcgaagaggaagacaaccaaccaaagtcacacgcgcgctgacgcgacgcctggcgctcatttcactccttccattcttcctcctccacgtgaaactcggctattggcgttgcgtttttttaggggtgtttagatccacggtaaatttttttcccatcacatcaaacatttgaacacatgcatgtagtattaaatgttgacaaaaaaaaactaattatactgtttgcgggtaaattgcgagacgaatcttttaagtctaattgcgccatgattttgataatgtggtgctacagtaaatatttgctaataacggattaattaggcttaataaattcgtctcgtgttttacaggcggattttgtaatttattttgttattagactacgtttaatacttcaaatatgtgtcatatatccgatgtgacacgccaaaactttacacccctaaatctaaacatagccttaatagatgatgccccacgttttgctgcgggatatatgttagataatggagaaatgatgaaataatttggattgagatattatgaaaatgatttgagaatgatgatctagcatgtgtatgtttagttttagaatgaagtagattatagatataattactatatacttttatatgttgagctttgtgtgtttaatgggttagtgtggcatacttgcatataggttttaaaagtgttaataaatgcttgtatgttgaactttagatgtttagtggatattaactttatagaaataagatattaccgcaaacttctcgctatacccttgaaacggcccattaggtctttgggcctattgttctgtgggccacatcacccttccccgacataaacaatgacgaaatgtgaactggctggcagattcctgccaaatggagcgaagattccgaaccaatcgcggaagatcggaagatcccgctttgttttcttccacctcccagctctataagagcacccgcaatggtaaagtaaggtgctatctataaaacatgtacacctcagcaatagactagattaatagtaaaccacttcaatggtatgtctacatgggtatctatagctctgtaatccattgtctcgtttttctctatagactatctccatttagtagatagttttgctctctttcttcatttaatctcttccaagtaggaaaatatgctgacatggatctcttgtagagagagcttatagataaccattgtgggtgccctaactgacatactcctccacctttcgatcagcaaagccggagagcaccacaagtgtcgcggcggcagagcaccgcgaggcccatgaccgccggccgaaacaaagggagacacgcgtggctggtcgggagctatagcttttctaatcgccatgactccctctgatcacaccggcctcaccttacttcccgcgtaatcgccagcaaccccagtgggtgcatgcgtggacggactgactgattgatttgcctttgtggatttagtatttttcaacggacagctcgatatcggcgaaaccgatcgagtgattggcatcgtccttattttcgctcgctccagagtattagggatttaatggtcctcctttccgttgggattttgctgtcatgctactctttaatcactctcctccccacaaaaccgtttcaaggaaacgaaaagaaaagagaatggatcaatgggagaagagaaaaccacttttttttttctcttttcttttgctactccaacttctttaactagccacgttttcttttttaacttttttaaccacatctattttccttttcttttgctactatactacaacttctttaactagtcacatagtcgtggtttgtgtgacttttgattcaatttaagaacttaattttgtatataatttgttagtttatcttagctttcaagaaggttttgatgtaagttcatttaagtatcaattggtctagccaactatatatttagctaaattatattagattactttataaataactagaaggttcctatatatatctttttcattgtctttgcctctttctctctctccgtgtttatgtgtctaacgggagacattataaatctccgaaaattttcatatgtttagtttatttgtgtattttttttaaaaaaagtgcatgtattttgattcaatggtcgtcgtttatccaaactcttaaatatgggcggctaatatgcttttatgatatgatgcattcttatgtaaaaaagcttgttgcttacactatggctgtgtttagatccataggtataaagttttggcgtgtcacatcagatatacagacacatatttgaagtattaaacataaactaataacaaaacaaattacagaatccgcctgtaaactgcgagacaaatttattaagcctaattaatccatcattagcaaatgtttattgtagcaccatattgtcagattatggagcaattaggtttaaaagattcgtctcgcaaattacacgcaatctgtgtgattagtttttttaatatttaatactacatgcatgtgtctaaatatttgatgtgaaatggtgaaaaattatgcatagatcatcgatataaggagagagaggcctggataaaagttaatcgccgaatggcccacagttgaatgcacccatgccattctaatcgccggaaaagatatcgagattatgcatggcctacttaaatttggccaaaaagttcactgcagcccccacacaacacaactgtaagatgctgggtgcgttgcatttggacaagccaagggaaaaccaaagagttggttagctgattcatccgtgacacaaactgcaacaccaccgaataaggagcgcgagaaggacctataattaaaccgccaaccaccaggtcttgtctgctacgcgaaacttttcttttcttctttgccttttttttttatttgatctgatttgtttttaggtgatcaagcagaagcaagctgctgcgagcttttgattggaacacacgtagctcaaccgtagctttacactgatataagccatgcatctgcttctttatctaccacatggtggaggtccatccttgatttcatgtaatctattagtacgtactatcctctcctcctccattttgctttctgcaattctgctgcatgtattctgacgaacaatttgcacctttataaggctccatttcgtggcgcatgtccctgcttccacctagactgggacaccggtagagtgaaagggtgactcgatcgcagggtatcagtagttcttctgcaaatctgcaatgcacacaagtcaaatggagagtactggactagttcgagaggaatgcaactttccctctcaaaaataataagttgattttttccattttgctttttccaagtaatggtggcaacgtgacatccctcacaaggtaagataatcataaaccattttttaaggaacataattttaataagatatttaactatttataagataccattgaacccacatgttatagacacatgaaaacgcacatgtcatagactgtaagtggtaaatccttaattgtcacatcttaaaagtgacaaaaaattaaatgcttaattttaatatccatgatataaacataatcaattgcgtcgatcaaatggaaaatctttacttaccgttttcctgttctatatagcatgccacaaccgtccgaataggaaatcgtgtgattgtatcatggcatgtatcaatttgcgttgagctaatgccaagatcatatgttttcatccttatacttgtaccttcgccaacatgaaattttagtagtttattttagaaaatataatagcatcgtagcattagtcatcgatattttttccttaagtattattaatttttttacaactgggattgcttcaagatccgttcaaccctaatttatttatctaaccaccctctcctcctcaccacttctagccaacctgacttgattgccgttgtcagtctcttggtctctaccagtctctgtcaacccaatgccagccgattgccgcttcccccctccttctccacaagattcatcattgtcatctccaagtatgtcgccatccctcccccttgtcttttctcaaccatgagatgtcggatcctcaaccgctacccccaaccttctaactagaaggcctctatcactcccacagctcacttcacccgctgccctccttcgtgcctatatctctggctatcaataccttgctgcctgtccatatccgctccaaaaccactagtcttccaacacttgaccattccattaaagccattctcattggcccccatcctcttaccgtctttaatgtcaaaagcttaatccgtcaaagcctactagagtttaggcgtcactgatgttgtcaccaaaggagttcaagttatctttctacctcactcttggctagatgtgaagaagattgctaagccgaccattagatcttgatccaagggcatttatcgatagattgagatatgaggaaaatctcaattggccgaggaatatcaaaaggcaaatgttatcctaactctattgtagtagtcatggattgcaatggtcagtaatagcctcaaaataatgttggtttctaattggctagtcagacatacatgagatggttcaagatccttaggctttgatcattgagaaatagagactttgcaaataaaagcagatgattggaatttcattgctgtcaattatttacgttcccaatatgtttataatgttgcacctggtggatctttagcaagcgtgtatcatatcttaagagaatatagcatgggatagataacccataagaattatccatagtagaagatggattatagccttttttttccgagaactttatacatggggttacttacactaatgtgaatggcttatcaatgccacgacacgttgatacccccattcttttcttttgccatgcgtccgggtggaaccaatagaacgggactttgcaaattgcaaacactgaaagtaagcaggcagggcctgacctgtgtcattcttcacaacctaacttgcacctccccgactaaggaaaaaaaaacagtaaaagagctagctcatcaatgtttggtgggtcatcacttttcacacgcatatccttgttctcatggtgtaaacatatccagctggtataagaatatgatatagtgccttaaacgcatagtgggatgagctactaggggggtcatatacatagttaaatatactacaaagcacttacgactacagtaactgaatatgcatgcggtgtctgcatccatatacatttgccattggataacaatgaagctagcttctcctttccattgagctccaagtatatctaatttgacgacataccgatttagattttgaatagaccaatttcgcaccagatacatgctactttcacctttcagacactaataatctatcaatatgagataacacacacatgtcctctttatttgtatattccagtccttatctattctagctgtgcatagggaatattttccacgcaaaacccagcgcatatcccgcagtttctccaccttttctcatgtttttcttccttccttttttttttttttgtcacagcaagagtgctttagctatagtcaatggaaggccaaactaaagttatccactttgacctctgaaatcaaaacgccagctcccccaacaaccttttaactccgatgtctatctccatatgaccatatcccacgcaacaacacagagcatggtcacaaaagcaacacataaaaaaaaatccaaacgagacatgtacacattgccagatcgcatcatcactgacagggaagccataacgcacacacatgcgcatgtcctgatcagtgatcacagcacatgcatgctgctgccggccggcgaactgtcaactctcgatcgagggcgcccgccgctgatcccgccatagaaaatgacgaccgagctaacgaccgacgcgagagcccatcagctcgatcgatctgcctgcctgcctgcaggctggctggatcgatcaatcgatatatcggtacgtcggcaccaacccaacccaacccacgaggccacgatcggtggcgcgcgcggctgccaaccggggacggttgggtgatccgactcggtgcccggtaggacgcgacgctgactcagtgcaacgtgggcgtgaaggggaaaaagcaggggaaaccgcgaaagtgcgcgagaaaaaaaaaaggggggggccttggtgaccgaacgtgtgacggcgtcttccatggtcgcgcggccgcgtacgtacgtacttcttcgctcgtggtgatcgtgtagtagggggggttggacccatcgcccagtttatccatctgtttccgcgtcatccccgtcgtcagatcagcgcgagtgcgtaattgctcatgcagatgcagaaatgcttgaaaaagaaaacttggagtaatctggacacataaagttgctccgggcacattgggattattactttgctttacccatgcaccgttgcacgcatagaaagatcaatgacgcactcgacggcgaggaacagtcacagtacagtcacgccacagagcctcttaatttggttctttccctacctgattcccctgatcccctcccaaatttggtaccatgtgtccatgtcataaattatccgtatcccaaaccgtatccatgctataacatgcatgcatgtacgtgacaactggttggatgatagagtatcagtccatgcttggatgactgtacaaagctgcagtgcagtagtgggcacctcccctcccctctgcacatgcagcacagcactaggtgaggccagctccatataggaaaaaactccttttatcctgaatcccggtgggagacggtgactgttccattcaaaagtgtactggataggctccaaatctttttaatttgatccttctgaggagaaaacccttgtataaaaggcacccctcttcctcctacttgaagcacggagctcgagcaacaaccacccacgcacatcaaggagtcatctcaccactcaacgacagcctcgcacaagagcagggaggaattttcggttgttcctcgtcccaaggatcaatagatggagaaggcagcgtgcaacgagcatgtgatcgggatcccagtgagcaacagggctttcggcatcgaggagccggatttcccaagcgaaggagcagccgcctaccacgccgaggcgaaaagctctgcaaccgcgcgtacgagctccagatttggcaggacaggggacaggctcgctcaaggcatcaaagaacatggtacgttcttctccagtccatcttggaccatactacttttgatcttggatgagttcgatttttcatggttgcgaattggagaattggtactgaacaatcttttcttgatgatttgcagtgactctaggaccaaaactgtacgagaccatgaaaggcaagctgacgctgggcgcgagaatcctccaggcaggcggcgtggagaaggtcttccgccggtggttcgccgtcggcaagggcgagaagctcctgagggcctcccagtgctacctgtccaccacggccggcccgatcgccggcatgctcttcatatcgacggagaggatcgcgttccggagcgaccggtcgctggcgctgaccaccccgagcggcgacacggtgcgtgtgccgtacaaggtggccatccctctgaggagggtgaagacggccaagccgagcgagaacaagcaccggccggagcagaagtacgtccaggtggtgaccgacgacggcttcgagttctggttcatgggattcgtcagcttccaggtgaccctgaagaacctggagctggccgtcgcgcaggcgcagtgatcgatcgatctctgatgaaacaaacgtcgaagttgggtcgtcggtttcttggtcgtgtgccttgtgtgtggtctggttaatctgttgtgcatatgtggtagcgtcgtaggtgtttgtggtggattgcttggcgtttttggctttggagcaagtccggtacacatggtaggagaaattttagtgcatcaaatttcttgattggtgttggagaaaatagtgccacggcaaaagtgccatcatatacatgtggtatgtacaagatcaatgagaaatccaaaaatgtttgttcaacactacatactacagtacttcagctcatctcttcttggcttttattctagagaactggtatcgcagactataaatgatttattttgtgtgtgtgtgtgtattattggaactagctaattaatatgctgaattattggcaagactgatcgacttgatgaatcaagacctttcatctgaaactatgcgtgtataacctacttttctcaaaaaaaaataaaataaaataaaactacagcctaaaaggtataagaggaaaaaatattatgcgatctaatcatgtcagcatcactctaaaacttgttgattgcatcagtttacttccaataaaattgatcccacagctatatatctactatactatgcatgaattattggcaagagtgattaggtgcattatgtcaccgttgggcactttaattcattgaactatacttaacgagataaatatatcagaataaccggatcataataatatgaaataaaattatgaatataactcatttttaatagagaaattacgaataaaccggcatgaactcaacagggccatgctctgtgtgattggcattgccttggcttttcagaagctttattgaagagccaagctaacgtgtttagccactctcgacattgtatatctagccaccgtaactgtcaatacttaacaaccaagcaaccaactaggccagttcagttcggtgaataccatcgatcgttaatttaagtacataaaaaccattgacatcaataccttaaatatttctgttgaatatttggaaatccatgtgcagatttgtctcgtaaagtactttcataattaattttagaactttttaaacgttttgtaatggacttgatcgatgtgcagatttgtgttataattgtattggggtttttaaacgttttgtattaaaaactattggttagaattgtattttgattaccacgtcgatgtgaacttctttttaccaaagaaagtataattttagaacacaagttatagagaaacaagttggatttgtttcaccgttttaacataggtcaatccctaaatgaaattcaacacaagtcaatggaaaattttgctatagaacattcaaaatttatgtaatttgtgatagacatcacaaaaatgtgttatggttggaggaaaaaacaactaataatttagccaagtacattcagttcaaattggagatagaaattattaaaaagacagaaatgtccctagagtaacgagaatttaatctgacattgaagtaaagatgaaatatgatatctgctagcaatatactttaagtgatggttgattgagagttgcattattttttagaatcttgttttttttaaagatttcctctctccaactgttccggaaatgttctcggataaattatctgtttttttgtgttatcccatcgtgaaacttttttcgatgtccagtaccaataaattttttaagaaaagtagatatcctatagctaaaattatcgtcaatccctcttaaggattttggaagcagttgggatgggattttgaatagcacgcgaaatatgtaagtcattaatgcataattaatagagtattaattactatatagatttatttattttttaaaaaactttcatatagaagacttttgcataaaacacatcgtgtagtagtttgaaaaacattctttccaaaacaaaaaagttgtggttccctgctactctgccaaactcaacttagattctgttgggtgtgtttagttcacgctaaaattggaagtttggttgaaattggaacgatgtgatgaaaaagttgaaagtttacgtgtgtgagaaagttttgatgtgatggaaaagttagaagtttgaagaaaaagtttggatctaaactcggccatacttttaaacagaaccaaactacgatcctaagagggaatttcaggtgcaatcgcagctccagaacacctgaaattcacacccagaagaacacctgaaattcacacacagaactcggactgttctctcgtcgtatctagaaacaccacatttcgcagatgaaccgtgtggtagacattagtacactgcatgacaattgacaacaaagcatcatcattgatgttacttctcctgccatctccttaggttgtatttagatataaaatttagattcaaacttcagcccttttccattacatcaacctgtcatacacacaacttttcagtcacatcatctccaattttaaccaaaatataaactttgcgctgaactaaacgcagccttagaaaacagcaggatcgtcctgaaaacgatctcgtcggaagtgtcccccgtttctccagcgacttctccggccctgcgtgggcacgtactccgcaggaagatacgctgaagtaatccaggcgcagggacgagcccgagccccaccgccaaaatctgtttccgagcaggtagccacacgggctttccttgtcgttgtgacaacgcagcgcagcggtgcagccgtgcagcgcacgcagcgcattgcgttgtctgcgttgcacgcccgtcgcgcgcgcggacgtcgctcgcgtctgcagatccagaagcagtgaggaagcgccgggtcggcgtcgcaacggccctcctgttgccggcttaaatgcgggcgacaaggacggcgcgtgggcgcccatgcgaccgcgttgcttgccttgggcagttggcaccacagccgagcggacacgcgcgcggggggcggacggttacatgcgcgcgttaggtgaggtcggggccttgctgagtcggtgctgcgtgggatgtgaccaagacgtctgggcttggtttggtagggaaccttgaagttgaagaagcagtgcacagcacagcacagtcgtttttgcctctgcttcctccacatcgatcaatcacctgttcgccgtggatcccgtgcggccgctatctcggggaacaattctcgtgcacgccacagtgtgtgttcattcgagccataacgtctcggtgcaatgcacgaagaacgtagctatacaagtggccttgcaaagtacgagtaacctagcatcggctcggcgcagtggggcccctttcgtagctcccgacacaataccggcccctttttttcccggggatccggtgcgtgcaggaatgtgcaggcacatggggcgcttctcggaaagcggcagccggcgggcatggccatctggccgtctcgataccatagagaaatctcgaatctcgctttcgagcaatgaatataccacacctggccttcacatggaaggtggggctacctccaaaagctccatttctagccaggccgaatggccgagcggatgacgcggccactcacgaaacgagcagctgcaagcctgcaaccagcaggcagcaagaggagggtctacgccttctttacgcgaacgtggacctcgcctttctgatccaccggtgactcggccggcccggttgctgactccgcaaatccactgcgcgcctttgcgaaaaggatccaccaccccgccgcgacgcctatataggccgctctccgtggctgcactccggtaccaatccacttttccttccacgctaaggcaaacagcgcaacgcagcacacaacacaagcactagctgctcgatctcgtgaggctcgtagtaagcacactagctgcagatcgagcgaacagccatgaggaagtcaagcatcaacggcgtccatgtcatcggagtcccggtgaccgccaaggcgtttggcatagaggaggaggtgtcgttggccaggggccagtcgttcaggaaggccgacggcgatcaccttgcggtctcgttgtcgcaccccagcccttatacgtctttcggctataagcacagtaagtatatatattggtcacgatcacatcaaaaccgtcagatcaatttctgatgcacgcaagacatgtggtttctaatgtttatggtgatccttgtatctctgcaggcagcaagggtcaggttatccactgggtgagcaagctgagcagaagggcacagggcttcagggagcatggtgagttagcgttcatgcatgcatgtttaattcgccataaaaaaaaacttgttgatcattaggacttaagtgatgaacgccgtgtcctgatatatatccatcaccgtgtgtaacgtgcagtgaccttggggccaaagctgtcggagacggtgaaggggaagctgagcctgggcgcgaaaatcctgcaggccggcgggatcgagcgcgtgttccggaaggcgttctcggcggagaaaggcgagcggctggtgaaggcgctgcagtgctacctgtacaccaccggcgggcccatcgccgggatgctcttcgtctccaccaagaaggtcgccttccgcagcgaccggccggtcacggtcacctcggccaagggcgacgtcgcgcgggtgccctacaaggtggtggtcccgctcaggaggatcgcccaggtgcggccgagcgagaatgccgacaagccggaggagaagtacatccacgtcgtcacggtggacggcttcgagttctggttcatggggttcgtgagctaccagaggtcgtgcaagtacatgcagcaagccatctcggagctgcaatgactagtgcgcgtgcatgttggtggtctggtggtgatcgcgaggtccactattgtttgttccgtcggcacgatgagaagagaagttatgggctgctgcgccgtcttttgttgcgaggcagccctggctgaagttgctcgatcttatttcgggttcttccgcgtacgatttggattgacattatgtgtgttctttcaaatactagtagctagtattttgtacgatgggccgcgaaaattaaccatgacccgtgttgatgaatggaaaattttaagttgttcagatccttctcgagaatttcctagaggccctgattgttggtttaaatttttaagcagatatcgcggactatttctttattatagaatgaattaaatatttatttaaaataaacttagtagatagcttaaggcaaattgtataattaatgcagtactactccatactcataaagaaagtcgtttagaacaatgtttaagtcaaaccttgggaatataaatcatgaataattctcaagttgttgagtttgaaaaaatataaaaattatatgtatagatttgtcttgaaaaatactttcataaaagtatacatatatcacttttcaataaatatttttatagaaataagaagtcaaagttgtgttttggagatcgtgtcgctgtcctaaacgacttcctttacgagtatggaggaagtacttctttgaaaaaattctctaaaccttaaagcacatataaactcacatcttaaaagaacagggccggtacgaagagaacttctcatagtcagcctagtctgtttaacgttaccgtctttatatctgattttgagagttaggggaacgggttatatctgattttgcggttgagggattcgattcaaccaggggcatgagttaagggagacaaaatagacttatttctaccagacgaggccgtttaaaccgatggagatatggcctgtaatttgctccgttgacccgtctgtatggactgggccggaacagatttttatctttaaggcccgaaagcatctaatcgtaccgacccatcgcggcgttcatatggacctgtttttgaacgggtctcgtctaccgccgccacctactcgcgcgcccgggcggcgtggcattggctgcctctggggcgttagcggcgagctaccgcccaccgcagataaatagaactcatggaaacgcacgtaatcaagcggacaagctgttggtgtactgacggtaatgcctcgttgcctcgtacgaatacggcgtttcgcgaaactgatcggcgtcgatccgtgtcctgatcgatgaagcctttgtgagcttggacattggctggaggacggatccaaattaggttggttgggaagcaatctggcaggatatacacggctacgttgcaggcgcacgcggtgggtcttatgacggattaactgcttgtacgtggtcacctggagtaacaccatcactggattttcttctcggtgtgttgctgaagtatgcaagtaggtccgtgtgtcacgctctcgcggctcgtctctacgagagtagtaacgtcgtcattttacattatggaatgtgaactggatctaggcaacgtcgatcgtttgcaggtccaatatgagttttgaaaacaagctagtactattgagaatctgtgcaccttgttttgcttcagagaataaatggagcctttgactgattctagtcaaggtggttttatgcgaggtcattcatgggtttcattgaacaggttagcaggagtaatgtttctccccctctctctagaacagggatatggtagtgtttagttcccttcaaacttttaaaaattccgtcacattaaatgattggacacatgtatgaaatattaaatgtggacgaaaaaaaccaattgcgcagtttgcatgtaagttacgagacgaatctttttagcctaattacgccatgatttgacaatgtgatgctacaataaacatttactaatgacggattaattaggcttaataaattcgtctcgctgtttacaggcggaatatgtaatttattttgttatttgtctatgtttaatactttaaatacgtgtccatatactttaaaaaattttagcacacgaactaaacacggccataggctatagagcactccagttctcgagtagtgtactaatgtcactagtcaatattttcatcattgtcgagttcattgcaaaagtgtctccaaaaataagtactcatgcagattaattctaatactactcttgtctctgatactccctccgtcccaaaataagtgtagttttacactgtttatgtctaatgtttgaccgttcgttttatttgaaaattttttacgattaatatttttattgttattagatgataaaacatgaatagtattttatgtgtgactaactttttttaattttctcataaatttttcaaataagacagacggtcaaacgttggacacggattcctacggctacacttattttggaacggagatagtacataatattatgaatgtgtgaatgtgtctcattcgattaaaatattatatattttgggacaggaaaatagtactactagagtctagagaaccctgatttgcatgatcattcttttgtttatagatagtactagcaacctttttttttttccttacgataaggttgggaacgtgtcaatcaaaatcaagagactgtgtaatcctgtcatatgagcaaggttaatagtatcgcttactaccagctactcaaaccctaatattagtccactatcacatcatcttgttttttagattgtatagaggttgctctttacatgagtggcttattctctctctcctaacttctcttattcacctcattatctaattctatatgataaatttaaagataatatgtagagatttacgtggttttttaattcacctcatcatctacttgcgcttataccttttctccgccaactgatcggtgcagcttatgtggttttttaatcgctggtgcagcgccgcacctgctgtgatcctattgcacctgctgtaaggagtttagtagtacgtactactgccggtgaatcctatatatttataaagtttatccccaataagtatagttaatgctaattatctcttttttcatgaagccacacatcacctcaattatttttagcctttagataattcatcaagggtgtaaattgcatctccccttgacggagcgtggggctcctcaccgggagaccgcgcaggcccccctttgccggttcggccgggggccctggatgagattctaagctcctagtctgtgtgtggaaggttcgcgagaaaggaaacacacaagacacgggcgatgtatacaggttcgggccgctgagaagcgtaataccctactcctgtgtttttgtggatctatgtatgaagaagctacaaaaaagctggagaaccagagagctcttactctctccctctctggtcgttctggatccgaaaaaaataaatcccccatctaagtgggcaaggtcctccttttatacctcaaggggataccacatgcaccatctctctcttttttgtggggacttatcctatcttttcataaacagacggagacttgtatggttgccgtccgaatgaccttctgatgggacggcccatacctacctccacttccgccggaagcaggcgcgacgtgggaacatggctgt

SEQ ID NO: 8368 - DNA, 51216 bp, Oryza sativa
  unsure (1)..(51216): unsure at all n locations
taaagcagtatagacacctggtttcgctgacgtgacatcctagtcagcaaaaataaataattaaagtatatggggcccacacgtaagtgagagaaaataatgtgagccccacatattttcattcttccatttttcttctcttttctctcttattttcttctctcatcttcttcagcgggtaggcgacgactggccgtgatgggcagggtgatgctgagcgagagatgtggggcccacatcattttctctcacttacatgtgggccacatatactttatttatttatttttgctggctaggatgtcacgtcagcgaaaccaggtgtctatactgctataggatctagattgggaggttttgtatagtttaggggtgaagatttctggtactgaggataagagatgttagacaaattcggtgtaaagttgagggacggtagatgtaatgtttgtttgaaaactcctcctgctttattcctttcgcctcgtcaaaaatcccacattaaacaattcaaaaccttgttatactgcgatttcggttgatatatacgccattcgagttttatgcaaagaattcaacccgcagtcggcaaggccccttgcgactggtccgcacagtacactcctatttgatttggccatgatcactgaacactcggatccaagcgacaggccaattgcctgctccacaacagcccatcagattctacgatgttgtcatttgtcaatcacaactgaagaaccggatgactttgatgacatcacagcaacacatgcatgacactggttctcaaaagcctccaaacacatgacgcaactagcctagctaaaccttaaaaagctaaccaacggcctataactaaccaaataaacaaacctataggctacagctgacctgtgaatgtgaatctatatctaataatatccctatgtgcacctgtgcaattacgcttgcagatcttttgtcacagcccgtccaaacccctctcttgacaacatggccgtccaatcattgaacacaccctgcgaccatatcacgtttgctgtatgaaagtcacataaggttgtgcatgctacaatattcctatctagaggttggcatttggtcttaaccaaaaaattggtccggcgacttcattctttaaaattttcggtcttcagaaaatgagaaaccgaacttgtaaaataaaacaactaaccaatagtttaattaaatcgatagtttggtctttcgtttgactaacctacctaaatttgttacaccggacgatatattatcacaggcaaggtacaaaagcacaacagcgacaatggtgaggtgcaataggtggtggcgcaataaaagaaggaacctcggtagcacaccataacaagcgacgagacgtagcagcagacgacacgccacggaaataggtggggttgcagtgtagcatggtggcgatatagcttgagctagggagggtactgagccatcacatctagggtttaggagtagtcatatatctgtgggtggcccttgaggtggtaggctatcaagccagcggttaaatttgggctaaaattaggtattttggttaaaattaggtatacgaccaatcgacctgaaaaatgattggtcacaaaaaccaatgttttgatcgatgactgatcttttgtatacttcggattctatctaccttttgttggtttttttctcgcccatatcactttgtgcgttaaacccaatacttgaccgcccaaattattataagacggtaagctgaaacgcactacatcaataaatcttaaaatgagatagttacactatctattaacttattaaagtaattcaaaaaggagcctccacgtttactcgcatgacctagaaattctcacattaatcgggaaaaaaagaaaagtagagtccataaagaaatacaattttaaaataataaaaacttgaaactaaaaaaaatataggaagaggagactagagtccatacaagtatacaatttagaaataattgaaatttggaattaaaaaaaagaaaactaaattagaagtcagagtcccacaatttaaaaatatctaaaattgaaataaaaaataagaaatatttgaagaagattctatagcccatatagaatataatttagaaaagctgaaattagtagttaaaaataaagaatattaaaatatgagcttagagtccatgtagaaatacaattagaaacaatggagattcggaattaaaaaataggaatattgaaagaaaagtctagagtatgtgtaggaatttagaacaaattgaaagtcgaaattaagaaaaacaaatagagtttagagtccaagtagaaatacattttagaaataactaaaattcaaaattagaaaataagtaatattgggagaagagactagagtccaattaagcatataatttattttggaattaaaaaaattaatattggaaaaaaacttagagtctacatcggaatacaatttataataatggaaattcggaattagaaataagaatattggaagaagagtataatgttcatataggaatttagaactaactgaaaatcagaataaaaatttaaaaaataaaagtagaatttagagtccatataaaaatacaatttataaataactaaaattcaaattttgaaaaataagcaagattggaagaagagtgagtccatataggaatataatttagaaataagtaaaattcgaaactagaaaacaattaataactataagtacaatacaaaattcaaaattatgttgctatttttaatatattttaataataaaatatgaaaatatttaagctattatatgaaaaatatatataacgatgctagccgcataatctgtgcaggccaccatactagttgcacataaaactaattatatgcagtaaagtttattagcgataaaaaataatttatggataaaaccttttacatgtgtgttcttacctatttaaaagtcgtgctggaaatacgatacatcaaaatcaactcaactctaaaattacatttagattttagctatgactgataatttgaaaagcaaacaatagtgttgtctaggacagtgagttttgacggttaactttgtctcatggaattctttggactaattgcactacatcttttacggacagctagcgaatgtaaatatataataaaggaatgataattgtgccgaccattttttttgtcttttataggtgtgttggatcattttttttaaaaaaaacaaatatgtaccgggccaattgacagagaatgcgcctaattaaacatcaggtgcactgcattccgatggatcatcaccaccaacctccaatagcgcgtgcacacatcgaattctgctttcccggctctcgcggtctcctccgccacaagcaaatggcgctgtggtttgattcgatcgaatccttccgctgctgctcatcaacggagaccgtggcgtcctgtcttccccccccccccccccccccaaaaccaaattaacgtcgtcggccaatccagctctcggcttcgatccctcgagctggcgatcgatcggcccatgtgatgggagatgtcacgagtcgcgcacagcgatctcattaacgctaacaaaacttcgaatcagattggtgtggccgggcagtacgcgttgtaatcggctaattagcttcaactaaaaagcccgatgcgagctattcccccatcggttatctaaagaagaaagctattctcccacatgcaagtgagaataccgtcatggccacgccgcatcgggcaaaatcgacaagcgagcaagacagggccatgtccaatcggttaaagctacgggacacatatgggatacagtggacgtgtaccatcgctcagcgcatgcagcagcagccggagcagccggccgattgacggcagattgaggcgctagtatactactactaggtgctgggaacctgtccgtgtcacgcatcacaagtctcgtctcgcagcgccacgcaatagccaccagactgacaaccggagacggaatatgcgtcaggccgtgcatccatcgtgaatagggaaaagggggcggaaaggagcacagtgaacagattgtcggctcccggaggaccatggccagccacagcgatcacatactccctccacaaaaattaaaaaaaaaacttgttttctgtatctaacgttttgaccgttcgtcttatttaaaaaaattattaaaaaaattaaaaagacaagtcacgtataaaatattaatcatgttttatcatctaacaataataaaaatataaattataaacaaaattcatataagacggacagtcaaaattggacacgaaaacccatagtttatcttttttaggatggagggagtagatcagtaacatgggacaacgccccagtttcgagtgaactaccaaagcaatgtagggctggattaatttgaggcctaaattagacttaccaaaattaatcatgtcaaaacttaccaaaatttaacattgacaaaatttagtaaggcttatttagaccacaaaacaaaccaaaccaaccagtcatatcccaaagcctttgattactgattaggtgctacgacgatgaaaacaacacgttcatacgcaactgcacatccctcgaagcctcaaactagcccttgagctactactaataagccacgaaaaaaaatagcaaagtaaaaataattatggatatcttttttctccgtgttttgggacaaacaaaatagggatagatggagaataggtttctcaagctcaatgcctaacggtgattattaatagagttattatctcatttctcattgataatagccgagcagtaaataggaaagttacaagcatattcttaaaaacggaaacccgaggataatcccaaacttcacattttgaggccattaagctaagttgttccaactattcaggatcgaactaaatctattagctcatggccacttgtctattcaattagtgtaagttagatgtatacaagagtgtataaccaacccaatttactctaatccaaatttattcctatgtttttcctaccgtttaatcaaacactcattcctacaaattttatgagtttttcaatcatctgttttgaatatacactggtggagaagtgctttttagtcccggttcgtaacccccctatagtcccggttttcaaaccgggactaataatccgggactaaagatcgctatctttagtcccgggtgaaaaaaccgggactaaagatcgatctttagtcccggttgatgacaccaaccgggactaaagatatttagtcccggttggtgtcatcaaccgggactaaagagagggtagcggcagtccatcagctggtccttgtttcttttttattttctcccgaatcgagtggtatgcatatcatcaaatcaaaccccaaatccacatcacaactccacagcacgattcacagattcaccacaaattcattcacaatatccattcacatattcattcacaacatcacaaatatattcacaatattgattcaaaggttcattgacaacatcgagtcacatactcattcacaacatcacagattcattcacaatatcgattcatagattcattcacagatcaaaacatccaaaccacaaattaaaaaaaatcaaaaaaaaatcgactcaccggccggcctcccatcccgccgccggccggccacccatctcaccgcttcccctccggccggatctgggggaggggagggccgaggcnncggtgaccggcctccatcccgccggcccgcgccgggccgccgccggccgtcctccatcccgccgcttcccctccggccggttctggaggaggggagggcgaggctgccggcgaccggcctccatcccgccggcccacgccgggccgccgccggccgtcctccattctgttggcccgcgcccggccgccatcccgccgccgccggccggccgccgccagccccaacccgtgcctggccaccaccagcccgcgcccggccgcctccatcctgccaccgccggccggccaccgccagcccgcgcccgtcccccatcccgccgtcgtcggctgcctctgcaagaggaagagggggaggggaggaggagagggggtgagagaagaggaaggggagaggatggagataaggaaggaaaagaaaaagatataaggatgggagatagagagagagagggggggctacgcatgcgcttgtgcgtgggctggtgcgtacgctttattcccggttgatattatcaaccgggagtaaagatccctgggatctttagtcccagttgaccaaccgggactaaagatcctatctttagtcccagttggtgttatcaaccgggactaaagatatcggggggcctgacaaggcctgacagatttagaaccgggactaaagatcatttttagtcccggttggtacaccaaccgagactaaagatcaaatatgcccgctgtagccaccaaccgggactaaagatcatctttagtcccggtttttagtggaaccgagactattgtggatttcgggcgaccgaccaaagatggtttctccaccagtgatatattcgtataatactcctttatttttcatattcctgtattttcttagtcttacgtttcaaaggtaccatataagtatacgctgaaaagtagactacgataaaaacaacctaatcctaaaatcaactttataattaagtgttaaatcttttgttggctgattagctatgaacggatgagagtgcagatccattcatcagttgcacttgaagcatgaggccgggtccggattggacgtgcgctcgtgtgtgaaggtgatcgtgcatgcgagggcccaatcgaaacaaactgactatcctggaattgcgatttgtgggtgcgcggttgcatcggcagctggcggcctggcgatatatcgatcatcatcagggcgggttagcacatgatcgaggcatctcgttgctcccaattatatgcgtgaagctccttttaggaacacaaacaggagcctagatatacaagatatccaatgcggcaaaagctcttgctcttttctgtgtagaccggttacttgattagggaggtcgtaatagtcaaaagagggattagttggcaccagcttgttttggtacaagtttatcctagtttagtaacgactcgccaaatcaggagggaagggcatcgaccccctcgtgctctctagttctcattgacacaggaagctagattccaccaacttaggttattgttttatcggaattgctaaatatttgttgacatatttttatggctaaatctttcactttctaaaccgttggatgtgtcctaaattcatactaacagtttaatacgcatcaagatatgtacttttaggaagaaaaacaaaatcatatttaggaatcgatcatgtgacctcatgggatgaaggcgtgactgccccattgggctactatatttttatgatctagattaaacttacatcttacttatactataattacatgcgagtttatatatgtaattatagtacaaatatagtgtaattatgaaaattacatatgtaattatagtataaatatagtgtaattataaaaaatatattgtaattatgttacaattacatttgacagatttttgggctaatttttagtcgaatgttgtatagatagtcccttgttttatttgagctataaggacgcgtgcttggttgatagtttaacaacacgtacatatataggccatatagtaatgcagccgtggtgatgcatcgcagcttgtccctccaaaaagtccacgaatcccctggatgcgtacaatgcatgtggcgaatggcgatccatctgatctgtaatgttctgcatacttctcaatcatcacacgtacaccaaccacgcaaatcgatctgataaaaaatatactcctactcgtaagatccgctcagtggcattctgcacacgtacggctactttaagctagggctacagttaattaggtatggatgtttgtcccctgcaggctgcagcatctgcattactgcttgaacgtcgagctgcgtgttatcgtcccgtccaagcagcacatgcgcacagtgattcagtgtgcgatactgggtgtgagctgggtggcgcctgtccggtataactttgccgatgcgattgtcctcgtagcgtagcacattccttcatcttctgaacatgttttgtacaaatgcgaaccgtacactacctatcagccttccgatattaattgctgccatgcaattcacctatcagccctaagggcagtagcagcgcgtcttgagattttaccgaacctcacccgtcaactagataaaaactatataagcaacatacttcacgatgcaaagttaccttatagtggatcccaccggtaccgtatttttcccttttcatctcccaatctctctcctcttgttcttttctcacgggaatccgaggccgatttccggctcggcccaggcggctccggcgccaggcagcacggcggtcgagtagcaacagcgtcaggcggccgggcgacctgagcggtgacggcgtcgggcagcccgagtgacggggcggtcaagcggcgacggtgccgagtggatctagctgctccacgacgccctccttctttgctaaactccttcacggccgtgcgagctcgggggatctggcagcgagcccgatgaagctagcaacatcctcacctcccttagccccctcccatcctcctcttcttcggcggctgtcgagcatgaaccttgacggagcggatgaagctacctcaccagacgatagcaccgccgagcttgccagatccgccggctctagccttgggcgtcggcggcagtagctagaccgtcgccatcttccctttctcccttttcatcatctggcacgcgtaaagtttaggcagctctgacaaacactgacgaggaatgcggtgttttgtttggctccgcgttcttcagttggtagcgactgaaactaaggtggcatgaaatctatgatgtggaaggtctaatctaaataacacgtatatgcaccgtgaacgctgtgagagtaggggtgtgtttactcctgaaaatagttggaagttttggaaaagttgggaatttgaaaaaaaaagttagaagtttatgtgtgtaggaaagttttttatgtgatgtgatgaaaaattgaaagtttggggtagttggggtgaactaaacacggcctaggaatacttattgtcactgcgtcaaatgtgatatgctcatgatggtgcgctactagtgaaacggttcgtatttaaccgtgggacgacgtcactgcacatcactcatggagatcggagtagagtagagtagactggcagagcaggtacgtacagcctgtgggcaatggcctttaagggccttgtgtagttgtaaagctgctgatcatggagtatagtacgagtactctaggcgcacttctgaccatgttagctctgaccgacgagggggggtgttaatgcgatcgatgcgtacgtacgcctgccggtgtgggcgcgccaccggccacccgacccacggccacggggcacgggctcgatcggatcgcgtagctacctagcgtgcattgctccagcattcggatttttcgtcgtgcgacgcatgcgcatacatacctatatctgcacgcacccgtgtcacccgcgtgctgccgtgcgagacgtcacgtggaaaaccgccaatcgccatcatcctcttgccgtgccgtgcccccgtgccccgcggcccgcgcgctatgccgctatcgagaagcaatggccgcgaagccggcgtacatagctactgtagtagctagctttcagttggtgctttcgccgcgcgcacggggcaaacgggcaaaccggcgaactgttcgggcgatctccgggtgatggccctgatggggatgggtacctatggtggtgggttttggaacaaagctagcgatcgagaccgggtcatggggggaattattggcggagtggcgcgccggtcgatcggtcgatccattgttccttctttatgagcacggtacgtgatgccctgatggtacaataatgcatggtcgtcgtgggctgaattgtggtggaacaccgcggagcgcattagctggagcccgtggacacggtaagtaaacccgtccagaattggtccgtttcatacgattttttctgcagagtccatgtcacattattctcctcaatcggacttcgattacagctaagcatactgatactaaatttaagagcgacatttcactgcggatatatataccaacgagaagctaattaaccagttttattagtagcggcatgctaatacttttctaagagagggggagagaaagagagtaaaaaagaaaaagctgggacagtacgaaagacctaaacccaccacacactgactgcatccgatgtttcctactgtttgcacacagaagctctctgcaggagttcacgtactacgagccagatccctgtgacgtgcaggatgcatcaacggtattggttgcataaagatccacagcctaggcgtggaggacgactcttggtctttgcaaacttctgcgctggtgcgtacaggaattttgtacagttgtactgttggaggctagaatgactctgcctgcaggagggtccaagcttaagcaatgttcacttccattattagagttgatctattattaacagaagggacagcataggtgacagccacgtaccgctgtggttatatgttggtttcattgtttcacgatatatatgcatgcagctaatgtttcgtgttccggctttccggagatccgccactacgtttttatgatcgcttgctgagttcgggagcacgaaaaatggtgttacccattaacacatgattaattaaatattagcctaaaaacttaaaaatagattaatatgatttttaaagtaattttcctgtaatttattttcaaaaaacacactgtttaactgtttgaaagcgtgtgcggaaaaaaaaagaggtgagttaggaaaagaggggaaataacacaacctaagtgtgtttctaatttcatcgtaaatcaggtttgaacgagtctatacaaatagaaaagtaatattaacatctactgcatactttctatgtctctaaaagtctcaaaccctaacatcccaataagactttaagaagagaaatagaagatcataatacccttaattaatgtgaaagttatattagcggatatgtaggagaagggtattgaagtaatagaatttctcattttgcggattggtggtaggtaagaaggtagaaacttgtttattttgggataatttttaaactctagaagttgatttattttgggatggatggagtatcaaaatgaataaataaattataaacatacattttataatagacttaattatgctcatttgatatcataaatattagtattcaatgaatttaatcagaattacaatagtttgacttagaacaaaactagcaatacacttacattttggagtggagggagtgggacctagctacaacatgcacaagtataccaaaaatatgtaactaaaagttaaattcactaatttaaagaattgtgctctgtgagggctatcttactctatattttatttacatggccaggcaaaaaaaaacttttatgtacacaataatattttgcatataataaaattttaaagtaaaactagagttaattaatatatgcaactcctagattatgtatgttttcaaagatacaatatataaattacaccgtcataatctagactcatcattatctacttatattcatcctaaaatataaaatattttatatgagtaaaattcgttatattatgatgtagtaataaagtaagtattttttttaattaacatggtttttttatttaatctttgcggcaaatatagattaagtataccatcgttaatacttcataagtctcaaaataagttgtttttagagtctaatcatattgtcccaaaatcagttaatttttcatctttatctaccttttctcataaatcgagaacttttttccattcaatatgttatctatccatctaccaatagtattttttcattaataacggtattttgatcttctctccaaaaactaaatttttgttgggatactagggaacgaacaaacgagatttggagggacactaggaatctatttattttgagaatccatacatgcaacctaattaaatagcaccatacactatgtatatgtatggatctacgtactgaagcagggccatcgctcatacagtaataatttgctcgtacgcactcaaacaatgaaggagacaataaaccaaagcagcagggtcaccgtgacaccaacccatgttctcagctcactggagtactggatgcttggatcccttaatgccactgtcatggtccaactaattcccggacatagcaaatgcgtgtcctacattgtacctatcacatctctaactccgcagtttcgcgtgcagctagctgcatgcatgcctagctttgtcagccttcttccagaggtgaagccaggataaaattatagtggggctcctcagccttctgagccttataacaatctcagacaaagtctattttagccctcttgtaataaatatatggatttaaattttagggggggtcttaataggggctctaatagtttattagggggtagggggatctaaagaccccccgcccccacacactgcctccaccactgccttcacccctttctcactaggagtgtgtttagttcacgctaaaattgaaagtttgattgaaattgaaacgatcggacggaaaagttaaaagtttgtgtatgtaagaaagttttgatgtgatagaaaaattagaagtttaaagaaaaagttgggaactaaaccaggcctcggtcgatctgcaagactgcaagggtacacacggtaggtgagagctacaaggaaaccgtcctggccgccggcacgagcacggttgcgtgaccgagataagagaaacgcttgactactcgcgcgtgcaacacgcacaaccggttgaagaaaagaatggcgggacgccggccagcacacgcggtcgtcgtacgagagctctcgtgctcccgcagcgtcttcctcgcggtcgcggagtatacaatatacgtggaccggcacgataggccgggttcgttccagatctcgatccactgcaggcaggacggccgtaagctagctacaagaacatgtgtcgaccgatcggaggtagggtgtcaatttgcactgcggggaaggcgattgacatcaacggcaacgcggtgtgttcgatcgccaacttggttgacataagaaccaggcggcggttcgcaggctgctgcctaattaacgttctgccggagaggaggcatatgcatgcatgcaaggccccatgattttgttgggcgcgacgaggatgtcaatcagagcatgatatgatgatgaccaatatgcatgtgagaatagtggttccgccaacgagattttttattagataatgaaataaaacatcccggcctttactcatcagagttacagccaattgttacaaaagtaacacccaatcactgagtgtagtttaaatgaattaaacacacacccaacaaaataaaaaatcaaactaagataaggagagcacatttattcaagtctatttgtgaatctccatccatagtttgcaaagagttgcatgaccgttgtctcaagcctacgacatgcaaccttcataagctctcgatcatcttcatacatttgcagctgtgcccaaaatcggagccaatatgttgccctgaaaattacatacatatatgagatagatggtaatttgtcagaaaccatatcattcctagtcaaccacagagcccaacatatggcagaagctcctacaagtatgagtttactcttcttcttgtctaccccaaaagccaaccatcaaacatattagatatggtagtaggaaggtataaaccaagagagaactgtactgctctccaaacaaattttgtataatgacactctataaaaagatgttgaatagtctcatttttcatacaaaaacaacatcttaaactgccattccaatttcgtcttgccaaattatccttggttagcacaacccctttaagcaagtaccacataaaaatcttaatcttaagtggcatcttaagcttctaaataatcttgtttctctcaatataaccattattaattaaagctagatacatcgacctaacagaaaatattccattctgatgatattttagctaataaacgaaatatcatatttgcaaacgaaaacagtggttccgcctaccacgacttctgtttaaggttttggagtagcagtacatgagcaatattccaaatttaaaacataagatgccattctatttaaggtaacgagatgatccgtcgtagtagagtgtacaaggactacggatgtctcaagacacatcctaagttaggccgtgtttagtttgtgtgctaaaatttttataagtatagggacacacatttaaaatattaaatgtagactaataataaaacaaattacagattccgtatgtaaactgcaagatgaatttattaaacctaattaatctatcattagcaaatgtttactgtagcaccacattgttaaatcatagtgtaattagactcaaaagatttatctcctaatttacatataaactgtgcaattagcttttttcttcatatttaatgttttatatatatgttaaatatttgatgtaatgaaatttttaaaaattcgaaggaaactgcaacattgccttagctagctggagtagtatttggagaagaacgagaacgacagaagtacagaaccaagcgaccggccattccctccctacagtggaggctgtctgttttgcatggctcaacgcgcatctccacagtgctacggagcatacgctatagtatagcctataggcaacggatggtcctatgcaaaaaagaaatgcgtagtctggatctggccaagtgtccaaaaaataacaatgcatctatccgtcacatgcggagaaagctgtcgcgtacattggaggccatcaagctatacaaccagttaggggtgtctagatagatacatataaagttttggcgtgtcacatcggatattatataaattattatatgaggtgttcggacactaataaaaaaactaattacagaatccgtcagtaaactgtaagacaaatttattaaacctaattaatctatcattagcaaatatttattgtagcaccacattgtcaaattatggagcaattaggtttaaaagatttgtctcgcaaattagtcgtaatctgtataattagttattttttcagtctatatttaatactttatatatgtgttcaaatatttgatgtgacatgatgtaaaatttttatgtgcgatctaaacaggacctaaaattttagcataataccatatcaaatcaatgtgtttttgctgagaccagcacttttcctacagtaagtttccccgcggagtaatcaataaactcccggtgcctaatgccctaatctcatagtggggcccatatggcagcgccctgcactgacgtactgacagctcccagtgccccgaactctcgcaaactgccgccgtctcacacacaaacgtggccacacccccacacgccagtacgccacccacgccacttcactgcccttttggcccgaggccgagggcgtggatcgacgcctacgtgccgcctgccgccgccaccgccgtctgggaggatacggcacagtgcatactggattattaccgggtactttggtagagtggtgcaacttagagcaggtacaatagcagattataaaagctataaatatattttaaagagataaaagaaaagagaagagcaacgggctacagatctatagccagctacagcacggactgcaaaacgtaatgtgtgtgtgacagtgggaccagatattaattgtatagtaagcaactattgtatggattggctattacattggttatagatgagcaagtttaatagtatagcccgctagtagctccaattcatctatagccgatctaatagccaattcatacaatagctgcttattatactataaacatatggttccacctgtcatacacacattgcgtcttgaagtccatgctgcagctggctacagatctgtagcccactgctattctctcatcttttatctcattaaaatatgtttatagctagctaatagtttactattgtgcatgctcttagggcagtcccaaccctccacataggatggtgtatatggcattaactacattgctatgtaggacttttagcttatgtggcactatattaattaagagagagagtgaaaagaggaagaaactgggtctcatgcaagacagtttcaacacgagaacctatgcactagacactatcaggttttgtattgggagagaatagtgtcttcataataaatgaagaataaatatgattggtagagaagagagatgatgtatttattaatagcccactttaagaaccatgagttatagaatgtagtttctattgtgatgtcttattgacatggtactataaacactatttatataccctatgggttgagactgtctacgccgaaggatgcctcctgttcggggacaacgaaatcggcgacggtcttgagaaggcagcaggcatacctcggagagctacacacgtttcatctcgcatttatggttttacttatctcaaaaatgatgattgttggtcgggcgagtagcattttcttttccgagaaaattgatatcttgccattttcaaaatagagtttcgcttgaatgtcattctcaaaagtggtttcgctaaaatgacacctttaattagggacaacacgttataatgccatttcatctatttcttctcattttaatgattttttaatgttttttcttgctgagacagaccaaaatacccttggatagtctcatctctccctctatctcttccttctatccgttgcaaatggtgggtagcgccggcggcggcgcggctggggacgaggacggcggcggcggcgctgtctccgtccccagctgcgccgccgagccgagcagccttccccacccacgtcggcgccatccccgtcctcgtctctctctctatctcttcctccgccgccagacgaagcatcgcgagcagccgtcgttgtctcgcgaagttgccacagtcgttgtcgccgcaaccatcatgagcacagcagccgcagccgccgccgccgtcgtcttacgaagctggtgcgggcagtcgttctcgccgtagccgtctcacgaacctgctgcagccttcgccttgctggatccgcagaggaagatgccgactcgtcggatcccttcatcctgctgctttgcttcctagcttgtagctctcgtaggcatgaagcatgtgaaggaagcagaagctaaagccacgttagatgtgcatgtttcattgaatcaattggcagctagctgggaggaatcgttgaaggttctgatagatgcgtggatttggggattaattttttcacctgtttttctgtttcttttttccttattgatgtatgcaagttgttcattaaaaaaactgtgtactacattgatttctttggaggagtgataaaaaagccaaagatttgtcatccactacattgatttcattccaaaccgagtggcgctggcaccggcgccggcgctgcccaccaactacaacggataggaggaagagatagagggagaaatgagataggatccaagggtattttggtcatctcagcaagaaaaaacattacaaaaattattaaagtgagaagaaatggatgaaatggcattacaacgtgcacgttgcccctgattgaaggtggcattttagcgaaatcacttttggcagtggcatttcagcaaaaccctgtttagataatggcaaaatgttaattttctcttcttttccggacaggtacctttttagaaaaagcacaactgtgatatgcggaaaacattcacgcccctatatctgttgctgaatttgccccgttgtttactgcctacttcccccgtgggccccgtccaaagcaaaacgtttctggtagtactcactccatcccaaactagtacagtataaactataaaaagtttctggtagttgtgattagtgaaatactgacaaatcattcagtggagaaaataaataagatattgttgcaattagttgatatggatagtaggcacagggtaacaccgtttaaaatgcatgattgaaaaaacacataaatagaaaaaaaaacacaaatgaataggataaaaatacatatgcaaaacaaagaattggagaagaataaattttatgggaataaacataaaaatatgttaattggattattagagtttaggatcccttcaaatcaagactatttgtggaagaaagtttcctacatttttctcttgctcatttatacaaataaaaaacaacgagttagtcacaataatttgaatcattggctgttgctgtgtgatgactgaaataatggtaataatttcgattagtgagagcctagctgtgtaggatcgaacacaagcaaccaagcctatcagagggggatgaatggtagggaaaaccaaaaacccaaaaacttttagcggaaataaaagttaccctcaaatcgatggaaatctcgacgtagtcctatcgccgccggtcagactgctcgcacgccaccggttagatcgccgccctgccacctgaaaccgaagaaacacaaatcgaagaactctcaaagtagatgacaactttattgcttctctatgtgtttacaaagtgcaacaacatcactccttacaaaaatctcgagtaaactcgaaaccctaactaaactatcaactccacgctctgaaaaacgatacaggaagcctcacgctccctctctatttataccacgaaaaacctcctactcaaagtaagtgtagaactcctattcatgctgctgccaaccatcggcatacatacatacatgcatcagcatccatacaccacacatgcatcgctacatatatgcatacacgtcacgctacagtacccagagtactgtagcacatatacttatcctccaagaatcctgactcagtcaccttctcagatggtatcccgaccgcaatagacctttgctccttcctgagtatagtcccggtcctcaccattgaccaaggctgacctcaagttacctgcacacaatcagacaaaacaatcgtttctgggcacagatatcacaacctaacccacattagtcacacgcactcacaccaacatccacacatcttttcaaaccaattcgttgattaaatcatttgcaaagccaattgttcatcacaaatattaaccatgacaatgatttcacaagctgaaattaaatttcagtgttggtcatttttgctcacttctagttgtggaagagtagaattgacgtgtcaggctggtcgatgtttctccaagcagaagtatgttgaaaaacctaatcaaatttgctaaatggcactcaatagaaatttggtatgaaatcttatggattttagaccatcggatgcatgcccatgcttcttctcatccaactctaacaagcatgttctcttctccagcgcctgtggggcacaaactctaacagaagacatacaagtcagagtttgggataggggttggagtaagaggggttaggggagggaggggatggggctttctctaaaacatagagggatggcagcgagcaggatatgggcgggtggtgagatgccggtggcggcgcggagccacaggggtggtagctgggaatggattggtgttgggggcggggggtgaacaacacagccatgttagtggtgaggaggcgatggcttgtggtggcggatgcaacggtagggggcacctcgctaccgctagcttgaagataaggacatgtgagaatgaggagggggacgacgtcaccaagagaggggctcaccaacgctattcacgccttccgattaactgatgaggtgggggttaatgtgataggcggggaatgcggcggctaaacgacgatcttccgctcactcactcgcgtgcgagcggggaagaagggagagagggaggataagattacttatgtgcatgaatcacaaagcccacattaaatggtcaataatctatcaacatattaaagtaataaaaaaagaagcctccatgttcactctcacgcattagaaaatttcatattaatcagagaaaaggaaaaaaatagagtctttatagaaatacaatttaaaaaagcttaaatttaaaattaaaaaataacaaatattgggagaggagactagagtccatacagatatacaatctagaactatctgaattcggaattaaaaaaaataaaagtagagcttatagtctatatagaaatacaacttagaaataactaaaatttaaaatttaaaagtatgaaatattgaaaaaagagtttagagtttatatatgaatataatttagaattaattgaaattataaattaaaaaataggaacattgaaagatgagtttagagttcgtatggaaatacaattagaaatattgaaaattcataattaaaaaataaggaatattagaagaaaagtctagtgtccatgtagaaatttagaaccaattgaataaaaagtaaaataaaagtagagtttaaagtctatatagaaatatcatttataaataactaaaagttaaaataaaaaagaaagaaagattggaagaagagtctatatttcatatagaaatacaatttagaaaatagctagaattaagaactactccctccgtttcaggttataagacgttttgactttagtaaaagtcaatctgttttaagtttaactaagtttatagacaagtattgtaatatttataatactaaattagtttcatcaaattaataattgaatatattttcataataaatttgtcttggattgaaaatgctatacttttttctccaaacttagtcaaacttaaagcaatttgactttgactaaagtcaaaacgtcttataacctgaaacggagggagtaaaaaaataaggaatattagaataagagtgtagtggaatacaattataaaataattaaaatttgaaatttaaaaatattaaaagaggagagtagtgtccatatataaatgcaatttataaataaaaaatattgaaagaagggcttagagttcatataggaatataatttataaatagcaaaactttaaaattaaaaacaaggaatattaaaagaggggtctagagtttatatatgaatacaatttagaaataattaaaactcaaaatttaaaaataatacaatataaaaattacccattggttagtttggttagtttagtacaaaattttaaattatgttaccatttcgatatattttattaataaaatataaaaatatatatgctattacgtgagagaaaatatataataatgctaatcgtatagtttgcatagactatcatgctgcaggtacacatgatataagaaggattcgtgtcgtaagttaatcaggcagtctcaaacctaattgtaaccagtcaatggttgggagaagtcgaaagcaagatatacagagacgtgcaactattttccaagatagcaacaggtcatctggcagcactttacatgtggtgcttccattgcagcaataagccatggccatggtaaattcatgggcatgcattgatggggacacatgtttttagtgatccttttcagccttttccacccagtaccaccctcaccctatgcagctagtaggtaggctttccccgatctaccttcctctctgactctctactttcaccgaaaccaaagaattgcttagaactaagctgttggttagcgagttaattaatcaggatcctagtgctgttgctatgtacggagtagatgtatacttatcttatccattaccttcccttgcaatcctggcaactcttgttcacatgtcatcacaccgtgcctttccactcttgccactgggattggacttgattagagtaaagttaattcgtgctcgcactgcaaatcctggtcctcatccaccttattagtcaaactcctgtgggtgtaaaattattatcccaggcttagagctaaaaaggtatctacctagctctttggaggcttgctttgcgactactaatatactattcgccaatgtcttcctcatgtgcgcgatttgatgcattgttaaatgcggctaattagcatccctaatcctacttcacgtggctaatgtaggtttggggtggcaattgttggtggcttggtgctgactttgtagcagagcacaactcagcaagtatgtatgtacagcggaagggcagtctgagccaggttaggagcggattacggatgtgcatcaagttgcaccaatatactagtaattatcatgtaagaagcgtaacgtctggctgcagctgcttaccaaattcgcctactaccggagatttttaattacttggtaagaagaacaaacaactcgcaaaatacaggcctactcggtcgctgttctaaagaaactcagttgctgttctatcggtccttttcaggatctgtataatccataaaagaggacgaaaaacccttgatcaaaaggcatgggctttgctttgttgaccccgcaataattcgccacctctatatcgatgggtcggtggctcggtgcgtagccatccatcgcaaggagaccgcactggacggtcatggcgtcaaaaacgacaggggcatgaatcgcaaaagcaataaaaacaggggcatgtacaggcagacaatccagtggtagttaacctcgttttcatcgcatcatttccctcaattccaagctccggcggatcgatgcacaccacaactccacaaggagacgcataacgtgaaaccgatcgctcgctattttactctgcaaattatctcggccattcatgagcacgcggtgttcagtacgttcgagacactgagacagcgacaatgtgttttgtgtctatatagaaacagatcgatcgcacagtaacacagacgtcgaataagtaaacggatatactactactacacggctgtaccgcatatacttggagtgatccgtcccgattaaacggacaacttaatcccttattaatcagctagtggcacgtactagcaaggagaatctcataggagcagtaacaatccagctgcaaactataggagctactactacctctggctgacaggggcagaaaaatggacggggcccggccggaccatgggtggtccgcggcctgcgtctcgatgaaagccggcttgattagcgcacgagacaccacagctactcgaccgggtggtttgtgcttgcgctttgtgctttgcttaatcatgccgcgcccgcccgagcgggccgacggcttatgcaccgctcgcgcgcgcaggggccaaaggaggcagagcgacatcagatgcgtgcgtgccgccgtgccgtgctcctctgcacgccacggggaccgcgcgctctgcgtcgctcgatcgggccgagggggttttcctctgcttttctctgaggccttcacgtatacgggggcgcaagcgcaacgcgggcaccactgagagctctcggccgtggtgatgccggcttgggcatcggatgccgttgtcggtatagagggggagagctttgatggagtactgcgccagtgtgccgggcgcgtgatggtcctggccctgtgcatgtggtgctaccctggtatagcctgggaggtgtatccgttctttttacgtgcttgggtttagcatctcctcttttctttccacctttctttctttcggtttatcaaatgcatctgcgcaacgaaacttcaaatcgtgcacaccgctgcaggtcgtctattggaaaaaaaaaaggcttaacagatgctgagtggagatttcgttggcatactcaggggtaggagtactattctagggtagtacgctgaaacgaagagaggacaaatggcaccatcaaacagtgccaacaagtcaatggtatgtgcatactccaaaggacgcgtcgtcggctgctggtgacgggaaaccgaaaagtaaaaccaaacgacggcgcgccacctcctctccgtttccaaaatcgcattgcctgcctagtccacttccccgaaacggcacgagcggttaacactgcctcgcgccgcggccgggcacaacccgctgaagcctgggcccccgcggtcgcggaattttaactccctctaccccctccatccccaaggacaagagaggagaggagaaggagaggccgcgcccccgaaaggccaaggacgagcgtaccaccaggtcaccaacccgacagtaaacagtaacccccggtggtaacaaaaccgacgatgacgacgacgcgaggcgggcagagaggggggaggggaggggaggcgttggcatcaccgcaataacaacgacgacggcaccagcaccaaccaccagtcgcgcagacaggcagcagctgacgcgcgcgcgggggcgagggcaggaacccgtcgcgattgggcggacgacgaaccggtcgcgcgcgggcgcgttcgggaatcgtggtggatctgacgccaccaccgccgccgccgccgccgctcggttgctcctctcctcgccgcgccgtcgcgtgcgtcgccgtcgcctccttgcccctagcgggcggccgggcaattccccgcgcgcctgctcgatctgcctcggtggtcaatgcgggcgaggagatgagcggcgccgaggaggaggaggaggaggaggaggtgttctatgaggcgcgggaccgcgtgctatcctcatcatcatgctcctccacctcggcctcggacgacgacgaccacccgcggcgaggtcgggatgcggcggctgctgctgctgcggcggcggcggcggcgctcgacgtgtggacgtcggagccagcgcccgtgcaggaacgacgccggaggcttctccagatgatggggctctccggtgacccctctctggcgcgcctcgagatgggtcgatcggcctcctacgacgggcccatccggccggagacggtgtcgcccatctcccgatccagatcggatggcagcgtgccggcctccgccaccaagcccccgctcgcggcccggtcgcgccaaacatcgtccgactcctccgaggccacgccagggggagatgacgcggaccccaggtgcctaatccgaaacctcgacgacggcagcgagttcgtggtgaaggaggagtccgcgctccgcgaggtgggcacggggaggcagctcaccatggaggagttcgacctctgcgtcggtcgctcccccatcgtccaggagctcatgcgccgccagaacgtggcaagctccggttcgagcaacggagcgtccgctctcatccagaggtccagctctgattcaagcaacggcgcgacgcgccacaggcggcgcggcagctggctccggagcatccgcaacgtcgctggctccatggtggtcggctcccgcgaccgccgaagcagcgacgagaaggacacctcctcggaaaagggagggcgtcggtccagctcagccacagacgacagccaggaaagtgccagcgccgtgcgccgtggcccggagcgtgtcaaggtacggcagtacgggaagacatgcaaggagctcagtgggctgttcatgaaccaggatatacaggcgcacaacgggtccatctggagcataaagtttagtcacgacgggcggtacctcgcgagtgctggggaggattgcgtgatccatgtctgggaggtgtcggagcttgagaggaaacgggagggaaatggggtgtgcaatcaacttgttgccgtcgtgtgcaatggttcgccggagccgatattggcattggcaagtgttgatggaagctgttgggagaagaagcatcgggctagaatcttggaaactcggaagtctgcgagctctgaccggttgatgtttccagagcatgtgttcgcactatcagaaaaaccggtcaaaacttttgaggggcattcggaggatgtgcttgatctctgctggtctaaatctcaggtaatgttacaaggtttctgttcattcaaaattcctccactgttgatgctccttgaatactcctataaaggaaaaagggtgaaggttgaacataatctcacaacctaaattccactaaaatttagtagtgacagagtgtgcttcttaactctcagttaatttcaactatagtcttaacatctatggtgaaacctcgaagtgcattgttttccatcaaaccatctttgtcataactgttagtccaactgtgtcagaacaagacactggcatcgagtagtcaagggctggtacagttcaatccttatcacactttggtgtagttcttctgaaacatggagcatattgatgcaaattggtgtcctttagctctgaactaatccttctttgttcattggaaggaaggttagaagtgcataagcagcaatctggcgaattgcctgcctatcgattgcatcatatagaagaggcactgcccaaattctgccatagactagttacttaccatgtccaagctcatcaattctattatatctgttacatgatgtgacatgaatactcctgtttttcatttagtgactaaattttagaaatgattcactaataagatacacaggaatgctatgatctacctttcagcatgctgtaatccctaaaatggcgataatgtaacaattagaaaaataagtttgttggattatgtcctatgaatcaatgtaaaatatgttgttctgcaaaatccatttagccttaatataatctcccatactagtactagtagataatataaatatatttgaggagtttcagccttcttttggtactacgttacaggttatttcatttattcatgtttaagatggatataggtttcaataaaggtcccgatgcatgactctggtgactcctgtatacatagatgaagttaacttggtaccatgttatatcattatttgtccaaagtaggactgtcaggaaatccttctagcatgtttcatattcagcatggcatgctgcataacatggatgacatatgttgcttgaccaattgactttgaatttcatgcgcatcagtaacttatggagttatggtctagaaaccaggactcgcatcatcaactatgtattgaaatttcagatgtctattgagagaatgttagttcatcctactagcagttcattgccctttgaaagtccaaatgcatgatcagatgctcctaatttgttgggcccttgttgtaagaagatgttagtatctaattggctttacattgtgtttggctggagaagataggaacttctcccaatgcatgcaaaacggagcggctcattagcacatgattaattaagtattagcttaaaaatgaaaaatggattaatatgatatttaaattaactttttttttttgcaaaaaaccacaccatttagtagtccgggaagcatgctcatggaaaacgagaaagtagaagatgggaagagggagtattgaacacacccagagggtagttaccttttgcagctagttatacatatatggtttctatataccttatgtggctagttacatatccagacttcacatttgtcaacaacagttacatgcttccagcaatgcatccccaaattatgattgctacaattccatgaatcttgtagtggtattcttatggttttgtagctattccagattttaatttctttctttttcaaacatcgtgcagtacttactttcatcttcaatggataaaacagtgaagttatggcatatgtcaagaacttcatgtttgaaaacattttcacatagtgactatggtaagatctcgagttgacattagcagttttgcgtgttctctctctcccccaagcacatatgacgtttctcactctgcgaacatactctaaattttcctttgctgctttgcgtttcagtgacatgcatccaattcaaccctgttgatgatagatacttcattagtggttctctggatgaaaaggttcgcatatggagcattccgggacgtgaaattgttgattggaatgatctgcatgaaatggtcactgctgcttgctatacacctgatggacaggtttctacactatatactgatgtatgtgaccgaaaaggtctttttgtatgttagctctaataccttgtctcatattttctgaagagagcattagtcggttcccacaagggcagctgtcatatttatgatacatctggtatatctcaccctctcatgatcctcatatcttatgagtgtatttctgtatgtttttggcttacttttccttcaggaataacctgtctctcgatcttatggccagataataagcttctccaaaagaaacagattgacttgcaaaataagaaaaggaagtccaatcagaagaaaatcacagggtttcaggtgcttctaacacacttttgaatatgaagcaaactatgtgcagatcacagatcttctcttactgaattgtagttccttgaatagtttctcccaggaagttcttcaaaggtgctcatcacatctgcagattcacgaatacgagttgttgatggttttgaactagttcataaattcaaaggtattaagttttgtgccttggaacttattcatatcagattgtttttgttcaaggtttagtatcctttttctcagatatacaaatactcctgaatgttacttacctgcttcttttcggttgtactaagtacagtcccagtcaaacttcttattcatccataaaccacctttgttacttgttacttttaccactcctttttttgttgcagtgttgcactggaatccaggtgtatagagttatgctaggaagtcataataggtctgcagtaaccaaatcatgctgtgatcatcagatcacaaatactgcaattccctgctcattgattaaaattttgaacgtgactagttaaaactagtttctcctgtcgttttctttcaacaaagtgccaaaactgtcagaatccactttgttgaggcaatagttgtaatgttcacttaacatgttataaaatagttatatccatctttcgatgagtccaatttctgtatacctttccccgtgaccttctatcattggttgttttgagtttaacgtcttctgaattctgataccatgcaccgtttcaggttttcgaaataccaacagccaaatatcagcttgcctgtcttcgaacgggaggtatgtgatctctgcgagtgaggattcccatgtgtacttctggagaaacgatgacaattctgcacagggcagaagcaaggccgttgtgtctgtcacaaattcgtatgaacacttccactgccaggatgtgactgtagctgttgctttgccatctgctggatcagcaatgacgtccagaacaaattccaggaagaccgaggagcaggatagcataccgcagcagcacactcaacctgacaaacagcaagattcctctgatttccaatgcctaagcggcaacggcctaagcactagttcaaaccacagtggtgacagaacatctgcaacttggcctgaagagttgatgacaccaagtaagcagagccctccgtccagtaccagccttcccaacggtgctggccaagcaccaagccggtcggcctggggtttagtgatcgtcacggcaggccgtggaggccagatcagagcatttcagaattttgggtttcctgttcgagtatagcagctattatcctggtgaagatgctgcctgtactctgtagtcgctgcccctgcggcagagataattttttgtgtatagctaggaggatacgtgggcaatttgcacagcggtctgggattggatctggttacttgttaccaaggtgcacaaagctccgttcttcgactaacttactacggcctgggcacacaaggtatgctgaattcatttgcccgaaactgtacatgggaatggcccataaagagcgacgggcgccgggcagtcggagtgagatctctctctttgccatccatcttttctctgttttcccccgctcaagtccgttttagcttttttatccttttctttctcttgctttctttattattatatattcttgtaagaagaaatctcagtggtacacaaatagaaaagcgaaaaaaggagttgcatagagtggtgaaattctttacactagcttcgcaggcttgcagtatttagtgttacgcgggtaaagtaattagaaagagatgaaaattttgggttctggagcttgtagtccttgctcatggacaaggctggaatagttgagttacatttctggtgtatatgttctctcgttcaatgttcaatcgtctactgctcagcattttcttttgctgtttctggcagtgtcttttatcttttgtaatcatgtacgccatatatgctttgcctgtgcgccatgtattgctctcaacttctcgtgtaggtgtgtagaccgtagctgcaagaaaacgccatccagtcatatacgccccctgcgtctcaaggagtcgcgtaccacggaccacggtacgtcggtaccagaagtcacggaactaaggtggtgtttggatgcagatacttaactttagtctctatatttaaacactactttagagtattaaatatagactacttataaaactaattacataaataaaagctaatttgcgagacaaattttttaagcctaattaatccataattagagaatgtttactgtagcatcacatagtctaatcatggattaattaggcttaatagattcgtctcgtgaattagtctaagattatggatgagttttattaatagtctatgtttaatatttataattagtgttcaaacatccgatgtgataggaacttaaaagttttaatcccatctaaacagggtctaaaaagaagccgtccctcattttcgggaagtattcacgtaataatgaatcaaaagcagcaggcatgagatgtcgaaactaatcatttctgtgaaaaatctggtagcgaagagatggttttcagagcggttgttaaattagagaacaattttgaaggatcaagatggtctgcaagaagcaaaagcactccaacacatggcagtgaaacatacatgcgacgactgggtgctccttgttttaagagtaaattgtattatcagcacataaacttagtaaattatattaatttagtatataaacttgatacttgggtgtaatataacgtatgaacttgtaaaatgttgtaaaatgttttgtttgatacacgaactttgatacatgtgaaccaagattaaaaggttatgacatggctagtttgatcagcataatgcaatcttgcaagacaagtgtaaaggaaatctccttggttgttatttaaagtccacatcgtagaagcctcgagtatttgctgcagtttcttacatgcaaaataaaggaaaagactatatgtactaacttttttttactaaatttttactaacactgatgtgttatgctacgagtgtatctagatttttcataactcccatctacctaaatcaaacggttgagataattgttagtaataacaatttagtaagaaaaaaattgtatgtgagcatcccatttttattcaaaccagcctctttgcatgcgaattgaatggccaacaaattagcatggaaaccaaacaaccatgcgtccaccgaggataatgtgctgatcaattttgactatttcgttttacttaggcgtcgatcaaacgtgaacagtggaagtatgtgacaaggacgccggtgaacagtgggagtatgtgacaaggacgccgcatagccatgtctttttttagaaggcataaaaaatcaatgaataatgcaagggtagaaagtaagaagaataatgtacttcctccttcccaaatatagaaaacctagtcatatattagacacaacataatactatgaatctagatatgggatgtgaagaacattccatccaaattcacattactatattgtgcaccaagttactgttttgggacggagggagtagaaaccaagtttacaaatataacatgtctcatgcaaatgtcataattagtgtccaacttggtaaaattaatcttgccatgccatttgccacggctcgatacactggataagttcgtgtatcaaaatgaacattttacaggttcatgtacaaaatcgtattatctaataaatttatttatcaccaatacaatttaccttcattttaaatatggcttacaccagcatttcaaaagaggctcatcccgctttaacatttttctcatcagtccctcctaccttagactgattgtaagtaacgcgagaaagatatacttatagaaaatatatatgatgctttatatagtattaaaagtaaaaaagaaaaatcaaaacatacacccttccacaatgctaatctccgtaggagacaagtttatatttggactttggaccctaaaaatgagggccactctcacggccactctcggccagcaccaggcgcaagcggtggagaaggggagacagcaacggctgaaagtacaagcgacaacaaccagtgaagcacagccgaagttatggctgactggtgttactccccacccgcctcgtctagcttctaaataaagcgtcttgcttctgctcttcctccccactcccccacccctcccccaccacaccagaccagagctgtatcaaacgcccacccctagggtttttacccctacggcctccctcccccactctcccctcctacccgagctccccgccgccgtcattgccgcatcccggggcgccgagcccccctccggcccggaatcggcgaggaatttgaacgccatgtgaagcaaaccaggcaccgtaaagagcacacgcgcatccccgcgcggacgcttgacaggaacagatcccaccggttttacggatctccgggagtcaggaccggtggcgcggaatagattttttttttggacctaaggatttggaagcctctggaaccccaaccggattcgatccgaggacatggtgatgatgatgatcaaatccgtggtttattacgggagcacctccattgggcatgtggaggtgtggcccaagggcgggacggacctggcggtggcggcgtgggcgcgggagatccgggtggaccacctgtcgccgcccagcgagcggtgcccgccgctcgccgtgctgcacgccgttgccgcgggcggtcgctgcctcgtgatggagtccaggcccacggccaccgcggatgagcccccgccgccgctcgtcgccatgcacgccgcttgcctcagggacggaaaggtacatgaattactcccaacaagaaacccacagacaaataataaaagaagggaatgaacgaacgaatggaacatttgattttacatggtcaagtttacccgaacagcaaatagttttttagcacatgaaagaactagtctatttttttccctgaaacatttattggtaatttatctctggacaagtaatttgacaacgatggtgacatgactaatgatactgactggaacctattccagaattcacttttcttcatgattattgtgtgtactggacttgattttattctatctcaattttcaataattgaactaatcgaaatacagaatctggcctgatgctgttgaatgacagaggtttcaggaacagcatttcatgtttcagaaatggagaagttttgatttttgagtgtgacacttttaatggttgttgaaacatacccaatgcagcgaagaatttgcttttcttcaatagttcttgactttggacttgacacacttgctatcaggagttcattgctgcaattgatcatgaaccgtgaactgctgaactctgcgtattgaaagacattgtttgagggatgagtgaaggttacttgaataatttgaacgcattaatctaactcatctgctagcaacttaatgtgtttcttgcttccacttgaattatttgataattacatctatattaagaaacacactattttcggcctaatatttcctttacatagttggattaaatagcatttaactgtggtcaggacagtgctataaatattcctggtattgatttcgctattttaagatttggatggatatagagtttttaatccacacatgccttttttttaacaagtatccccttttttgcatttctgttgtaccttttattttctgtactactttgtggatgttactctgatatgcaggtatgtgaacaaatgtactagatgccatgccttttacatgattgcattttgtattagtgacgaacatttctcctttttcttaatccttttcatttcctttcattctctcctgcttgcagactgctgtttttcctctaggagcagaagagatccatttagtggcaatgacttccaagagaaacttgccgaatcttgcttgtttttggggctataaggtgccatcgggcttgtataattcttgcttgagcatgttgaatcttcgttgccttggtattgtgtttgaccttgatgaaacattgcttgtcgccaataccacacggtcctttgaagacagaattgatgcacttcagagaaagttgagtaacgagattgatcctcaacatattagtggtatgtcggcagagatcaagaggtaccaagaagacaagtctatcctaaagcagtatatagaaaatgatcaggttattgatggtggcaaggtttataaagtacagactgaggttatcccacctttacctgataatcatcagcctatgacacgtccaatcataagattacaagagaaaaatattatcctgacgcgtataaatccattggtatgtatttcttcaatcaacctttttctagagtcatgtgatgccagatgtctgttgtctctacatctgttacattgattaacataaaaatgaaataccacaattcactttattttgcatcatgtgctttgattgagtttaccatcataactcaattaaatctattttgtactctaattttactaattttatttggcactgctttttaaaagaaaaatatagcaaccttttggttttggtgctgtcagttcttaatgtattacaaatcatgtaattaatgtgactcaaattgaattggcaaataagccttgcttagtggttggtactgttgagggcaagttgcattagctggtgtggcaactgaaaatttgatctcctattgcgatattttgagcgctaagcacttcccgtctattcagctttgatacaaccatgttccatgtttccatgctgttatactgcctagttgattttccctttttcttaattagataagagataccagtgttctggtacggttgaggcctgcatgggaggatcttcggagctacttaattgcaagaggtcgcaaacgttttgaggtatatgtgtgcacaatggctgagagggactatgctttggaaatgtggaggttgctcgatccagattcaagattgataaactctgttcaacttactgacagacttgtctgtgttaaatctggtaggtgttagcattactattactttcaaacaacacaactaccaaaggaatatagtgtcatttggtatattttgtacaccgcaatcaatgttttgtgttgtctaatttccttcatacaaatttccatgtgcatgaacataatgtcttggaattttccatcttttgacgttaatgctacaccactcttataggctctcgaaagtctctgctgaatgtattccatgatgggtcttgccacccagaaatggccctagtgattgatgatcgcttgaaagtttgggatgagaaagaccagtgtagggttcacgttgttcctgccttttctccatattactctccccaggcagaggtaaggtttatctgtactttacaccaacacaaatatatattttttagtattggttattgagggtaccttgtcttgaactatcaggcaaacttctctgttccagttctctgctttgctagaaatgttgcatgcaatgtcaggggtggttttttcaagtaaggatatccatctttgcctatgtgatctaagtaaattcattgccatgactcattgtagtcccagctaaatttaatatactccgttctgccacacaattttttttcttgttattgtgccatagaccaagtgtgaattattttgagatacagaaatttacgatttaattgacagagaatttgatgaggtccttctgccacggataagcgagattcactacgaggacgaaataaatgattttccgtccgctcctgatgttggcaattatttgattaccgaggtaaactttgtaaaatgcatgttcgattccctagtaactgccaacttacactcagtctcttcaataggacgagaatgctgccattttgaatgtaaacaaagatcctcttgcttttgatggtatggcagatgcagaagttgagaggagattgaaggtgttcacttctacaaaccattagttcactaccctgttcttcttggttaatattgatgtgaatagaaactgaataccaagatgtacttttcctaaattagatgctgcatattaataatatactctagttattttttaggttttgcacaatgcattttggaacaaaaaaaatacactgtttaatatttcatgtgtatttttttgttcattaggaattatgctaggcacaaaatctcatggtcaacagtattataaaattttgtttgaatatgcagttgcaatagactattggggcattagatcaatctaatgtctcattcaatactttaatatattatactgttcagcatagtgtttctctatttacatgatcttaatctgcataaatcatttatttatttgaagtgaacaagagggtgtattaagttatcctaatccttttcgttggaccagccaattgcgaatgctatagctatgcccctatgactatgttgttactccaatgggttgactggtcgtcttgtgagaaaaaaaatgctgagatcaattacaagcctatattatcatgtttcttagcaatgactactgtttttaccttttacgtatgtatatgcactattttcaggaagtgtcttgcagtgttcaagctgtgaatccaataccaactaatgctgatgtgatgcctgtggcccctaaccagcaacttattacatcatctgttccagaagcaccatcattgggcatgattcctttgaataatgatcaaggtcctcagcctccttcaagctggccggttgctcaatctgctcctgtggatccatcgcaaagttctccagctagagaagagggtgaggttcctgaatctgagttggatccggacacaaggagaaggcttctcatattacagcatggtcaagacacgagagatcctgcaccaccctgtcctgcaggatcacccgtacagacctcagtattgccagtgcaatctcatgggaattggtcacatgtagaggatgagatgaatccaagaagcctaaataggacctcaacagggttccatttagaatctgatgatataaattatgataaaaagcaaccacataatccaccgtattttcctgatgaggataatcttataacttctgatagatataaccgtcggatccatagatacccctcacaggtcagtggtcatccaccagatcgattattcaattaatatatgtttgttaatgaagtatatctggacaatctgttgacaaatgcctgatttattcagctgcctcacagtgaggatcatcatatgctgaatcgttcatctatagcctacagatcttttcctggtatgttttgttttacctctgatggttctaaagttcttctgaagattactagctgcatagggtagtgcatgatctatgtcttcccgttgagctcgctgcattaagcttaagatgttagcataagccaatctactagtctcttgtcttgcatatttctagagttgagtacttgtgtacctgtctaaatgcaacctttctgtcttagatccttaataaaattttggtttgtcatcataactaaagttatatttagtttgataatatgtttgctagtttagcatcacattttggtttgagttgattcagaagcaacaacacattatggcttacacataagtgctggattaatcttttttgagttagtttggctggcttgttatatgccatcaatcatgatttcatgggtttacttgaatccatctaactgccaagtctactgaaatttttggcccagagatgatttgccgtaattgtactttagctgcagaaatgataagttgaatttattgtagctcttgaggtcccattcaaaacacatctgaagctcatgactcattttaatattttaatatctattgtgttcatcatgtcttgtttttcccactcttcacttggtatagtgtaacgttattatgtaaaatgcttcattattcatgacaactaattgaatggttctgtgtgtttcctcgatccagttaatttctgaaattctagctcattgaaatgtcttttattacatataataatattagattggtcttattgccattaacgaagcttgtgggctgcatacatggtagttttcaagcttatacggggacatgttatcaatgggttgagaattaaaactggttaaatgactgcttcctttatttcaatcaattaaatgtgtgttgcctcttgctcgctcaatgttgcccgcccccagtatcatgaatgacccctcttaaacttcaactttaggctttcactttagagcatcttaaactttccatggataaaaaaagtatcattttaaactgtctgctgtctgctatgtgaaggagaggacatgggaaaccgatttggtccttcgaatcatagaagcagtaaaatagaaccaggacaccagtttgtacaaaacgcagagacctcagctggtgtgttggaggaaattgcagtggaatgtgggtttaaggtagtttggatgtgaaataacagtattattatcttcttcctgtattactttgctgttgatgtatttattcattcatttttaggtggagtaccaatcaactttgtgtagtactgcagagttgcaattctccattgaggtaaagtaaaaacttctgcgaattccactctcctttattaccacataaatctctattattataaaaattgaagatgtttttaccggtatttttggtacgccatccgtatttgagtcggtttttaagttcgttcgcttttggaaatacagattcgtgtttgagtcggatcttaagttcgtttgcttttgaaaatataaaaggagtcgtataagaaatctttttaaaaatactcgcatgctaacttgagatgaaagtcagactcctaattgtagcttataatcttctaaaaaaatatccaagcgaattcccacagtgaatttcatcatggctaaaccatataacaataataagattaaaatagcattcacccgttgcaacgcatgggcattttttctagttttatttaaatgatcatgttaatgggcagttatatttgttatcatgagaaattgtgaaaacttgtggacttcaggaaataaccttggcaccaggaatttctctatctctacaaagatcatgtggcttaaggcctaacttacattttcccaaattatttgaacttgttttttcccaaattatttgaacttgttttttcccaaattatttgaacttgttgcttcacgcaaattgttctaatcttcttgcagtcttataagattgcttcatgtttagtcatatctttctttgtgcatgtttcaggttaggattttaggagaaaaggtaggtgaaggaattggaaaaacaagaaaagcagcaaaacgccaagctgttaatatgtccttaagaaatctggcaggtaagttcgttgagaacttcttggtttcttgattctgcgtggcaaatgccaaatgtataactaaagtatggggccatggtgtttaatatttttgttgggtcaacagagaagtccaggttgaattttgttaagacagagaggtacacatagcacatctgacaataatgctgccaacaaattacatgatcacccaatggcgaacacagtactaaaatttagcgggtgctagttaattaaatctaccacacaagattatcatcaaagtaaatggtatttatatgttttgccatgatgccattgaaattaaaaccataacttttattagttgacttatattatcattagcacgaggagtactacttgtagacttaattggaaacaaactatgtaatattgatgtcgccaattgttgcaaatctacgaatagataaatgtaaatgcaataatagtcaatacatgaattagaaattataatgcagttgtgtataattagttgcacaaggaatcttggattaaggaattaaggcaaatgtttaacgcgtgagttgagtctgcttaagcacgaattgcttcctgcttgccaaagtcatactgctacactgtgccacgctgctccttgcccccctggcacgtctcctgctatggacagacttacagatggatttcatgggattggttcattgttggattaataggcttggttgctggaaataatggattatctaccctagcccccgttcaatggaggtgctaggggggtggggttgcaatgggtcgtgcggctgccgggtgtgtgcgaatcccctttgctgccttctgcatccgctactgagatcatctcacgagaacactctcgaggatacaagtgaaaattgcttgatcatggggttattttgttttaagcaacttctaaggtatcatggaggtctcgagatattggaaaacattgttgttctgacttggcatctctgaactattctctgctgaagttgttgaattattttctgcctttgtattatttgtatatatatctgtccttaaccaatttccatttggcctcatgattgatcttttcaaattgttatatagaaaatatagaacactataccaagagaaatcctcatgaaagctttatataagttttggtatctttcccatgtaaaatattttgagcctgattggccaatgatgttcacttgcagaaaaatttctaacgtctgatccggataagatgatgattctgaaggagaatggttttagtagtaattcaaactcattcagatattcgggaggtagtagagatgacacatcaccagttgcaagcacttcaaacgagtctagatacatgggcgagagagttgatactttaagaaaacctgctggttctgttgctgctctcaaagagcttgtaagtggctgccttaattatcagcttttagacgagtgcaatttatttactgaactatgttgtgatgcattgcagtgtacggttgagggttacaacttagttttccaagagcagccatcacgtcctcgtggttcatcaggtaaagaagcttatgctcaggttagtacttcagtgaatgaatgtccatcgaacttctatatggtacatgattaacctctaaagtaggttgtttagaaaactaaaattgcaccaactttacaacttacaggccatcaaaagatctctttgatcaatctgtatttgatgtgatatgatgccctttaacactaatacaatggaagtagtataagatgttccttttgttgtcttgtcaagagctgttatccttttagaactttttgagtttgcatgtttcgtttacctgcatttggtttttcaggtcgaaataggtggtcaaatcctgggaaaaggagttggagcaacatgggaacaagctaagctgcaggttgtaaatagataagatagatgaaatgatttactctgatcacttcaatttgttaaagtttcaaaaccaacaaataaaccctgaggtctgagtttctgccttgctatgagcagagggagagggattgtttcgtttaactaagttcgatttgtggagtaaagaatctttatactagctgtttggactcatagtaactatttaaatgttttcttttctctttgggacttataaggagggtcatttttcaatgtgtacagcaagatgctgcctttctcttgtatttgttttaggaaaaaacatacaacatgtacaacattgacaacatcaaagataatagttatttaaaacttctagtaatgataaagatactactacgttggtagatgcagcaattgcctctagaaaatattaaaagtgcacacatgttaaatgtttacagactcaacttggttcttgtgtagatgttgtctcttccactagacaactttgtatgcgcccatttgtgcattattcctgcactgcttttttacttaatattatgttcttttataggctgctgatgaggctctaggaaatttgaaatccatgcttggtatctttgcacataaatcatctggatttcaaaggtgattttaatctccacaatattagtcctctatttaatctaaattggtttgtgcacatgcaatgccaatgtttataatatttattcttttccacaggtcatcggtatcaaattttaatcgcttcaaaccagatttccagcggagtctacaaaccataccttctggttgggactctaggaacaatggtcgtgttctttgatgttcgtcttctggacatctgaacttgatgggatcaatagcatggaacctgttggcccagaagaacttcaaggactgcaagtatggacgagatggtcatggaaggagaaatcgctgtgcacatgatgcctgcatgtttcgttctgtcgttctcgatttggtgatagaattgtgttgctgtcatttccaatctagtaactcggtaactcccaacaggtgctctgtttgaagatgttgtaacctggcctccgagtgagctcacgccacacggtgctcggctgtgatttgccctgactctgttacccgtgataccccagtggagtgtggatattagaagcatgacagttggtaaaatggcttccttgcgtgcagtagattagccaattgtattgctcgaattaatttgtttcttcagatcttagatttagggtggtagcttgattggacagttttgctacgtagtggtagcttcaattccatgggggtaattcccatggctttgattccagttttacactgcttcctgctgctcttcatggccatgtttggttcatacagcaaccgggttcggctggtgttggtccaaggcttaaggaggttggctatgtatacagattggtgccatactcctgcattgggtgatgcatgatgctgaattgctgattgatgctacagagtatatacctgcattggttgaagatctttatgagaagctcgaatcttggtggctacgtgcacaatgttgtccctctttctgtttatctgtatgcttgagataagcagactttggccttctatttccgtgaggagatagaggccggagggtgtatttcttatcacctcaatcaaaaaagataattagaaaaagaaactgtgatggctcataccaagaatagtgaacttgctttgaatctttaaggtacctcgactacagtggctacaggcatcatgatttttcctctatgcagaaagcattttcgactacgaatgttaagatcggaggaaatacaaggatcatcaaacaccaacacttccgagggtgacaaactgacaagactcgcgaggagagaggcctccattcttgtaggctgtagcagacaaccttcgcctgcgttggatagcctacaaatgaaaacgatgacagaaattcatgacccacagaacatcgttttcttaaaaatggtattattctttttccgtttctgtttctagctatgtataaagtctacttttaatatttctttcaacttcgtattgcaatataaatagttaaattggtataaatgtgaaaactcccgagcgatgaatcatctttatagaagtgatattttcttttaacatttctgattgttttcatcccaggctataacctgtggccatgcttgtagcagatcacctcgcgcattgctaagtgcaacgagtctccttagcccccatcgtgttatgttgcacatgtccaagccttttggtccttccttgtgttcgccagtcagccaagaatcctatcggagttggtaaggacaatgaactggaaatgattctagcagtgaggcggtgatggagggaaggggccgacgctagagcaaagtagtcaagcttgaagaagtggttgatatacctcacgattctacttcgccaacacattccatgtttattcttaatggtgggctgggggcatcatcggagttcaatagaggtgtccggcgagtgattcttgacgagcctaatagttgagtcagtaatgcatggcgttttgatggttgttctataaaagggtggcaacggctcctccctaatcgattggggctattaaagtttgatcggtcagtttgtgaggaaaaaggataggatcacgaattattgttgatggatcgtttggcctatggttgatgaacctaaaaaggaaaaataatttatgagtaaaacttttatatctatatggggttgttcaaattgtagccaaaataaatctaattgccaaaattttggtaagttggtattattaacaaaattttggcatgatttcttatgtactgatcaaagtttggaaaaaaaaactaaatgtatgcacatctttggtaacattacccaaagaaaaggtatggtttgaaatggcataaatctgaacaactgctatgttatccctggtttaaagccaatgctaataataaactatgataaatgtaaaatttggcaaaggcttgtgtaagttaaagtaaactatacttaagtgacttaagacgatgaaaaacattacttccttcgttccaaaatataagaagttttagttggatgggacatatactaatactataaatatagacagattgcctattcagacttgtagtactatgatgtatccgatcctaccaaaatattttaagacaaagagagtatgcacttatatttagaatgccatatatctatctattatattaataaagtaataaaaaaggagtctccacgtttgctctcacagcctagaaattctcacattaatccaaaaaaaataagaaaaaataaaaacagaactcgattaggattagttaaaaactgaaaaaaggaaaaaaaaaaggcatattaagacactcgggcaatatattgaatgagattaggatcagtcgaacggacaggatatattaatcggatgaaaatatgacaagaaaaaaaagcaaacggacaaggatgcatgaaactgtcaaacgggcaaggatatgttaattggatgaaaatatgaatgacaagaagaagaaacaaacggacagatgcatgaaactgtcaaacatgaataagaaatggactctctggtcatagtgtattactgtggaaacgaacaagagtttagactccaagtcaaaataatacaatttaaaatacatgaaattcaaaataaaaactaaaaattagaagaggagtcaaggtagaaatacaatttagattattctgattttttattgaaaaaaaataaaaaaatactgttattgagacaagagttatatggaatttacttaaaaagagtttatatagaaatacaatttaggagagaaaaatatgaatctcgaagtgaaattaaaaatagttaatattgagagaagagcccatgtaaaaaaaaatttagaaacatctaagatttgaattaaatataaatattatggagaaagagttcaagtaggagaacaatttagaaatgttttaaattcagattacaaacaaatagtatgaatagaaaaagttcaagtagaaataaaattttgaatatcttaaattcagttaaaaacaaatattattgagaaaagagttcgagtacaattaggaaaaaatatggtctatttaaaaataaattttaaatatctataattagggaaaaataaagaaaattaaaaaagtgattccatgtaagaaatatgattaacaaaattcaaaatttaggattaacaattacaaaaaattaatatttttgttaggtgtccatgagttcatattgaaaataataaaactaacataaagaatccacataggaaaatcggattgaaggtaaatattatagcagaaagagttttggggaggagtgcagtttagaaatattttaaaattggattaaaaataaataatattgagggaaagaatctaggtagaaataaaatttacagatatcttaaattcagttagaaaataaatattagtgaggaaacattttatgtagaagttgatttagaactattttaaatgtgaattaaaataaataatattgatagaagagtccagttttacaattgaaggctagctcttctattagctttatattaatactatcaagtaaaaattctcacgtaaattagctaaaaaactagcttatgagattggatcttaaccctataccaatgtgacaagagttcgtaaagtccaaactgtgagcaacattaacaaaataaaatataaaaatacccagtaacatagtaatattgataacgatagtacatttttaatttaagtttataaactattatgaatatacaatacaatatgccatctttagtaggtggaagaatgtcattcgaggtagtggaaagatgcaactttatgatttcaatacatatgtaggggaataagacaaacgaatgtaccataggatttatgcatctttgatttattgtattgttatgagaatactaaaaattccatcgtgtttgttttatggacatgggaattactatattaagcatttgtcattttaaagactttttcacaatagtttggtcaagttaggtcaaatctcaaaatcatttgtcattttaattttttttcacaatagaatgtgaagtatatactccctccgtttttttaatagatgacgccgttgactttttctcacatgtttgaccattcgtcttattcaaaaaatttatgtaaatgtataagatataaatcacacttaaaatactatgagtgataaatcaactcataacaaaataaattataattatgtaaattttttgaataagacgaatggtcaaacatgtaagaaaaagtcaacggtatcatctattgaaaaacgtaggtagtatgttattgtacgtggatattttatagagatgctagccgcgcaatctacgcgggccattttactagttttgattatatgacatctgcagatttcgcctgtaaactgcgagacgaatttattaagcctaattaatccgccattagcaaatgtttattgtaataccacattgtcaaattatgatgtaattaggctcaaaagattcgtctcgcaatttacatacaaactgtgcaattggttttttcttcgttcatatttaatgcttcatacatatgtccaaacatttgatgtgacgaaatttttgaaagtttcaaggaaactaaacacagccatatctgtcaaagagcttttacgacaaaataagaagcaatcaaccctttttatctggaccgtggaacgtccatcggacggtcagtactcagtagagacaaaagtggccaaccgggggattaaacaatgtccgagggtttttaggagaaagtaccaacgctctggcccacacgtcactggtcggttgcgttcaccaaaggccattcatcagtgatctactgagccctcctccctccgccgctcgccgccgttctcgccgggttccggcgccttaccaccattcccgtcctctctcctcccggagaaatctgagaagaaatccagcgattccaggggtatccggcatggctgatcgcttcttccccaacaatatgccgggctatgccgacgaaggcgcgccgccgccaccggcggcagcggcggcggcggcgatcccctccacctactcctcctctctccaccacctcctctccctcccctaccccgacctcgccgatcgcttcctccacgcggcgcttcacctgaagcagaaggttaactcgtccaccaccgtatcgctagttcgtcacctcatgcgctgattgagtgattgatattctggtgtgctcctcgtcgatcaggtggtgcacgagacgtgggataagaggcggcgcgccgccgcggcagcgggggaggcagtgggcgacttcaccctctacaccggcgcgctcggcacggcgctcctgctcttcagggcctacctggtcaccggcgaccgcgcggacctcgccacgtgcgcggagatcgtggccgcctgcgacgccgcatccatgggggccgagtaatctgcgcgttcctcagccgcttcgtcgggcgcagcagcgttttgatttggtttggtttggtaaggtggtgactcggtggggtttgggggatttgtgcaggatcgccacgttcatctgtgggcgagctggagtctgcgccctcggtgcggtggtggccaaacacgccggagatgaagctggcgttgctcattacctgagcgcgtttaaggaggtgattaagcgtaaaatgctgctgctgatgatgcctataacgtgattgtgatgattagccttctgaactcgataaatttgtagtttgacttggatgatgctataggtgcaggttcatctcagttaaaactggaatggcaatagaaatgagcattggctattttggcttattataaactagctgggtagcccgcgcaattacgcggctagcagaaaaaaataatatttttttaagtataatcttacttaaaatttattaaagagctatctcaatgttaagactttaaaagaccaaaccttatcatcctcgtgtttctaattacatagtttttaaaatcacaccagttgctacctcttatgtcatctccttctttatttgcttgctcaatctatcactatttctatttattattcttggagcctttaaaaattggattttatagtttttagagtttattgtcacgttgggtttcgtttttataatttctagatgtcccatcaaacgttgccattatactcccgtccactatctcttctctttattgtcattgagattttaaaaatcgaacataattatagtttgggttcatttttactttctagaagtcccgccaaaccgtcagcggttttgccattatgctcctctacggctcgcccgctgcctcccttctttattgtcattaagattttaaaatcgaacatgattatcattgttttttttttactttttagaagttccgaacctttaaaaattggacttgtagttttattttttataatttttagaagtcccatcaaacgatgccactatgcccctctgcagctctcgtccgccgcctactctttattttcattgtgattctaaaaatcgaacataactattattgcaatttattttttattttctagaagttccgtcaaccgtcggaggctctgcaactatactcttatacaccccgcccactgcttctcctttttattgtcattaagattttaaaaatcgaaaataattatcaatgtggtttttttttctttttactttctagaagtctaggcaaccgctttacttgtttgcttcacatcctacctgacatccctccttttaatcgtcattaggattctatttggtgtttcattaacaatttttatataccatatcaaccaccaccaactctacttatttataggcctgttacttaatttatctcgttgtgtgttttagatggtcttttctttcaatagtctttatttttatcacaaattttagttatttataaattttattcctaattgaaatcttttttttctaatttcagaatttattttttctaaaaaaattagttaataccatattgtgttcttttaatgtttttatttcttattttcaactttagttgtttcaaaattgtatttctaattgaactctcttttaatttttctaattttggatattattatatttttattcgaaattttaattaatctcgtattgggtccttatatggattcttctttcaatattgcttatttttaattccgaatttcagctaattttaaattgtattcctacttgaactcttctttattttctttttccttaatttcggatttatttttctttttattctgaattttaattaatctcatattgggttcttatatggactgtttttttaatattccttatttttaattccgaatttcagctatttttaaattgtattcctacttggactcatgtttccttttctaattttggcttttaatttatttttatttcgaattttgattaatctcgtattgggttcttatatggaaacttctttcaatattgctaatttttaattccgaatttcagctatttttaaattgtatttctacttggactcttctttcctttttctaattttggatttgattttatttttattttgaattttgataaatctcgtattgggttcttatatgaaaacttctttcaatattgcttatttttaattccgaatttcagctatttttagattgtatttctacttggactctccttttcttttttttttctttttctccgattaatgtgagaatttctagccctcacagcgaacgtggtgcctcctttcaaagcttttttaataatataatagatagattaattatcaggacttggcttgagctcctaagaaatgaaattgctgtttctaaataagaagccacatatcaaacaacactgaaccatagaaattttactgctgttttattacagtatgcaataacaattttacgtttgatcggttgcactgttttatagaaaaaaaatgttagtcccaagtatgtctctttactcacttgaaagttcatccatctaaacaaagcaatatgttatctatggtagtatggcccatgttcatgtgaca

SEQ ID NO: 8369 - DNA, 973 bp, Oryza sativa
ttatgccgccgttgttgggcgtatacgtcttcaccgacggctttgccttcgccgccgccgactggtgtttccgcctgcacggctggcttttatgccgccgttgttgggcgtatacatcttcactgaccggcctgccttgtccgccgccgactggtgcttccgcctgcacggctggcctttatgccgccgttgttgggcgtctacgtcttcaccgaccggccgcctcgaccgccgccgactggtgtttccgcctgcacgtctggcctattatgccgccgttgttgggcgtctacatcttcaccgaccggcttgccttcgccgccgccgactggtgtttccgcctgcacggctggcctttatgccgccgttgttgggcgtctacgtcttcaccgaccggccgcctcgaccgccgccgactggtgtttccgcctgcacggctggcctattatgtcgccgttgttgggcgtctacgtcttcaccgaccggcttgccttcgccgccgccgactggtgtttccgcctgcacggctggcctttatgccgccgttgttgggcgtctacgtcttcaccgaccggcttgccttcgccgccgccgactggtgtttccgcctgcacggctggcctttatgccgccgttgttgggcgtctacgtcttcactgaccggccgccttgtccgccgccgactggtgcttccgcctgcacggctgacttattatgccgccgttgttgggcgtctacgtcttcaccgaccggccgcctcgaccgccgccgactggtgtttccgcctgcacggctggcctttatgccgccgttgttgggcgtctacgtcttcaccgaccggcttgccttcgccgccgccgactggtgtttccgcctgcacggctggcctttatgccgccgttgttgggcgtctacgtcttcaccgaccggccgccttctccgtcgccgactggtgtttccgcctgcacggctg

SEQ ID NO: 8370 - DNA, 26529 bp, Oryza sativa
  unsure (1)..(26529): unsure at all n locations
ccctgccaaccaatcacagctcacatgcacccatgggctagcaagctcctcatgcacacatgcatgtcttgcgcccgtgcatgacattcggccatgtgcacgcatgcacaaccgaagcaccactgtccatgcttgcatatgcacatgccagtgcatgtatacaagctcctcttccattctccattctgttcgcgaacccggcacttgcacttgaccttgcgaagtccgttgcgaagacctcctcacacggtgttcgtccaccgtgtgcaaccttatgtccaatcttgtcacccggcatccttgatcgctttggacctcaactcctccctgagtctagtcccgatccgccgttgaccaagatcgaccccgatcacctgcacacacatgaaccaaacaaccgttgtcttggcacagatgtcgcaatctgaccaatgttagtccacgcacacacttcttgcacttccggtacttgtcaatttcccatcacaaaagaactataaccacacatggtttcacaaaactaaggtcgtgttgagtctgaactatcgcaaaagctcgatttacctccctctagatacttaaataccggaagttcatgactcttcaacttttcaaaccaaacaagtcaccccaataacccaatccaaagtggttttagttctatgtggcatatacattgtctgcctcggagcacactttgtgacaacggcatgacatggtagctgtcaagaagagcgaaggaggtccctacatcttctccatggtgccaacggagaggagtgcaggcggcaacatagtcgacgctaagaggggacattgaagtacgtggtctccttctagatctgaccgatgacggtcctcattgggtgtgcagctaacctccctccatcgtcactgagccaagcaccacattcccctcgaggacaatgatgagctcgaacattgtcttgcctcacctcctatctccctctgctctcccaccctccttgttgccaccaaaacccactcccctccttgctcggtcttgtgggccctgggccctgcttccctcattcctaacgatggtggcgatggttcctcgatgcgcggtcaagagaactggggcaacaacggttctccttgttggtgttgaggtagtggtcgtgtcctcttgcttggatcaagatttggttagagggaggggggaggaagaagaagatagtgataagactgacatgtggggtcttatatactttttaaaatatatcgatggccttttcattggttggacagccgcatagcaaaactatcgccatatgtaggattaaaaccactttagattgggctaaggggaactttgtccagttttgataagttgaagggtgtaaaatgtctggtattggtgttgagggtgtaaatcaaacttttgcgacacttgaaggggcatgtaggacttaccccttatatcttattgatgttattttataattcttatgctatgaaatgtatctaaactttatgtgaaacttgatgttactattgataaataacctatatttattttttttataacttagcatctgtaattgcactcgctatccacaattcgttacctatacactactccctccgtcccataatataagagatttaggagggatgtagcgcatctagtactacgaatctagacagatagtgcatcctagtactacgaatctgggcaggctcatgtctagattcttagtactaggatgcatcacatcccttcaaaatctactccttatattatggaacggagggattagtccaatgtcagcccactatttgctatttaattattactaggagtactttgtttacaaggttaatatatatatgcaatgtggattgattgatcttaagcaattttagagatataagatgaaaactaatcttcctatcctatcataataactttggggctcgcaagaaaaagttgttgccttagcttattagcagcacccgtatcgagataggtcactaatgcgtgtttaattaagaattccgtagttttaggatgtgtcgtcccatccatctaagatcctttatattttgtgacggatggactacctatcataaacataaaatctagatttgttttatttttaaagaaacttttatatagtgattttttttaaaaaaaaacatttaacaatttagaaagtcctcacgataaaatagaaagtagccaagcgaatcccagatcagcctataaccatatatactttaacaaataaaataagtattccctatacatatatgtcatttagtgattattctaagctagttttgggctagagttcaccaaagttacaccacacttacacaccggctgagaataatcacaaaatgatctggtgccaaaggttgatgttcttttttccttcttgcaaggaaaataaactctataaccctccatatatatatggctgaactagtaccaatcatctcgaccaacagcagcagcattgcgctgtcgtcctcctacatctacggtggatcaatgccccagtacctaccactactgtcttctttattttctttgagaagaacttcacttcacctctagtggatggatggtgcaattaaatgatgctaatcaaacacccgtagctatagctagtaaatgcaaaaaacagttatccaccatgaaaaaaggctctcatcttctgtctcctgaagaagaaaaggaagaagacgaagatggaatcgatcgaattcacaccaaaattggaagtttgattgaaattggaataatgtgatggaaaagttagaaatttatgtgtgtaggaaagttttgatgtgatagaaaagttgaaagttggaagaaaaattttgtaaatcgaccaaatgtcaaaccaaggtctctgatgcctggctgctactccatcagttgactttgcaacgggtagccggccggtaagccatggcagtagctaagataggaggcggcagcaaagcaaagtcactgcaaaaaatgctttgatcggtgtgcatgtccactgcaaaaatgctttccaatttaggcgccacataaactggtagcctttcgccgtcctaggctctgcatggtccgtgcctttcatgtccagggacaccaacgcctgaaaatgtggattgcagtaataatggaggaaaagataggacggcaatgtactactccctcattgtaacgtttgaccatttgttttattcaattttttttgtaaatataaaaaacgaaaagttgtgcttaaagtattgtagataataaaataagtcacaaataaaataaataataatttcaaaaaaaattgaataagacgagtggtcaaacgttcaagcaaaactcaaaaaaaaatttttccccccccccccttttttaaaaatttaaattttttaaattggggggggaaaccgggggaagggggngaaaggttaaataaccttaattttgnccaagnganccatttanaccatcaggcataaacccaccacaagaaacatgtagtacattcatttgattaggaatttgtgattggagtatatctcttctcttctctcctgtccagttcttcagaatacattgcaggttggatgcaagaacacaaggatttcaggattcacctaaattgtctgtatgtattgatgtgtacatatatatagattatagagtaagttacatggactgattggtctttcagcactacaaaatatactgcactgagtcttgagtttgtggtttgcttgctgtgtatctacttacatggtaacatatctgcactatgctatattcaatgaaattggcacactctgtgccggttcgttcaaaaacatatctgcactagagtatagttctatgtaaataattcaggtctttgccaatgaatacaactgtgaaggctattctttgttcctgtgtattggttgttaactagtagggcatccttgccggaccagaggatgttctgacgatttcagaaccaagctcttgtattttacgcaacaaagccgctttctcccgctcaagctgctgtatgtacatgtcttgctcatcctggatgctttcaatctctgtcaaggccagtgacatggcctctgtgtcgccaccctcatcaactaaacctgtgaatttcttcaggctatctctcatctgttgaaaaaaaacacatgatgttcatcacaaaattgtcatgcataccaaagaggatactgagaggaatgtggcaatattgttatgcagagacatcgttcaaacaaaccaacgaagcctctcacctgcgatgatatcttgtgccctttgccaagggaagatgcatcagtctgaaagcttgttttcttctccaagtgtggtacttttcgcgtgatctttacatggacttctccgctttttactccttggagtggtatccattttacggcgggctgatttggaggaagcatgctgtattcgacagtgcattggcctatactagcagttggaaggactgcattatggtccttgacatgtaaaatcaggggttctcctgtttctggaaactcaaatgtctggttccaatctggagagagtgttttgtaaacaacctgcatggaatgagttactcagaatttctgatcaaatggattgttttttatagggtgattcatagtatctgtagaacagaatgaccatatataattctccagtctccaattagcgccaaaaaaggttttgttttttccttttataataacatactaaaactaacgagctattgctctataggtttcctctagtatgtgaggaggtaccacattttcaagagttaattcgtagcacctcgtagaggacctttgaaaagcccattttcctattgaagttcttatgttattctaaaccaagcacggactgctacaggctgaaagatttggactaatctgaattgatcatatgcacaccatctgaagatgccaagtgctgtactgtgtcagcatatttgttcatttctattacttcaaaacgccaacaaattcacatttcgcatgtcagaaaagcaatgcatgctgcatttcctaataaaggcatagtaaataactaaatacagaaaggttcaccaccaaaccttagttcgcttcttcttgctcccataatgcaccctgacataaggatcactagtgcctctgagatcagcagcaataagatccctagcttcaattatcactagctcaatccaggtagcttcaactctaccacttgaagtctgcttaagaagaacaatacagaatccagagaaacatcagtagacaaaatggtacaacagagcaaacggtataaaactaatgtttggtacagaatcaaggatatagaacatgttgctggaggtttcatgtgtagaaaaatagttgtactcaacatcccaaatttaaaatttttactgcgcatcctcttaagaaaaaatgtttctgacgctgatttcgcaaatgtatatatttttctgaattaagaatcctcgcaatattaaaattcaatgcttaaggaaggcaaataccttcaggataccgttgaaatcactctttattggctctatttgaagcctgatctctcctgaatccaccttttcaagtggaacccatacttcacggctatcaccatctaaaagtccttctagatttactcttgcgctgccaatgctttcgtctccaaatgtatctgcactatagcatttgatcttgagatattcaccaccagtgatctcatcaaactcgaatttatcattccaaaccggtcgagttgtatgagatagtgtttttgttttgtatagagcctataaaaagaatatgggattagaataccaacttgtataatagtaagtgaagctaaactttgggcaaggtaacaacaaacctttccatactgcactttcacatatggatcacactttccagatttaccgttaactgcaagggctttaccctcaactactgcaactctgagtttccgtcctgttctggactgaagcttgggcgatacatcaaatgaagagtgggatccgttgctcagagaattgctcaacgtaactgagccatcagagaattgccattcttttagcacaagagtgacagttaactgcaagggaaagagtttggaacagtattacacaactatccagaccaaataaactagaaaaggagaaatggcacagttaaccagttcgcagttgaataggtaggtgaaaaatgggcacattattgttggaaccttcatgaatgtcacggtagaaatgataaaaggaagttctccactaaaattgttaacttgggaacagaaacatcataattcatcatcaaaaccccacatttctggtcactctatcagtagtctatcctttatgtattatatctccagagctctcaagcccaactgaatgaaaccattgttacttccacaggttgtttctaaaaaaaaagggctgaacattttcctgatcctctctcttccgatcttgattccaaaagcgctaccaattcaacaggtcgaacttactcttttgtaatttataaaacaacccaactgtaaataaagttcaacagaaaatcaaatgtaggactatgggtcattagaactttaggctatacaagtagctgaggacctgaggtcctaaactcctaaaatctgttacttcacagtttgtatcgagtatatcaaatatggcataatttcaaacctgataggctagtgaaaatttgcttcggtggcttgataaaactaattagcacttcaatcaattgggaatccatttttctaaatgttacagcatatccaaaacaggttttggatgcaagagaaacagtgacaacacatcagtagttactatagagatgtacctcgcccctgatgtcctcaaatggaacaaccattccaacttcttgtccacaaagctcagtacgttttgcaacagcaccagaattatgtcctatagcccaaaatattgttgaatcatctagaacatacttgacctgtttacattactttcatcagcatcctttagatgtgttggaagaaccacaactgcatcatgtgcaatggaaactgactaaaataataagtttaactgtcatacctttatctcgcagcttgtcaagtaggtgaccttaacaccaccagagtccaattcatacagattgaacttgacaacacctgtctctccatgcaataccaggttaaatgtgctattccatgcagggtttggacccttgcttgtacttgtttttctcactaaactaccaacttctacctcaataaatgtctgtgataccttgttatcagcaattccagatgtagaacctccacttgagctttggcggatccctatttcattagttgtgtttctcccaacgttactagctgaaacaactgtgactgaaagaacacctccaactgctcgtttccttaaatctactggtggcaaagaaaaacacaatctgcgaggctcaaccattgtcttcactatggtttcggtcaaaagcttaacctgcatggctcatgaagcatcacatttagcattcaaatttcaatacgcaatggccgtaattgcactaaaagaattgcaaagataccaaggactaactaaatggcacacacaaacccaccagccatgttgagacaccgggtagctccataccaggaactgcttggcttccaccacttccaaatgccactcctatcctgacttctggagtggattcaaaagaataaagaatagcttcaccatcaaggatgggtaacagtagaagctgcaaagatatagtttaaatcgaagaaaataagagcttaatctgatgagccaactagaaaatgcgcttagacaagaaaataatcgtcaaatacagatataatactcaggacaagaaagcaaataaaagattttaacgtaagtggtgatccaagttcttatccacacaaaatttattgtgtttcaacaaaacgctaaagtgaaatagctcaaaataaggttgccactttatcctatgtgagaggcaggttaactacatcataatatcctatgtcaaccattaaggacaggaatgactccgaaaagccaaaaccatttttgttcatcatgattgttcattatcagctttgcgatctcagtgagcaaagctggcgacaattcttgcttaccaattcaaaagaagtctctctcaaatcaagataaatgagaaataacaataacaataacaataacaatgtaacagaatcaattgaaagagcaaaggacatacatctcccttgatgtgaatgctgtttataacaattcgagcagcgccaatcagtggttttgctaattttgccaaaaacattacactcatctcattgctgtcccaatcaaaacccaagcgcatgactttctgcatgttcaaaaaacgagagttgaagtgtgcaactgtacaaccaacagaagtatttcatctgcctctcctacttacaacataatattgttcaagatggaacaactaatgactaaggctatgcaggatcaggaagagctgcagaacatgttatatattcctaacagataatggaagaacacatgggttagttacagataatggaagaacacatgggttagttatacagatgcatagttataatcagaaaaggtgaataaaccattgatgacactgcattcgttagtgttttcaatgatgtaaggataagttaaccaaactagtacccaaaacagcacaactcggaatttatgaagcagagcaaataagctaaatcaccgctgttataattctgtagaactaaaaacagcataagcagttctttcaataatgatcagtgcctgaggcaatgatttcctccctctctaagtttaccacaggtgagtatcccatacacagtacagaatattaatatctgacctggtcacctgaagtcatccagcgcatcccatgctcccccaaggtaggtggacaacaaccaagtgagaattcctgtaactctattttatcctggagagatataaaagcaaatcattagtactacagtcagaatagcagcaggagaggataaacaactttaagagaacttactattagttttggttttcgatgctttaaacgtttctgcaaattcagagaacactcactggtcagctggttataaaaaaagcagaatagaagccagtgtgcaccatatcttgcaatgcatattgactatttgactacaacaaataaataggagcaatggagctgagaaaaaaaaatggccaggccggcagcgaagaagtgccccagccaattttattaagattggagaaggttaaaacaattgggcaacaaacatggttgttgttttacaacaagctgagaaattttctaatgaattttattttgagataatcatcaccaaagaaactcaaaaggtatatttccaaaagcttttaaaaccaataattattacatccaagcaaaaactattagacgtaatagaaactttcacaaatgatagcaccttcattttctagcatcctagtgctcaaaagattcataaaattatctagcaaatgtgcagaagctgacctcaacagtagattgaaacttctttgacagttttggttccatataattgggccaaacttctaccaaaagtttgttcaaccactcgcaaggctctattggcgtcgtaggctacaagagatacaaaaggggtattgctaaaagttcatgtataaagagcaaaacaaaaaaaaataagtgaaggaatatactgttgtattcagtataagatgcttccatcgtttgttcaaatcttctatggctgacctccttttaaacctcccatactgcattcatcattaaaataaaaatagtaagaagacaaaataaactctagaaagtggggcgaggtgtttctctgtgttattcttttcagaattatgaacactctgcaactcaaaagaatagatcagcacttccaaaccaagcaacaagcaatacttgcagtaaattagtactatctcaacacctagaaaaggactatttgtctgacaattcagcaggacatcaaagaagccaagccaaattcatcaaagaacaactttatccatatgaataccatgggaaggaaaaactacctgaattgttgcccatacagcagccaacaggggaacccagtttgagaatggcacaacccatcgttcaacaaaccatgcaaacaagacaagagggaccaggaaggggagcaagggctgctccaccatgacctggttgaaaaattctagtgcatccttggcatgcaatttcttcagcttcttcttcgccatctctcctccctgctgctctgtgaattcagcaaagctctcttctctgataaccacacagagcttgatgcagataccttttgttgttttttttggcctttgtttccactgcttcccgagttcctgtcactggccccttttgcactgtgggtattggatacctgtccacctacaattttggttccaattaatggccacagcaagatagacacctaagataaagcatgtatgattgcgacctattgctcccagacttgcgagatatttcaccacttctagaatggaacaatgaagagaaaacctccaaatttttcattctttcaggcagcgtgttctattagcacgaataaacaagaaattgacccaattgatggccctaacaaagtcaacagctggattataccactaagattcgttctagttctggaccacataaacgagagagagagagaagtccaagccgcagaaccattacagtgtgcgtacacatctggccaagaaattcttgtgaaaacaaccaagcagcataggagccaccaaagcctgaaacgtcacattcgaacaggaaaaaaacacatccatgttcttgacaacccaaatgctaacctccatgaaacccaaatagatcccctgtaaactgtaaaaaaaaatccgctaaaaaatctgcaatttaacactgactgacgtgtacccagcgagtagaataaactgcatgctccaatccaacccagtcaagaagaactcctcacccgtcgagtcgccaacgctatggccaggtccctgcacccatggagattgattcgcgcagagacaccgtgaggccaagcagacaggagatcgagaggagcagagaaggagagtcgcgaaggctaaccggaggcggagaaggcgaggtggctccactccacgcacgcaatagggaggagttgaaaaaactgcagctttcccccttcagagttgctacgaattccacgaactgcttccaagatgcctcctttccgatccaatccgccgcaaccgcatccggcgaaatcaccagccttccccgccggcgactgttcttccccgcctcctccaagaggggaagttggcagaggtcaaactttgcaagtttggaatgattctataaactccaagaaccaagaaccagggtgggacaaaggggggaaattttattttttgtgagttgaggggggctctgatttgttggaactggaagcgattgggcggcagaatcaagtagtagtggatttcagtgtgctgggacaggagggaacgaacgcgtcaaaatcgggctcgtgcgtgttcgtcaatcgtcagcggcgcagcgctcttctgtgccacgctggctctcattggtttgtactcctactccgtagtaccttggaatgcgactgatttttttgatcgatctcttgtttgtttctttgggttaattggaaccatgccattacaacttcagctatttggaaatatgccattacaattagcaaaaccggctgggtgccatcgcaatttcttccaaattggaaccatgccattatatacgtctgaattgccatccatgccatttgtcctcgcacgtatttccgtatggacgcttgtgcccctggctgagacgatacaagccaaccatcccggtccggctcaaccatctctgttccccattccctattccccattgtctgcaaaccctagctcgccgacggcgatctcgacggcgatcggtgcagcgccggcgacgacgacgggggctagggatacggcgccggcgacgacgacgggggctagggatacggcggcggctttaccgatagcttctcccggcgtagacggatcaacgcggcaacgagtttggaggcgagctataccagtggcagtggtcgctctgcaatttcgagaaggtgcagagtcccatcggtggctccttcaatcccagagctgaaatgtgcttgtgggcatgccgctgcggtgcagacatcgaacacaccaaggaatccaaggcggcggtggctgcagtgtcctggggaggtgagaatccagtcctacttgtgcatatttgtgtgtgattttctttctgaatccaatctggtttccttcttgtagaattgtagatgtgccttgtggatttgggaagatctcaacgaatacgttgaggagatggtcgcttactgtcatgctgacgagtacgactatcttagagagacatgcgacagtttgcgccagtttatagcagatcaaagacatgcatatctctcagttgtcagcctaggctgaggcaaaagagttgcagttgcaagccaattacgaagctttgaatcagtccaagttggggtgtgcagacttaaagaagaaattggagtgcgagaaggcttggactcgcacaattgtgtccatgatgatcttgttctatgtgttgttagttgctgtaatgataaggcaggtttaggagatgttctgtgtgatgtctggtgtgtgaaatattgtgatgtaccttaggtgtgtgaaatctggtgtgtgtatttatgtttgtgcaagttggggaatgcaatgcaagggctatattttggaatctggtgcaaataatctgctgcctaacatagaagctgtttatgtgcaatggtgactgaaataaatttgctgacataaatgacataaacttactgacataaatgacataacttgctcacataactgacataaacttgttcagaagtgtagcaactgacataacttgttcaggagtgtagcatagaccaacatgcagcacacaaaagacagaacatttcaggtttggagcccattaccatggccaatatctaacaagtccaaatggccatctacaagcagcaaaataaacaagtttgggtttttacatcacagaccaacctagtctgataattttctaactactctagcgggtggagcagtagaagcaacaagattcttcctcttctggggagttttcttcttcttaggagtatttttcttcttgacaggtgcagatgaacttgcttcagctgcagctccaggcactcctttcttcttaggagggtttttcttcttgactggtgcagcttcggcctgacctgcagcttcagccacttgtctcttcctgcacacagatagtaccattagggaagttttgaggtagtcaatttgtggactaaatagaaagaagtccaaattacctttttttggttgttggctggattgtttgctcatcttgatgaactggctcagcaagtttgcatatcttttcaaagtgaccaaaaccctgacatctcttgcatgtaactctcttcctgccaggttgttctaaacaatctcttattctttgcactctaggtcttccagcacctctcttctacctaggtgggtataccttgaagccaagatctacatgtggccactgagacctatcagtcattgttgccactctagctgcataagctgctctaaaggtctgaacactatagtagggactgacaaaatcttggattcgacctctgttagtgcaaatccaggccaatgcatgtttgcatggctttcaacttgccataccctacatgagcagttttggttctgtaaatcaactgtgtgccttctagtgttgttgtcagactcaacaagtgtcacttctgcgaaaccttcatcgcttctaacaacctttaccaccctgagacagacagttgcatcattcaattctttcattacatttggcaggatgccatccacaagctttttaccaacttctctcctgagggccatcttctccatgatcatctccctgatcccatccacaagttcatgcaacaacagacctttaagcttcttgatctggttattgaaactttcagaaacattgtttgtgaggtagtcacacttgctagactcagaaaagccacatctgtaccaaatccttgagtgatgcttctcaagatactctattgcatcagacctcacttggtatatttgttgcatgtaccacctaaatccatcctcagtataacttcttgcagttggatacaggtgatcagtgaaggcaggaccttgaaacttcttcatgaagttagcatagagatgcctcatgcattctctgtgctcaactttttcaaatgcagcatcaacagctttttccaaacccttacaagcatctgttgatataactaggccctctggattatctatggccttattgaggtgtctcatgaaccataaccaattttcatcagtttcagagtcaaaaattgaataggatacatagaacaaccaattatgtccatctacactagtggcagcagctagttgaccagtatatttacctgtcaatcttgttgaatcaacaccaacatagggcctgcagccattgaggaagccatctatgcaaggcttcagaacaacaaacatcctcttgaagcacattttcttccctatcttctgtacatcaatctctacaatagaccctggggacttcctctccatctcagatttccaattaaaaagaaattggaagctctcttcatatttaccatgtatatgttacaatgcacacttgaacccagaccatgccttcgaatacttcaactttatctgaaaatcttcttcaagcttgtgccttgcatcactagctcccttttttgggtttttcttgacccaatccccaatcctgtctgcaacccaaccttgagttgccatcttgttttcttgcaatttggtagatgcacatgtgtgctcaaagggaagaactttgatctgcattaaacatgtataattaacaaaattgcattacacaaacataatcaaaagcctaatcaaaataaataaatgaagcaaaccatagcacctgtatgactttggtcccaggtagctttgatgcatgaacacgccaaggacacccttcagcagcacaatgggctagaaaacgtgttggatctgtcttcaaaccagcaaacacaaaaccttttttaactgcatagtgccttattgcttttctgaaagcaattatatcaggaaataatgcatctttctctatttttggattctcagggtcacgtatgacattaaagacctatggatcttcatcagtaacctactcctcaggagctctcacccctgcaacaggaggctgagaagactgaccagtgccagtgtttccatcgggttcagcaaactgtggaggctttttaggttgtgagggaacatacaaatgctcatcatcgacacccacatattcttcctcattgtcaaatatgtctggttctctaacaggttcttcctctattgcaggcttttcaacaccttcaacattgggagcgggctgttcagaaccaatgatgggagcagagttgtcaggaggcacaacacatatgggttctacttcattctcgacaagggtggataaaggctcagatgtaccatccatcttattgtcaagcactgaaacaataagattgaattggctctctgttttgtacatttcgaataggtcaggtagctgactattgtccacaagtctaacatcctcaccaatcgccttgtgcaaaaaccagattgaaggagattgatttgttccccaggtgaactcaacacttaaagtattcatcagaaattccatggaaaagctatctgaatccacaacccaatgccgagtagctcctttcgtgtaagatttcctaccatctgtttctatcatgacataagctccaaccctaacctctactgaaaaccagtgcctaccatgaaaggagagaacatcaactgaaaatctacatgtaaatacgatgaaatacccaatgcacttctacatcagctatccaaggagtatattcgagttcaagttactcacggtatcgaggaaataggaggaatcgagcctcccagatccatcccctccatcggcaatttcgctgcgcacgatgatgtcgcaggtgaacttgcgatcttcaggggaacttctacatcgtgggtcgtcgtcgccggcgccgtatccatagcccccgttgtcgtcgccggcgctgcaacgattgccgtcgagatcgccgtcggcgagctagggttttgcagacaatggggaatggggaatggggaacagagatggttgagccggaccaggggggcctcgcccagcgcctctcagagatgaccggggccctcgagcgactccccgaggagctcgaggagacgatcaagtcatcctcgagggacctcgcccggggggcggtggagctcgtactggcaagctaccaggccagggaccctgacttctccccgtgggcagcgctggaagagttccctcccgggaccgaggacggcgcgcgcgcgaaggtccgggacgccaccgaccatatcgtccacagcttcgagggtacggcccctcggctcgcgttcgcgctcgacttcgatgaggagggcagtgacgacggtgcggacgacagcgacgacgaggccgacgtcccgggcgcgtcggagtgagcccccaggcccccgccaatcttaataacttttgcttcttcttccgaggccttcgggcccccttcttgtatagactgatttaatctgtaatcaaataaagaggaaatttctgcgtcagctctgcttgttgtgtgtatgagacgaggatggtctgtgccgcggtccttctttgtcttggcttgaacaagggctcgtgcccaggtcccagcctcaaacggcgcgggtcggggctagtgcctggggagatccacgtgtcgagactggccaggccgggagcgcggtgaccaagggttatggatgacccgattgtgggcctttgccgattcccccccgaagttcaccacgccccggggcacggctcggttctgggccccgtttggcgattttagctggcccgggccgccgagggcaaggtcgagcacgagcgtgctaattcaagccaagattcttcaaaaggaaaacgatggcacagacacagtcctcaagaaatcgaaaatgcttttattgaaatacggaagagaaaaaaggtaagtatatgcatgtggtagcccccggccaactctgcacgcccggggggtgcggggttggcccgagcccgagacatgatacccgacccccactaggggtagaagcgacgaaggtgctcgatgttccacgggttaggcagctctgtgccgtcgcccgtggcgagccgaacggagcccggccgggggacgccgatcactcgatacggaccctcccacattggtgagagcttgctcagtccagcacgcgtttggacgcggcgtaggacgaggtcgtcgacgcagagtgatcgggcccggacgtggcgctgatggtagcgccgcaggatctgctggtagcgcgcggctcggagggccgcgcgccgccttcgctcttccaaatagtcgaggtcgtctcggcgaagctgatcttgatcagcctcgcaatacatggtgacccgaggggacctcagggtgagctcagatgggaggaccgcctccgcgccgtagacgaggaagaaaggcgtttccccggttgctcggcttggcgtggttcggttcgcccagagcaccgctggcagctcctcgatccacgagtcgccgtgcttcttggggatgttgaaggtcttggttttgaggcccttgaggatttccgcgttggcgcgctccacttggccattgcttctggggtgggcgggggaggcgaagcagagcttgatgcccatgtcttcgcagtagtcaccgaagagctcactagtgaactgggtgccgttatccgtaatgatacggttaggcaccccaaaccgagcagtgatgcccctgatgaatttaagcgcggagtgcttatcgatcttgatgaccggataagcctcgggccacttagtgaacttgtcgacagcgacatacagatactcgaacccgcccggggcccgcctgaacggacccaggatatcgagcccccagacagcaaacggccacgaaagaggtatggtctgcagggcctgggccggctgatgggtttgcctggcgtggaactggcacgccctgcaccgccggaccaggtcgaccgcatcgttgagagccgtcggccaatagaaaccctggcgaaaggccttgccatccaaggtgcgtgaggcggagtgggctccgcactcgccttcatggacatcggcgagaaactcgacgccttgttcccgaggaatgcacttcaggaggactccgttagccgcacgccgatagagggtcccttccaccagcacgtagcgcttggagatgcgccggacgcgttcactcccttcgcggtcctcgggtagagtcttatctgcgaggtacgcctggatctcagtgatccaagcaatcaatctaggggagctgggagcgctcccctcggatcccgaggcctggactccgacgggcctcgggggccgttcaggcgcgtccgtctcccctagggggtcgggtcgcgccgacggctgggcgagcctttcttcaaaggcgcccggtggggtctgggctcgcgaggaagcgagccttgagagttcgtcggcgaccgcgttatcccgtctgggcacgtgccgaagttctatcccgtcgaagtggcgctccatacgccgcacctggcgcacgtaagcgtccatctgcgggtcagagcaccggtactccttacagacctggttaacgaccaactgggagtcgcctaacaccaggaggcggcggatccccagtccagctgccactctgagtcccgcaaggagtccctcgtactcagccatattgttggtcgcccgaaagtcaaggcggaccaggtatctgaggacgtctccgctcggcgaggtcaacatgacccccgcaccggcgccctgaagagacagggagccgtcgaactgcatcaccaagtaggcggtgtgaggcagctgcgaggggcccgagctggcctcgggggcggagacgggctcgggagctggggtccactccgccacaaagtcggcgagggcctggctcttgatcgcgtggcgtggttcaaagcgcaaatcgaattcagagagttcgattgcccatttcaccacccgtccagtaccctctcggttatgcaagatttggccgagggggtaagacgtgaccaccgtgacccgatgcgcctggaaataatggcgcaacttcctcgaagccatcagaatagcgtaaagcatcttctaggcctgagggtatcgggtcttggcgtcccggagggcctcactaacgaagtagacgggccgctgcacctttcggcggggccgatcctcttcgccaggggccgcatctccagggcgctcttcgtccgagaggccacgcggggcgcactcggcttctgtgccgacgacctcggggtcagagggcgacaggcgcggccttcccgcagtggccccggggccatcctgggggtcgggggcgcctggcaccgtcggacaagcaggcggagggccagctccggccgtcgggggcctcgggccgccgttcggctcgggggcctctcctgcctgctctctcccgggtcgagtcgacgcagggtggggatgcgcggagtgagggttgtcctcgtcgcgctccacgaccaacgccgcgctgaccacctgcggggttgccgccaggtagagtagcaacggctcatctggctccggggcgaccaggactgggggagaactgaggtacgccttcaactgagtgagggcccgctcagcctcctccgtccaggtaaacggcccggagcatttgaggagcttaaataggggcagtgccttctctcccagcctcgatatgaaccgacttagggcggccatgcagccggtgacgcactgcacatccctaagcttgctggggggggcgcatccgctctatagctcgtatcttctcggggttggcctcgatgcctcgggcagagaccaagaacccgagaagcttgcccgcaggcacgccgaacacgcacttattggggttcagctttatgcgggcggagcggagactttcgaaagtttccgctagatctgagagtaaggtctcttggttgcgcgtcttcacaaccaagtcatcaacataggcctcaacattgcgtcctatctggctacccaaagaaattcgagtagtacgttgaaaagtaggacctgcattctttaacccgaaaggcattgtcgtataacaataagtttctatgggggtaatgaatgcagttttttcctcatcctccctagccatgcgaatctgatgataaccagagtatgcatctagaaaacacaaaaggtcgcaccccgcagtggagtcgacaatctgatctatgcgtggcagggggtaagggtccttaggacgtgccttgttaaggtcggtgtagtcgatgcacatccgaagcttgccgttcgccttgggaacgacgaccgggttcgccagccactccggatggatgacctcacggatgaatccggcctccagaagtcgcgccacctcctcacggatgaaggcttgacgttccggggcctgccgccgcactttctgccggaccggccttgcgcccggccgtacggcgagacggtgctcaatcacctccctggggaccccgggcatgtccgccggtctccaggcgaagacgtcggcgtttgcccgcaggaaggagacgagcgcgtcttcctatttgtcgtccagaagaccaccgattcgtgtggtcttggacgggccgtcgcccagggcaacctccttgaccggaacctcgtcgcacgtgaccatccgctgccttggggcggccgggacggaggtggtgagcctctcgtcgccacccgcgggcttggacgccgcggcgaggtggtccgcgcgctgctccatacaagcaagcgcgactttgaggtcgccatggacggtgatggggccaccggggcccggcatcttcatctggagatatgcgtagtggaccgccgccatgaacttcaccaacgcgggcctccccaggaccgcgttgtagggcagactgaggtccgccacatcgaagtccacccgctccgtgcggaagttggcggaaccaccgaaggtgaccgggaggtcgatatgacccagcggccaggtgtgccccggcgtcacaccgatgatcggctgggacggccggagcaccatccccggggccttgatggcgtcaaaggctgcgggggaaaggatgttgagggctgcacccccgtctatgaggacacgccccaacttcacattgcaaacggtgggggaaaccaccatcgcgatctgtcctccccgggcaacgcacggcgggtggtcggtctggtcgaaggtgagggcaacctccgaccaccgcgcccgccgcgtcgcctcatgggtaggggccgcggccagaagctctcgcttcatggccttgaggctccggcgagaagcgtgagcgcacgctcccccatcgacggtggcgacggtggcctcaggctcctggaaccccaggtcatcgtcgccatcgttgatgtcctcggcggtggccttctgcttggcctcacctcgccggttgccggcgggagccgccggggtcttgccctcacggcgctcctgcctcttctcctcctcccacttcctcgtccgctcagccaagcttttgaccgcgcggcagtccgcgaggtcgtggagggaggtgttgtgcacggtacaccacttgccggtcgggcgctccctgctgggagcgccggcctccttctttttgtcgctcgcaggcctcccctttcggggggcccacgaagcgccctcgacggcgaggacatgaccctcgtcgtcggaacgggccggccccttcttcctcctcctgttccgccgctctgaccgagtggcggacccgggggcggccggagctgtcacaccagagccggaggagttccaggtccaggcctcctccttgcgagccacacggtccgcgagctcaaaaagctgcgcggtggtctggggctccttggaggcgatcttctcgagcatgcggttgtgccgcacgccccccctgaacgcgtagatcaccgcgtgtgcggggatgcacggtatggtgttgcggacttgacaaaaccgctgaatgtacgagcgaagagactcatcgtcccttcgctgtaccgcatgcaagtccgcttcttcacctgggcgcggatatatgccctggaagttcgtggtgaactgctggcacaaatcctcccaagagtggaccgacgcgggtggcaagttcattagccaaccccgcgcctgacccttcagggccatggggaagaaattcgccatgaccctgtcgtcgcccccggcggcctcgatcccggtcgtgtagatctggagaaactcggcggggttgacgcttccgtcgtatttttcggtgacggtgggccggaaccttgggggccaacggacgttccgaaggctcgccacaaaggctcgacagccggcaccgccaaccggggacacggggggccggcccccgtgcccggaccgaagtggcgctccggacgaggaagcgccctccattgcgtgggcggcgtgacgagcgtcgcgccggcgctcgatatcgaggcgggcatccggccccccacgcatatctccttgggtcggaggcgtcgacgagggaatggcggacgaacggcgggtaacggccgccgctcgccgcgccctccgcctcgacgacgtggagccggcggcgggagcgccagaggtctcggtggcggaggaccgcccgccggcgcctaggcgctgctgcgccgtcatgaccaagtcggccacatcatccagccaacgccgagctggagtctctggatcggggacgacgggcgggtgacgcaggagcgcgcccgcagcctggagcgcaccctggggcgtgccgccattgccgtagacgaggcggcgacgcgccccgtctcgccgtcctcccccgtcgcccgcgggcggcgaagtcgcggatcctccggcctccccgagcgcctccccccgcccaagatttcggcgagagggggacggtggggtgcgagcccgacggcgcgggttctgctccccgtcgtcaccgctagcgttcggagagaggctgtgcgcccctgcccgttcgcccattgggctgagcgggagaagcttggcgcacacgaaagaggacgagggcttagaaagacacgcgcgccccctacctggcgcgccagatgacggagcgtggggctcctcaccgggagactacgcaggcccccctttgccggttcggccgggggcgctaagtgaggttcttcgccctcgatctgaggaacgtcagcgagagaagaaatgcgcaagacacgggcgacgtagacaggttcgggccgctgagaagcgtaacaccctactcctgtgttctggtggatctgtgtgtgaaggaatccagagactcgagagcgagagagagagttcaggttctagccaacattcgccagagtcccaactcccctttcgtcctcccttttttttaggcctgggcctcctttttatctggtcaggggtcaccacatgggcctctagctacctaagaaaggaaacatgcttttacaatgagggctagtctacagccggaagtgacctctgacaagccgagcgcacgtctcttgctccgctcgcccctcttccggtggacgcccatttcaaccttcatttaatggccagcgacttccttgtcatacttgcgctgaagcctggaatgaatctgaccgggactgacatacccactcctggagttggcacgccggctccggctagggacgagagctaggaagatctcatcattccgacgggacggggcgaggcgtgtggcaggccgcctgttgccacctaacccgcgatctgaccggtctgtgaccggtcactcaccgcgatcggtcacggaccgaataagcgtgcgctgcgccgcattaaatgcggcgtggcgcgctcgtccaacctgctataaatgcggttaggtgagcccggtgtgctcacctaacccacacacgtggcgccaaaaccacagggggtcggggcaccccagccctcggggccgaaacgggagcggcccgacccctcggggagacagagggaggggtggccacgtcaccttcgggcccgactcccccgagggggtcaggccacgtgggtgaccgcggctacccaggcctctagtcacgatacccccggccccatgtcaccgacacggtccttaattgaccggggacggtactagccttttccagataccacccaaatcctctgtccgccccagtcgaaaacagttgtttaattttatttctcctttcacaaatcatgtcatcaacatcatggcaatgtggcgctcatgtctccacatgccgcatctcaattaccttcccaaaggtaattgcccaagcatatagcatttgataaatatgagtatgcatgattctagaatagcatttctaagcaattgtcatagttgactagggactcatacgtaaacatggttacaaagatttaagggtaaacaataatcaaggcatggcataatcacaagtaggatgttcatcattgcatgcaattttatttgtaaataaaacaatttcgcaattgggatcaacatgttcaaggaatagtgatgacttgccttgctcaggatagtccttattcttgatataattcttgatcaaccttcacctcctggaagttgctgacgttgcctcacgactaaccgatacataaattctataacacgcaagaaaaaccaatattcaaataacaaccaaatatgcacaacaaaatatactattcatgtcttctaatggattccaatcacgctaggggctaaggtttcttaatctttctattgtcaacgtggcctatttaggagttaaccaacatagcatttataggatacatatatatttggctaatcggtggtttagtctatcaaatggctatggaaggattatggctaagcatgcatctatctacataggacggttatttactagaggttctgttgttagatggatttaggatcaatcaaataattacagtgaatcatttgtattatttattttattgatggaagctttactttaattatgaacatattttacttgtcacaataaattataaaaggttaataattatccatgctttgtatgttagagttgtttaggttaatcatattatggttacagattatcccatcacataattttacaatgaataatcctaatttacagttgaactataattataattatatgaggtcaagatttataactagtatttatctaatatacatgtttgtcatacactccctcttaatttaatatatgcaacacgcaaattaatactataccgtaccactataatgggatgtatagtatatgtgtaagcaacaatatcttattattggatcatatatttgagtagttgctttttactgtaagctatacaatacatgttgattttaagatggctctgtttggttaactaatggatatcaaccgactatatacatatattctacttcacatgacattgtatcgacaaatttttaagtggtccaaatacaactagctctatgattactctcctaaacaagttaaagattcatctatgtgtgtttatattttagttacaaaatatgaggctaaactttatgtaaacaatttataagtcatggatttagttatatttggacatagaccagtaaatagcactaatattttcctatacacccattaatttgaaggattgattataactaatttatttagttgctacagtgacaagacatgttaaagataattatgctactgtacaatatccatttttattcattggcacactatttaggttaactattatctaatcatttgatattaattaatttataattataaatatattttgttaaatactgaattatatatcattggaaagcttatgaatttagatgaatttaggttcaagtttcactcaaatccaagttaaaatgaataagttatgctagtgtaaagattcaaatttgaattaatccgagaaattgcgaaaagctactgttcataaatgatttatttttaatccaagacatatccacagccttgtccaactgacaagtgggaccccgggtttatttctttttcctaccgaattattttctaaagggaaataggaagagctaatgacaagtggggcccacatgtcatagactcgagaccataaaacttctataattagatttttaaccacccggacctacatgtaatagacactat

SEQ ID NO: 8371 - DNA, 6679 bp, Oryza sativa
  unsure (1)..(6679): unsure at all n locations
tggttaggggtaacattaggtgaaacttaaatgagagggacggttgggtaagagaatagtattagaaacccatataattgctaacatatttcaaatactanngaatcctttatantttgtgtacatatgagtgatcgctaactcatggctagctaactcatggctagctagtggtgtactagtatagtttattgtacttgtgtaggtttctttcaaagttacatgtttatgaattattgttagctttatcgtgcttctgttgaaaaaaaggccgcaaataaaagagagaactcccttttttttttgagaactcccttttttttttgcaaggaagcatataaaagagaactttgtgagtaacgatatgatgatgtttaatggaccaaaggttataacttagcgtaaccaattgcagatacgctaaaactattatgcgagctagtgtatgttaatttcttcctcatttacaattattttctctaataattaactaacatatatgaaaaagagcaatgttcccgtgctctaaaagagaaattaccaaatgatcataatcgttcattattaagaataaattagtaatttaccaatacaatgattagaggtaactttgttatttatgttttttctagatctattatttggtcatccattccgctggcattgctcacacctatattccatcgaaaaagccaaaaaaaaagttgaaaaaaaggtctagtcgtcattgctaaatgttgattatatccctccacacttttttttataataatgcacctccacatttctaataccgctaactgaagtggtagtacaaataaatctaaacccttcaaccaaatgagaacaacggttcatattgctttttactaccaacagagagcaccgtagtatggctcatatgagaacttacacgtactagtgctagaattactcgatccgatcacaaatacgtattgatttagacattggtctggtctcacacaaacattatcggaccacttatttatatcttaatatatttacaaattccaataaaattgtatttttcatgaaaaatatgcatggcttaggctttattcgattttttttgtttgcaccattaatagcaagataacaagaatgcctacacttcatctatttcctatacatgttaaatatatcatgcaacaagtctattgtaaattattcacttgtcatctttttgacatgtgtgctcaaatcctatatacttatatagttcatccccactaagtatagttaatgctatttctctcttctctcattaagccacatcaccctaattatttctagcctttggctgatagatccatagttcaaattatctcttctttcttctctcataacaccatgcaatctcaatcatttttaggctcaaaattcataagtatcaatttgttttagttttaataattatattgcatcttatttatacatattatgtaacttaatttccggcagcaacacaacggggtattcatatagtataattcaatgacctttcaattgattatatgtttcaaggacatgcatgtttgaattgattcttttccaacttaacagtgactgtacttctgaaaattcggtcaagggaagccgcaaaactgacactttagatgcggcaaatattaagattaattgcaagtatttgactacacaccatggtatgcatgcaactgtgccaacatcacgcacaaactatttaagctaaacatttgaattgaacattttaaccggtcggcatgcagacagttaggtcaagaatcattaggtcctacgaatattttatatgattatcctaggaacttatacaggcattcctacctaatctttgcttacttaccagggtgctgtctccaaagtttagtgtttcattggcttttcgggagaaagaactacaaagctatttgctttgcaagcacaagtctcgctgattgattggcttaattntccttnttttggncnttntttggggaaaaaagggtttaagggnnaaaacccccccgggggtttttaaacccccttttattggaaataattctagttcaaactggtagtaaataattaattatgaaacagataattattctgattgaacgcatggttaagtgccataggcccataggcaggtagttgcatgcgtggagacacatttgcatttcactataccataaagtgtggtagctttcgaaaacataccaatgatttggtgtaatatcaataaataaaaacccatgcatgcatatgtatatgtacatgtctctatttgggatttgagcttatcacaaaaggataatatatattccaaaagaaacaaaaagaataacgttttgcattactgttttttttttgcagtgcaaaaggagatcgtggagaggtgtgtggttcaccaatgtgtgcatccaacaatttggtcatctctccatcccactctccctctctcgtctaatcctaacacagtgctgcaagagggatgacaaattgttcagtcaaacacgcttcatgtaggagagaatctaaagatcagtactgggcactatttcttctctcactctctctctctctctctcattccatagaaaaagatggaagctttgacagattgccctgaccttttggtgtgtaacaacgcacttggctttctcctctcctcttccttctcttctcccccaagaagctaattaacccaccaaattaaaatgtacccctcttcttcctacaagtagtagtacttttcagtcttgattaggggcagttgcatgcatgccccctcaaaaattcccttcatatgattgccacaagtcattataaaagggatatatatatatatatatatatatatatatatatatatatatatatatatattgatctcaagcagccaccaataataacttaatttagctctctctctctctctgcagctaggccatatgcatctctcctccctcttctcttgtacttacttgtgcttgctctcttccattcttttcttccctaattgatctcctagagagttgagagttgagagagtagttaaggggcaagctaattaagctagtgagagctagtggaggtacatggctatatatatggttgtatgagttgcaccctccaaggggatcatacatcgacctcatcatccaatccaccaactgaccaacaacatttatactactagtagtagaagaagaagctctagatagctatatatcccagctgctgcaaaggtagtagacagcaatgtcgcagaggagagttgcagggcccatgggagtgatgagcaagcagcagcaggaggccatggcagaggagatgatggagctgaggcgaggaccatggaccctcgaggaagacaacctcctcatgaactacattgcctgccatggcgaaggccgctggaatctcctcgcccgctgctccggtgagtcctccgtcactctgcaatcatcatcgatctaaccatggcatctaggtcaagtacaatcaatcttgaacaaatttgggttaattaatcgattagggttgaagaggacgggcaagagctgcaggctaagatggctcaactacctcaagcctgacataaagcgcgggaatctgacgccggaggagcagctgctcattcttgagctccattccaggtggggaaacaggtaggtatacatattgatttgatcaatctgcacatatatatcaatcaaaatcaattatctctgatcaagatcgattggttaatttgattgatcaggtggtcgaggatagcgcagcatctgccggggaggacggacaacgagatcaagaactactggaggacgagggtgcagaagcaggccaggcagctcaaggtcgacgccaacagcaccgtcttccgcgacgccgtccgctgctattggatgcctcgcctcctcgagaagatggccggagcagccaccgaccccactccgccgccgccaccgccactccaccaccacgccgccatggccaccgcctcctcctcgccgttcgacttcgacacccacctgcagcaagcagaagcagcaacggcgtgcgtcgtcccgaacaacgtgtaccaccaccacatcgacccgagcccgagcacgtcgacgtcggccggctcgacggcggccgcggcggcgttccagccgctgccctgcttctccgagctgagatgggaccagcagatgcagtcctccggcgagctcgacgacggcgccgccggcgtgttcgtcgactcggcgtcggcgctgggaagcctcagcctcgacgggctggaccttggtccggccgagtactactccgactcgacgctcctcgactacctcaactccagctgcaccggcagcgccatgatgacgatgatgaccgcctccggcaacgccggcagctacaactactgcggcggcgccatggacggcggcgacacgtggaggtccgacgaggtgtgccaagcggcggcgagaaagctcggcgagtggggaggaggaatctagctagctagctaggtagctacgtatccagctgagcttagctgtagctaaaggctaagtggatggatggatcatggatagatgagatggtaagttgcttcttgtgatgtctctccattaaagcgagatgagatgatgatcatgatgatgatgttgatgatgctgtcacattagctaatggatgagttgttccatcatatcgatcaagatagaagtactagtgatcgatcaagcaaaaatcaaaagtagaagatgatcaatagcgtgatgattccgatcgatggagagaatattattgagatgtgtttaaacatattagctagagctagctagcttcttgtagtggttgatcgatcgatggtgcatgtaactattgttagtagtagtactttgttaatgtaattgtgtacgtacgtatgtgtgttctctctttgtttgttcttgttaaaaggcgattcaattagctttgatttgttgggtttgtgaaagagatcttgttgttatatgcattgatcatcgaaggagaggtcgttgtctccaagtgatctcgtttatgttggtggggttgtgtgctgtaattgcatctggagatgggaacaatatgggtcagaatcaagctatagatgtgtgtgtgagagtgagatgcctctctctggcttgctagctttctcttgctagggaaagtcggcaatgacatgtcgctttgagatggctatctcgatctcgatctacatatatgtgtggttgccaataaaacttttttctgcaaacgcgcaaaagaattgcacgtcaatatattagaagaagagaagagggttaccaataaaactcaaattgagttgtgcaaatttgggaaatttaacaagtagagcacacaaacgcgtcgccacgctactttccagaagaactcaacaatgagctagagggttgttattgttatatatgtgtggtttgctatcacaagttgccacactagatagacattctgaagtatatatagctaggctagtgatacaatttcaggtacattttgtccatatatgttttttaaacaaatgaatatacatgagttcgatcagttattcccttcagtcatgaaaacatgtcattttacacatgaacatgcatggtgtcccacgtacaaatttgacctataaaccctgataaaattatcatgctatatatgtacatgtctacaaatatagttttcatacatctaactaaatatttttaaaatattgatgttcacattaagtttgacttgaaacatgtttttatgacatggaaggagtaaaacttgttttcttttgatgcgtacattattgagataatactaccatgttagataattaatgatttgacttagaatttaagtttgttgctctatataacctaggatgtagttattaaatatatcttttccaatcatgcttctttctgagaaaaattgccagtcgtactctagatggaaaacgacgatggatgtaacatatcgtcacatcaaatctaacgggccagagagggaacaattttacaatcatatggatatctcatccatttctcctaaatatatgttgtatatatttatatggatggagaaaggtggagaaagaaagtgctatagctagagatgattccaacttgaaatttttgctttgataagactcctggagctttcaagggcactgtgctagtagacttcctcttaaaggatgtgggacatggcatttgatagagaatggccggcgagaaaaaaaaattaaaagcgttttgatagaatgggaaaggaagagcgttgataggtgcatactaatttaagggagattcttttttcctctccaggacttgactacatgaatcagaacacgtgatatagaaattaagttaatctaattaattacgtggggatcagatagttttaaggaaatatttaataatatttcgttaaaactttgtaacaaatatatatatgtgatacagtcctaaacaatattgatgtatatttgactaacattaatatttcccatatcattaaaatacatttatatattaattgctgctgctgaaaacattactttttgttgaatttaaaccttgaaaactaacaacaataatcatatatacatcgaattaattaattatgtataatcttttctgagcttcacttcaga

SEQ ID NO: 8372 - DNA, 1503 bp, Oryza sativa
ttttactggttatgaccttacagggttgtaatcttataatttttttcatgctatattaatagaacttcgcaccatctcgtacgagtcgttaaaaaaatagtacaattttgcacacaattgacacatattatatctttttggcaaatacatgatacatatattagaggtgccctgcactccttcagggcccctttgaatcaaagggtttatgtaggaatttcataggattcaaatcctataggaaattttcctatttggccctttgatttaaaggattgaaactttccaaatcctatgaaattcctatggaatagtacattgcatgtggattttggaggaaatttagcaagagctccaacctcttggaaaatttcctttgagtctatctctctcatccgattcctgtgtttttcctgcgctccaatcaaacgaccattcctgtgttttccctgtgttttgcaatcttctgttttacacttcaattcctgtcaaaatcctgtgttttttctattcctccattttttctaacatgcgattcaaagggccctcggaatcttagaaatatgaaaaaaattcaccggttctttttgtttcttcttgagtgagagatacttttatagagttgattgatatgagtaccattcttttttgctttgatctttatctgtagatgcgcatggatgattgcacacacttttgccaagtcacgcacagatcagttccggaccaaaaatcgcagtgcctatctctgtctggcccaagtgccggcaccgtgctctctccttcgctgcccggcctctccatgtccgcgtcagtgtctgaattattggagcaacacaacgctggagtagtagttgtttatctcctcaggttagcaaatcgcacatctccctgacctggacaaaagaacgattcctcgcctcattcgtattcgtatccagagaaaaaaagaagccacaaaagagacgagaggaatatcatgtctgtgcaacttgctgaagtggtgaatgattattaatcaattattataatctccggcctacctctctttcgatcgaactgacgtttgttcgctgctgacttgccgtcgatcgatcatgaacaattcttaagaggagagcgagatcaagtaggtaatcttaagacgtggaatctgcccccctcgagaattaaaaagtcacatctctctctctctcttctttggtcaagaaatatatgcagatggaattgtttgtggatgacttgttggtggtggctgcttagccgtgggcgatcgatgaagcgtacgtatcagtggacatgtgctgcgtgtgacgacggcgtcggttagaacatggaagaagcagcgactcttccactcaacaaatggttggatttatgcattattttttcgaaaaatgcacgggcatatacacatcactacactacacatgtaccccctctttcccatataaaacgaatctaagaccgaatgtagtacgacgaatctgaatatatgtatat

SEQ ID NO: 8373 - DNA, 5550 bp, Oryza sativa
gcaggcatctaggttatgagtaggtatttaaagggtcatttaagaaattattatcagatcagaaccagggttccaaatcctagtggtaactggtaactgttcatttaccagaattaggcatgtcaaagttcctgtggaagcaggcttgcacgtgagaaatcctcaaattcctatggaggtggtcagcaggtcagggatgaactctccacatgggaacccgctgatatggttttaagatttctctaagcgttggtgttagcatacactatgtcggtttatctattccttgtcccgttaccacgcctgaatagaattcaactatgactggctttagttaatttatgtggtgtttcagaagaattcaagaagcagagttttttctctctagtgtgtgtagatctatggtacttgaaaaataaagggaaaacacacacacacacacacacagaaaaaaagaggaaattggaagcattgcactagaatccagagggaataatcaggtagtggcttcctggtgtgttccaggatttgtctgcattctgagatttgggactctggttatatccatagcctttggtctcataatagttatatgttctctctttagaaaacaaaagttttctgtcattgtagtgtcagatggcatacatcttgggttcataacccacttttaatgggtttttgtttgtttgttagtgctagttgagatttatttgaggtgtgcataatgttagcaggagcagagtatatattacagtgctgtttgggagagcttcttccagcataccacaatccctgtcatttaattaacaaaaaccacatatcttttttaagattacgcaattttactggcagtcatagatgcttccttttttttctttgaatagctacaggtataaatctgccttgttcattaatgtactgtctatacaatgttgaaggaacttaaggacgttttaagaactgtgcctgaagttgaagaccttgttggacctgaagatgctgccaagcttttgtctgtgaaagagtaccatggtgtcaatgaagtaaaatcctgtctgcggtcagcttttactaagctaatgacagctagtaaagaagcggtttctgaagcaattacaaaattgatttttcgcctgaatgctgagagcaaggtaaaaatatgaaatcaactagaatggttgtggatatctgcattttcacatgacatcaaatattagaaccttcccatattttatggaaatacaggcttttcattctttggatcttcattttctatgcatttacattatcttacactcttaccagtaaaatgtgccatgaacatttctcttcattatctttccaaatgaaagttaggttctgttctctcctgcttgaaagttatgcggtggttctttcgtatacgatgctaaacctatcagtggttaatgagatgttaaagtgcacagatgatgtttaaatggctttaatgctttgttttaccaatgctatgccatatgcaatgctcttgttaacgaggtcatatctagtactctgacatgcattctccttgtttgagacctctgataaatgtgggactgaacatggggtctaaccccgcagcacatagtgttaaagacgtaacttgcaaaatgacattgttcattgttttccaagttaaaatttattttgtttcaaccgcatggacttgactcttcgagacatggaaacatagtattgattactaggcagtgtcaaagcactgaacagtagaaaatatatatcatgacatttacttttcttacattcatgtgctgtgattgcgttgctatgctacttaattgagttattagttacatgggttgtaattgggaggaaaacaacaaagggggaaggtaaatataattgcacccatgagcagcaattcatgctattgtttttgtttaaatcgtccattttattgaacattgcataaaacaattcctgttttgttatccccattatacaaaacgttcccttaggagttatcatcttccaagtaaccctttctttacagcaatatgaagcataactaactagagtacctttttttaaagagaatttaatgaatacaggtcaagcctgagattctatctgtactgataatgatgtcatgatctattcaggtaaggaccttaaccgagaaagaaaatctagttttgtcgctggagaaacaatacccagaagatgttggtgttctatcagcatttttcttcaattatatcaagctcagtcctggtgaagcactttacattggtgccaatgaaccacatgcatatctatccggggaatgcattgaatgtatggccacttcagataatgttgttcgtgctggtttgacacccaagtacagagatgtgcaaactctttgctctatgctaacatacaaacaggtgagttacagaagtgaaaccatgacaatttctaattttgatcacatgccgagacctaggaaggatgctttcccaaggtctgcagaagttctgagaattcgtcgtcccaggacccaggctacaagccagcactgacatatgtattgtgctatgatgcctatgcatctttgatctttattaaacagtgaataccatagtgaactccacaaagttgtcgcaatgatcatcaaaaatatccttttgcaggtctttccagaaatcttgcggggggttcctgtacagccgtatgtaagaaggtacacccctccgtttgatgagttcgaagttgactgctgctcactaccaccaggcgaactggttgtgatatccccagtgtcaggtccatccgtctacctagtgatggccggggaaggcgagatccaggtagattccatgccaaatggtgaaaagtctaaacaaggtgatgttttcttcgtgccagcatacaccgaggttaagttctctgcctctggtcctgagtgcatgcagctgtacagggctggggtcaatagcagattcttcaattaatttagtgactgctgaaagagttccacacacaattgctgtaggtaaaaggtcagtgcttacaaaatacaagtgaaatgatatgactagttagcaaaagttaccatatgtactgtataggtcaacaaaagaataagtcaggttccttcatatcttgattatttgttcttccaaagaggtctataccatagcgttcctcacgcatccagatccatctgaatggagaggattacagagaataactttcagccattctattctattacattgtagttcagaactaaaatgtgaactggtctcaagctttgacaccgaatatagttggaaatacttacagacatgctccatgtcttttcattgtttgctctgccttctaggctggatgacctgagtcgttttccttttgttttgtctgtggtgatcattggcattgtcgttcacttggacatgccgttgatattggcatcgatccattgcttagtgcatgtcaatttgcactgccagtttgtttgttgtttcctactgctacttgaagtacctggtgttgctttcattcagtgaaagccggttggtccttgcgtagtgcgagaaggcccagtgggcttttggtgtttgtttccaagaagaaaagaaacaaacagcattggattggacgccggagttgcatggcatttgcagaattgcaggtcgttttcctctgcttctcgtggcccgatttggttaagccaaaacggtgtctttgatagcgtggacacgtatgtagtacgtgcagtacaggttggttgggtggatcacggcatatatatagcgtgtggctgtcatctgtgcatgcacgagcttgtagtaacctgttggctgcaggtggccatccatgcatccttccttggcttggatacatccacttcgatcagtcatcagtggcacagccaaacaaacctgcaaaataaaggtctctctccttatcacgtcaattcctagaaccagcgatcattttgtcctgcctgctttcactggcacaatttgcttcctctatcctcatatcccatcttggacatcatcttgtttccttcagaattttcagattatcgctgcattattcatctgtaatgtaatctcgtacggagtattattctcgtttgtcctttgtcgtcatcgtcttcgagagcttagacttgcaaccaaactgccctgctggttggtctctgtaccctgtatggtttagtaattacttggagagtgcagtgctgatgctacactttgaccaagtataatatctggtgctttatcgattcattttttttgtacgtgttgttaaagcaaacgtggggcaattcggccgtcaatcccgtgcggcacgtcaaaggaacacagagagagtttcgcaggcttaagcaacaccagctaagccatctacttacctgtctaatctgtgcaagtgtgcatgcttttcctccctgtcaactctacttaatagttactgacactagtagtaccattgggatcatatcaacggttggtggtgaaggccgcatcaaggaaagaaaagactccaacttttgatccaaactatccaagtatgcattgtcatttcacattggagaagtagtggacttccagtgtgtggttggtattccgtgttggttttttggttgatggctgatgtacatatatgttgtgttgatgttcacttgacaggaaagttcaggtgattcggcctgttgttttccagcatgtgtggaagacggatggatgtcttctttgatcatctctgtggactgtgtggaagatgttaattagtgggtcaccacaagttgctagctgcagaaatggactccatattctggatcatatatacagagtagttgtacatgacaaatcagcatcatatcattgctagtttgccacctgctcaaatttatatgatcagagcttgaagatggttgctaagctagagctttggtaataattaccatggcctagtggaaatcatgcttgtcatggatgtgtagcaatatagcatatgatgggctggagagcatgcacaaagccgagagcttggcatacaagcttgcatgcatcttgggtagcttaaaaaaaacaaaatcttgcatcttttaattgaaggttttgttaagcacaataagtaatccaccctagctacaaattactttaattaattaagttgtgtaaagcatgcaatctggacaacgtagtacgttgaaagttaggccagcagtcaacagccactgtaaagctaatgccggaccaaacgtgcaaaaatatcatacatatgcaagctgattaacaagttaattagtagcatgttttcgcgtaaccggtatggcagcatcatatatatactacgaagtggcatcttgccgggttaattagctcagttcatcaggttcagtgaacgatcaccaagtcgtttgatttgactaggccgcgactatctctgcacagtaggacggatgacttcctttttaactctagcattgacttgcattatccttaggacctttaagcaagtgaaaactaaaagacaagctatcacagatcaaatttgtttgtt

SEQ ID NO: 8374 - DNA, 23182 bp, Oryza sativa
aaaaagcgctttttcagtcgtactcaactctgtagtctctgcttgttttggactttgcttctggatccaaattcacttattgctttacgtagtaatgcatcgcgattatttaatccaagaataatttatgggtttctggtatgtaaaagaaaatagattaagactcggtcagattaatccagctcaaggacgaggttccagaagaacatacagcctatgcaactttccaggtaaaactaagatatattcagacttcaagtggcacatttgtgcatggcatatcttggagtttatacttgttgtctgatcgtacaagtagatgacgcattgacctatgaggctgttatcaattagtctgtacaattaactctggctaacaacctgacgacggggctaagtgtcgttatctttgaagctatacagtggcttctgaccgatggaacctcacgggacacacttgaaacttgatcagcagctagctactccctccatcgtatcctcgtaatataagagattttgaatgattttgaagggatctagattatttatagttgtggatattatgggtaccccatatccatacggcatggttatccgactagtcataggggataacttatatttatgtaatgtgtaacagatcatgacttgggtgttacgtttccttgtatattacggaacggcctaaagtcctggtttgataatattgtgaagtagatttaggaaaccgataccgtattggttaaggtttctatcttgtaatcctgccccccatcctatataaggtgggcaggaggccctctagggggcagatgatacaactagatcgtcagatctataatacacccggcggattcaaatccccaaacaggagtagggtattacctctcattgagagggcctgaacctgtctaaatcctttgtctccgcctccatccacttttaggtctcgtgcgctacccccttttattattgccgaaatcatgtttcgacagttggcgcgccaggtaggggtgcgtcgagtttcttattgacgagtgcgatggaatcaattcaagcgttgagattaatctcaacaagttcgacgacttcaaacgataatcggtttgtcgtttcaatatattattatcagattgatctataatcacatttgatgctctggtattttttttcctcggttacatgtactgccggttggggtgttcgctggttctctgcgggaccaccggtcgagccatcgtcgtcctcacgttgttcgtcgcccattggcagcacgacaccgacaccaggcgtacacgacgacggtgcatgctatgaccatacactggctagagcaagcgtatagattggttctgatcaatctagtgcatgcactgccaagtgccaacgatcattgcatgactggattataggagcaagcaaacaaacctcgcatcactaatatatgcatgcctatagcaagtatatatgtatataggcatctgttttctatggtgctaataaatttttgttgtttgtttcgcatgtaccgccgggagcaacgtgctcaccggccgcctccacgcatgccgccaggcggcaacctcatccccgcgtcggccgcgtttgttgctatcgtcaaccgcgtttcggtcgtcgtgcacatggtcgccgagttttgcggagtttctggttgcttgcaggcctggcctattatgccgccgctgttgggcgtctacgacttcaccgccggcctgcctccgtcgccgccgattggtgcctccgcctacacggctggcctattatgccgccgctgttgggcatctacgacttcaccgccggcctgccttcgccgccgccgactggtgtttccgtctgcacggctggcctattatgccgccgctgttgggcgtctacgacttcaccgccggcctgccttcgccgccgccgactggtgtttccgtctgcacggctggcctattatgccgccgctgttgggcgtctacgacttcaccgccggcctgcctccgtcgccgccgagtggtgcctccgcctacacggctggcctattatgccgccgctgttgggcgtctacgacttcaccgccggcctgcctccgtcgccgccgagtggtgcctccgcctacacggctggcctattatgccgccgttgttggatgtctacgtcctcaccgttggctcaccttcgttgccgtcgactggtgtttccgcttacacggctgacctattatgccgccattagtgggcatcttcgctttcaccgtcgaccgccttcgtcgccgccgactggtgtcttcattgttattgatggacgactttgttcccacattggccacttctgccatcaccaaggggaatattacaaagctaagtcatcatttattttttatatgatatttttccttttcctctgcctcactacaccaattggtcttccattgagtagtgagtcgggggctacagatgttatatcatattttttataatatttatcttgattgcttgcgacataatctgagtacaaaagtacctatcgagttatggagttctatcttcctatgctttccgtttggtttgccaatggatggtttcctttgggccgattcctagcacccgggggctcgttggatggaccgagtaacgcaaggtgctaagtattattcggaataaatcaaaagcatagagatgagataaatttattttctgctcttaataattgcaaaagtacctaagtagtaaattctgatccgtgaaactttgttccattaatgacgaactcatgtcactcatatgcatgtttgggaaatgcctaggccgactcccgatgcttggtggttatgactagtcgggcagagtgtttaaacgtacagagtcatctgctcggggaaatcaaaattgacaagaggagaaatacatatttataaatattttaaaatacttgattttttctcgagtattatatttatatcagatactactcatcctatatgtttgttctgcaggatccagatccagatatgcataaaagggattcatggctttaagcttatctcttacgctccaggaatggatcagtcagaacatcaccaccggctcgcctcgaccgccgccgactggtgtttccgcctgcacggctggcctattatgccgccgttgttgggcgtctacatcttcaccgaccggcttgccttcgccgccgccgactggtgtttccgcctgcacggctggcctttatgccgccgttgttgggcgtctacgtcttcaccgaccggccgcctcgaccgccgccgactggtgtttccgcctgcacgtctggcctattatgccgccgttgttgggcgtctacatcttcaccgaccggcttgccttcgccgccgccgactggtgtttccgcctgcacggctggcctttatgccgccgttgttgggcgtctacgtcttcaccgaccggccgcctcgaccgccgccgactggtgtttccgcctgcacggctggcctattatgtcgccgttgttgggcgtctacgtcttcaccgaccggcttgccttcgccgccgccgactggtgtttccgcctgcacggctggcctttatgccgccgttgttgggcgtctacgtcttcaccgaccggcttgccttcgccgccgccgactggtgtttccgcctgcacggctggcctttatgccgccgttgttgggcgtctacgtcttcactgaccggctgccttgtccgccgccgactggtgcttccgcctgcacggctgacttattatgccgccgttgttgggcgtctacgtcttcaccgaccggccgcctcgaccgccgccgactggtgtttccgcctgcacggctggcctattatgccgctgttgttgggcgtctacgtcttcaccgaccggctgcctcgaccgccgccgactggtgtttccgcctgcacggctggcctattatgctgccgttgttgggcgtctacgtcttcaccgaccggccgcctcgtccgccgccgactggtgtcaccgcctgcacggctggcctgttatgacgccaactgatgctatcttcttcacggctggctacatcgctgtcactactaataggcatcagtatcttcaacacaagctgcctacgtttgccatggctgccgactggtttcttcacttccatggctgcatgattctgccagtgttgattggccttaccatcttcatcgccggtcgtctcgtctgctgctgactagtgccctcgcctctacatttggtttatacagctaccactactgatggacatcatcgtcttccgccgccgactagtgcttttatcttcacaactgcgcgtcttcactaccggtttgcttctgttgccgccgactcgtgttcacttcatcacggcaacacaactttgtcatcatggtggagcgacttcatctttattatcttcggtaccagcaaactctattgctgctacttcacaagttttgctacatcaccaaccatgacgttgttgtgaatctcgacatctcggcatgcgatgccgtgttattttactacaacaagtggctctccaacattcatgatttctacttggacatcttcaacacatatcttcaatcaagcaatgactattcgacgacaagaggctacagttctcgactctatgttcagttgtttcccaactaatcaaagagtcgggggctacacaaatacaaggctcaaaattttgacaaattttatgtcaagctgaagaaatcaattcatcaacccacgagtcaactccaggagtcattatcttcatctttgcttcggagcagacattctacttcaacaacttcaaatatttcggtttagacgagttgggcaacaacatcaactcttcacggttgacctactatgcaaatgctgatgagcgtctttgtcattatcattggttgctacactgctattggctggatcaccgacatcgtcatcttcatcatgtcggttgcgtttgtcgtcgtcaactacacaactttatcgctgagcgccttcatattcattgctggctgacctgactgccgccaactggtttcttcgcctccatggctatgcgacttcagtacttttgattggtatcactatcttcactaccaccaatatttttgccacctctggtgggcaatattctctctatattggttgtcttgtctctatgccaactgcgtcagctaccatcaatgaacaattgtgactacgtgctcaggggcttactagctcaaatacaagtattatatcttcaatttggacttgctccggatacatgcaacatgaattcatgatcatgggtctattttatatgctcaaagactggactatttattattccccgtaagggttatcaactgaatacttgcgccagtcgggattcaattgttacatctattttggagtatcccataagggataaccactcggatcagaagctattcatatgagctacgcttggtctatattacccggaagatttattactcgggagcatgttatatgcgtcatcctttaaagggtgtcgaaggcatatgttttggcctaggcctaatatgtctgcagcccatattttcaggtgtggcctgtcacgttcttttagggacttaggcactttttgcttaggccaaagtgcgcgtgatcaagtgcccaataccttaaaattcttttataccgcagttacttaactttttaggagttggtacaatgcatcttaaaaggtgtcaaacagtaaagctttatatagctgtcccgctgacttttttatatataagtcaaggtgttgtttgggtttttaagcaattgattggatacaatatcattgcttttcgccacgtaagtgtgcatttttattgaccaatattatggcttaggctgattatatattgtggtcattttctaggcggttggtaaatcctttataagtttatttacttggattttataccacatatgccatatatttccaggtgtggtggaaccatgtgtcttctagggacttaagcacatctgttaaagcagtgtgcgcatggcgtatgcccaatactttggaaatttctttattcacaacatacaagcttttttatagctgttttgctatgtgaattttcaataatgtagccaactttaggttacactcatcatattttgcaaagcagtcggtatatcactcggatcatgttattcagggatttacaccgcatatgctacatattaatatcaagttgcttggttaattacgattatcaaaaccacttggttggttggattatttattccttgactatatgcttggtttgttcaattaaccacattgtcaggggctacacctattaggtgcatctagtcgatgcacctgactatatttttcagccctccacagtcttcagatttggtaaaagtactcgggagaccatggcgaagatgattgaagcactcggctttggagtaatctagttcgagagaaggttatcttttcgactgcgaaggtctcaggagctactgtggatattatgggtaccccatacccatacggcatggttatccgactagtcataggggataacttatatttatgtaatatgtaacagatcatgacttgggtgttacgtttccttgtatattacggaacggcctaaactcctggtttgataatattgtaaagtagatttaggaaaccgataccgtattggttaaggtttctatcttgtaatcctgcccctcatcctatataaggtgggcaggaggccctctagggggcagatgagacaactagatcgtcagatctataatacacccggcggattcaaatccccaaacaggagtagggtattacctctcattgagagggcctgaacctgtctaaatcctttgtctccgcatccatccacttttaggtctcgtgcgctacccccttttattattgccgaaatcatgtttcgacaatagtactattacatccctccaaaatctcttatattttaaaacggagggagtactacaatagtagctgaattttgtacttgcaagattatccggcacaagatagaatatattcttgcgagctgaatggatatatatatacgtgatcgactatggagtacacagcataaatacttatattcacttattccgaaaaaaatacttatattcacaattatattcgcgaaagtggtatggtatggtagtatattatgacatggatgcatgatcgatccagccttatagcatatgctacatatgtacgcgcattactacgtggtgggctagatgacctgggtttaaagcctcattctttctaattatttgatattatgtcattccctaatattcgcgttactacgttgcaaatgggtgggcggcatctatattatgaaaattatgctagcttatagataacttcataacacataaaactggttagaagtgaagtgagcgtaactcaacagggttcaagttccagacttgacacggccgttcgtatttatgtctaattattttttcagtggtatgcgacgtacctgttgacataaaggtaaggtgtacgtgtgttttttataaggatcagtgtacgcatgttgtgaacgcttatatttgtgctgtgtttctcgaagaaaaaaatatatcacctgataaaaaataacgcatcatggccattgctacagatattgtaaattgtcgtcattggcactgtaatatagccaactagcatacttatcaaaccagtttggatttaataacctattcttgctcttcagacatcaaatcagagatattacaatattagtacttagtaccagtatttagacttggaggaccagtgaagtacagagtgccaactaaaaatttgaatataaggtaaagagtaaattgcattgccggtacatgaacttgtcagatgggtgtaatttagtgcacgaatttgtaaaatgtttgttttggtgcatgaacttgtctagtacatacggaggaaggcgaaaaagacactacatagctaatcttattgatttagaagtttattaggacactatgtaaacatagttctaagaaggttgttattggacatacacattttcaataaaaaatagaatatgatacagtaatagtagaaaaagattaaaaatccgagcaatgatacaagggttagaaatatatgaaattcatcatttccacgatgaagggtaaagtagagaccaaatttataaataatgcatttcttatgcatactcactacacgtatgtacgtcacattctaatcaacatctcaacttcgtaaaattaacattgacaagttattttggtcctcattcacacgaactagacaagttcgtgtactgaaacaagaattttacaaatttatgtattaaattgcatccacctaataacaagtttgtgtactgccaatgcaatttactctaaagtaaaatttgattgggaaccaaggccccgcttgtcatacattgaatccacccacgtgttttctcccaattgaattgcatagactcgagtatatgtagacattgcaaaagtttctttagacatgctctgataaactggtcaatgtatgcagctagctgcatggaggaatcggaccaacccatgagctaatctgatctgagcgacccttcagaattcagtacagcatcaacctctcgttgtcacttcggactaccggagacaaattccctatagagattacttcggacattctttgaacaatggcatataaaatcgtttttgcaaattgcatggtacactgggatggatgaatcatgaatggatatatgctttggcaaacggcctaaaaattctcttatataaatgtgggatcactctctttctacaagcaattctacctgctacaatggcttagatctacatgcaaaggtccaaagtatcattattaatactcttcatttttaacagaaaggcccagcaacataaaaaaagagtagattttacatacacgttttgtgacacttaacgcttaagtattaaagtttcaaaaaatcgcaatatcaacaaatgggttcacccgcgagatgacatagttctttccttgcatatatttaggatgtaggcatggcgaacttaaattttcgcaaaacatagttctatctaggatgaagctcccaaatctatattctaggtggaacaaccacgtcattttgtaggtggatctgtccgttgataatatagttttgcgaaaatttaatccaaaataaatatagttaagtgccaagtgtaaaaacatgtgtagttttttacaacttggaccataaaatatgtaattctattaaatttactcaaaaagagaaggactagcactcgagtgggcttaatttttttatctgtgagatttatgggctgacacaagtaagcctgtgcagcccaggtagagttcgttttgtgcccagcccaagaaattaacacgaagaattcggactatccaaataagtccgaataagacacggcccgcagattatttacggctcaaatgagtcagaatggattgccccaaatgcaaaattctgtgcatatgcactgccaattaattcacagcaactgtactcctgttcatatcaatcaaaacacaattatttggataaaaaattccgacactatctatctaacctactacttgcactgtccatggttgaattcctgtcttgttttaccggccttcagtggtgaaggagatcgagatggagttcctggagtcgtcctcggcaatgccgcccagcgccgccgcagacgccgacgccctcgtcgtcatcgtgtcggtgccgagcgtggtggccgtgttggcggtggaggcggcggagaacaccgtggtggtggtgctcatccaccggccgacccggccgtggatcgccggcttgccgggcttgggcagcgtgaaggagtcgctggacagcatgaggtggacggtgtacatgtccggccggtccgacaccacggcctggcagcacagcagcccgagctgcacgcacagccgcgcctggtcggcgtcccactccgccatcgccgggtccacgatctccatctgcctcccttcctctgacagcttccatgtctgaataatttccagaaaaaaaaaagattcagtcacaactcacaatgctgctcctggaagataaattttcagaatccagtgttgttatttcagagtacttacgtaattcaggaggtcggttttttcggcgtcgagatgtttatcgatgtttttcctcccgctgacgatctccagcaccagcatcccgaagctgaaaacgtcggttttcgtagacaggtagccgttcatcgcgtactctggagccatgtaaccactgcgacgtatcacttactgtactcacacgcaaccacagagattttgtggacggatcaagtgaataacaacgatgggttctggtgtaattactcactatgtgccggaaatccggaaggtgttgacgtgcgtggcgtcctcgaggaagagccttgccatgccgaaatctgaaatctttgggttcagctgttcgtcgaggagcacgttgcttgccttgatgtctcggtggatgatcttgacgggggattcctcgtggaggtagaggaggcctctcgctaggccgacgattatttggtagcgtttgggccaatccagctgcacgctcttctttctgtctagaggtacataaacaggtatcatacatacagcaggttgcagagcattttctgttttttttttttatgttgtactacctctgtcctaaaatatagtaacttttagtcatatatctggactagtgctaaaagtcattatattaattttggaatggatgtagtactgaatactgatctggttttgtatggattatatatgcagatggaattaagtataggtacatgcgtatctttatgtttaaactggaaattgtaaagaacataattagttatgctttatgtttttttttaacaaaatcatggagcatttcaaactatggtacggagtagctaattgaactttctgtcttttgtttgtccacacagaagtttgtgtgtgtgtgtgtgtggggggggggggggcggtgttcagattactccaaatgacaagaaatcctattcgagaaatggtcaatccaaagacattgggcggcataatggcatacagccatacccgatttgatgtgatatgttgagcctttgagattaagcaaatcgaagtattgcttttgacacagtaaaggtcaatgagaacgtcaaggcagatttttccttacattgactgacaaaaagacttcttgcagattctgtgttctgcttaattgactgaacaactctgtgtgactgtgtctgtgcgaatatatgctttgccacggctaactcatcgttttggtctccttgaaagttgaaaccactaggccacaaacaatggaactccagtagggacttgtttttctaccagaaatgactgtttctacaagcactttccctgaattttgttcagaactaccatagagttttggctattatgatttgtgcaccacaaactctccaacagagtgcctagcttccgaggttagaacctttgtgttttgattaatgataaacagataacagtgattcgttatactactaaaaaaaatgaccaaactgtcagatttagctcacaaattctacccgtaattcagaagcaatctgatggcaattaataattaggacattttgcaacataatacagtagtatgcagatgagagagaggtgtcaccgaagaggaagtggtcgaggctgccatttgggaagtaagggtagacaagcatcttgtgaccggaggaagcgcagcatccgagcagggagaccaggttcctgtgctgcaccttgagcagcagcctcacctcgttcaagaactctctcacaccttgccgtgactccagcgacagcttcttgacggcgatctcctgcccattctcgagcaccccctgaagagagatggtaacaagatcaaccgattttttgtcagttagtagttcattcttcccaagatgtaaaattcctgacaagtaatggtacgtttattatttactactactgctttgctttgcaggagtaaaaatgatgctttggttcgtgcaatgttgagattagaatctcaaaagagaggaaaaaaactaatatcgcatattaatttgacgaaatgatgtctgaaagtagcagagcaggtataatcagttattagtggtgaaaaaaaaaagagagagagccagcaaacagtagaaaagatatttgtccatggaaaagatagtacacccattacccatacatagacagggttagatcaatcatttgtgtcgttttggtaggtgaaaaggacaaaatcagaatggaaagcaaggaatggctttgttgaccaaccaataaaaaaccagtctttgttaatgttaggtgaattccacaagcaaaacagggcaacagcctagcagcaaagcaaagccatggcgaaaggggacgatgagatggcagtaagaaacaagccttgtagacggggccgaatccgccgcggccgaggaggttgtcgtcggagaagccacgggtggcggcctccagcacgggcagctcgatgaagaggctccactgctcctcctccctccccgacgccgccccgccgccgccgccgccgccaccgccgttggcctcacgatcagcgcctcctcctcttccgccgctgctcctcctccacctcccgcaccagccgcacgaccacggcatggcagcagcagagcaaaatagagagaaattaaaacaccaaagcacacgagtacacgacgcagacacgcagaagtgcagtgcagttagctaggtgtgacgtttcaacgacgcgcgcgacccggtggcggggtgcagagctagtttagtgcaggtagtctggtgatttatggaggagacacgtacgtacgtcgtccatgaccgtggggtgtgtttgtatcgcagtgttgcaggcggcaaagccggcaaccgcgtttgcttgcttggtcagtgtccaaatgggacgagagacgactcgtgccttgactttctagtagtactagctagctcccatcgtatcatacgtggccggcggcttttcattccagccagccattaatagaagacgcgcaattgattgacctatcatcgatcagtcgtgctcctcactttactccctccgaaaaaaatactacatctccgtcccatgttacctgtaattttgactttttatatgtaacatttaatcattcgttttatttaaaaaaattggtccaaatataaaaaatgatagtcatacttaaagtacttttatgataaaacaagtaacaaacaaaataaataataattctaaatttttttttgaataggacaaatgattaaatattaaaataaaactcaaagcgacaagtaatatgggatggagatagtactacaaactatactactagtatttcgacagaaagttatctagatttgtcaaccttttatcaatgctctgaacctatgggatataccgcagttgaacatatgcatgaagtattaaatataggctaaaaaaattaattgcatagattgcgacaaatttgcgagaggaatcttttgctaattgctacacgatttgataatgtggtgctacagtaaatatttgttaatgacatattaattaggcttaataaattcgtctcgcagtttatagacgaatcttgtaatttattttattattaaactacgtttaataatttaaatatgtgtccgtataaccacgtgacatggcaacatgatctaaggtcagcggtaattacctaccgccggccgtcgtgatgcctgtgggccctacagcccgtcagcacggcctgtctcggacgatttgcattctatccagcccaacactatttgggccaccgagaattgggcctattttatgggccgtgatgggcgaataggcgggaaggagcccaactctatgggcttcttcgggctccttctacccgagctaatgttattaggccgaaacggcggctctggcttacgttgttgggccgaaactagcgatgaacggaccaagcttgcttagttgttgccggtaacatgttactgctacaagcgatcaatgggacaattatcgcccgtgaattctacctgatgatttatccacgtgctcatcacagccagcagggaaggccagaggcgggatgattaatttgcatggccgacacgtgattgccatataggattaacggggtgaaattaaacgacaaaaatcatccctgatctgttcttccctgttgacaccaaattaatcgatcctttttattacggttaaacaaccaattctgggaggtgatgcgatgatgttctagctagtaagaagagaccaaacaaacagactattgagagttgagactgctaccaaattcatcttatttattggacagcaaccacaacatactagtactacgtactctggtcaccgaaacattccctcacgatccagataaaacaaacacaataaagaaaaaaaacacaataaaggaaaaaaaacatacgtgaccacacgaatgttacacatatgtcactgctactcggcagcaagcaaggcgttaacgctgatcgagcggtcagcgcgtgcgcccctgctcgacgcgtcgctcttattcaccgttggatcgtatgatctgaggctaattaacatgagtagctaattaagctggctggttgtgacacttgggccccgggaagccgtggtagcgatcgaggcagcggaagcgcggcggctgcgactccacctgcacgcacttgccgcagccgccggagcacgacttcaccttgtcctggcagctgcacgtcggcggcatcgaccttgtgcacacggcgtcgtcgcagcatttccacggcctcgacctcaccgcctcctcgccgccgccgccggtgcacttgggcccggggttgacgccccagtaccagtcccggcagacgtagccgccgccgtcggcacgcttgcagtcctcgcaggcggcggcgcagtggtcgacctcgtccaggcacttgtacttgggcggccagatcctgagcggcgactgcttcagcttgtcgcagcagtcccacggcggtgacggccattcgtcgccgccgtcggtggggaggcggatgttgctgttgggggtgacagcggcggaggagatggggatgccggcgaggaggagggctcccagggtgagcgtcagcaggctgccgctcttcatggctgatcgttttttgttctttaagaagttgggtttgagatgcagagtgtgatagtagtgtgtgtatttatagaccaggaaggcagcaacggggcccacgaacgagtccacgagatgtggagaagagcgagcgcgcacgtggcgctgtccccacttgtcagaacacgggaaacacgactgaactagggaaactattctaatcccttaataatgttcctttaaggatgttccctcgtttgctcaaaaaccatataaacggttatgaaaaattctggaaaaaattgacaatattcagacaacacatatatacaactccataaaatcttaagtccaaactcaactcacacatcgagatataaaaaagacaaattcagcgtataaatagtagcgtactgtttatatgtaaatttatctttttttttctcgatgtgtagatcgaatttgatcatgaattttggtgaactagtaggtattattatactctacactgtcaatttttttcagaatttttcataattatttgtatcaaatttaaaagaaaaaggtatacaaggaatatcttctcgagggattagaatccactcccactaaaatatggaattgtggtcgggtctggacttctcggtggatggaaagggcggatggtaacagtaactgcacatgagcttcacgaggatcttggcatcgtgcaacgcatgtgacggtacacgcatgcagttgcctccacgtgcgaaaaagggcactagcctgacgcatctcgctaatcgatgcctagtttattgatgccctctgcagccctggtccctggacggagtaattggtcatgtcatgtcaatgatgtcaagtctgctggctgctgcaccctgcacgctgcggaactcctcagcctcaagccctcaacacgttgctcatctcgatctttcgtccgtcggcctcccgtgtcgtctacgtgggctggacgggcctgagcgctttgggattttgggcttttaagaaaaacaacgagcttgggctcctaatctgattcttggggccttgccgtcagtgggctgcaaagaccggcatttactccatcagttttaaaatataaggatttttgaataatactaactcaaacatttttaattttaactatttatagaaaaaaaaattaaaacatcaatcatataacattgatgttagtataattatcattaaacttttttttatttaaaacatcttacttttataaatattattagttaaaatagtatatcgaagactatgctgaagtttaaaagtgtttatattttgaaacggaggaaatagatcgtacgtaattggtggcatcagctgaactggtgcgtgccagcatcgcacccactgtcgtagtgtagatcatggatatatatacgagatcatagaagtagataattaataactcaccaggcgactgatcagtatatattagcactgtattagtgtattctcgatctcacacttgcagttaatttcgagatgaacatatatatgatcggtactacgtgattccgatccttaataatattagattaattagttaattaatcaagcagcttaattgtgtggatcatatgaatcaagcgtgaggaggaaggaggcccttgtcctggaagctcttgatgcagtcgtcgaacatctgctgcacggagaggaatggcgggaagccgagagccctgatcttggcggtgtccatcttgtgggccctgtcgtctcccttgtggctgccgcactccgcggggatcgggtaccccgggtacctctccctcagcgaccccacgatctccgaccagtgcgccacgtggcacgagcagatgagccgccccgacgccctggcgtcctccatggccaccacgtgggccagcaccgcgtcgtccacgtggacgaaccccaccgtcgtgttcgggtacctggggagctcgccgcggaggagggcgagcacgatcagcgccgtgctcgtcggcgcttgcaacaggatggggcccacgacgaaggacgggttcacggcgaccatgtcgaggccgcgctccttggccagccgccacgcctccctctccgccagcgtcttggcgtaggcgtaccagaggccgtgcgccgcgcagtaggcggcgtcgctccagtgcgactcgttcagcgccgccgccgcgccggcgcggtagcgtacgcaggagcaggaggaggtgacaccacgcggcgcgggcgcggcgacgccctggcgcaggagcgaagctcgttcgacgcgccgcgcacgatcggctccactagccgctgctggacctcctcctcgtcgtcgtcgtcgttcggcttgccgttgttgctgctgctgttgccgaccaccacgacgggggacgccgcgtggaacacgccgtcgacgccgcggacggcgtcgtcgaagctaccctccaccatcaggtcggccttcaccagctgcagccgctcgctcgcgccatcaagctcccataggaaccccaccttggcttcatcctctgcatgcacacatgctcagatctcagacgtgcatacgtcgtgttcgatcatttgcctcaacggcgcaagtgtgcgtgcgtgttacctgggtctctgacggtggcgcggacggtgtggctggcggcgagcagcgcgcggatgaggtgcgacgcgatgaaccccgtcccgccggtgacgcagtactccggcatctctctctctctctctctctatctctagcttactaccgagagcgatctctttatgtcgaaatgacgttaatttattctgaacttggggagctcagcaatcgaaatgttaattatttcttcctttgattatcattttagaagaaagaaactccgttggccggtttgaattaggttggtcatgggaagatcgaggtatagtattactcttttctagagaaggttagtgtgcatgatgagcttgaatttgtaactgcaacttactaaattccaaccttctcttgtagctattccacctgtttcaaaatatatcaaccttataccagaatgtgatacaatgtgcagatttttattgtagtacaatgtactcaagattggtttattatgggacagtgggattagtaacttccaacttgctcatcgtcagtcgatctcgctggattcattaattagcaaatgacacattggctccatcgtttcatttatgcttatgcaagatgtactaattaatgtgttgttagtatactttaggatcgatcaaattaaaccctggttgctcttcgatccatcctcacgatcctgtccaagtaacaagtagatgcaaggcgtagagagggtaagctctaggttcaattctgcaacagcccggttatcatcttggtggttacagctacttgcgtcgtcggcgactgtacattcatcgccattgacgtccttggaggaagaagatgaattgtggcccggatgctttgcaccacgttcgtcgtgagcttcgcttcgcagacggcgacgccgtcgacggtgttcatcatcatgtagcgagggtggatgctctatagtactatccatcagcttggagttccagtggttcatgacctctttgtctgtcctccccggtagcctcccagcgatgagggaccaacttgatatatatgcatcaatattaatttgatcattgcttaattataacaaacggtgaattaatagcggaatattgttgatattgggggaattaattaattacgtacgtaccggttgccgagcaaagcgtgcagcttgaggaggagctcgtcctcttcctcggagaagctcctcctctttctgctccggctaagcggcgacggcggatcaccggccggcaagtgctcggagatgagccgtggtggaggctgcgatgacacctgcagacttgcagagctgcgccgtcgtggacacctcattacacatgtgttagcacaaattacagctagagatcgtcttagctagatcgatcgatcagtagcagtagaagagacaatataattctgcatgcatatgatcagatgtatatatagaaacggggctagttgctgggagatagagaggctttgacttgactggaatggaagtcgatcaggttggtcgagctgaggcgaccggcagctggttggttcagccgggtacgtgttggaacgaacgataatgcggcttgctgcaaggggctcgtgcgcgggcagcagcgagcaagaattcataaaccggccatgaacgcttgctggtagctacaaaccatccattcccggccctgttgctactcccctgcttcgtattgtaaggtgttttagtatttttctaaattaaggtgactttgactaacttttttagttttttgaaaaacacaccaacatttataacgtcaaattattcgttaaaatctaccataaaatatgttgtatttatttgttattgttgtagatattagttatttttcctacgaatgtagttaaagttaaaaaatttcgacttacaaaaccaaaatacgaatactgcatagagcgatacggtgaggattccatatgccagcttcaaatttctgaaatttcaggtacccaaaaactattttgcccgaatttttcacccaaaccagctggtaagtaagcatgcgagaaatgctaatctcaagaggcgcacccgacaggaaactacagtaaattaacagcaagtcaggtgctaactgaactagctacacacgtaaaataaaagggtagttccactttgatcggtagctgtaatagggaagcagtatacctaccaaatcactccacaactgaatgagacttatgctaccaagcggtgcatgtccgcaggtcacacgtggccggccggccattctaatcgaccaaacgtaccacagtagatgcatatgcccgagcatttgctaaaattcagcataaacttctacattcattgctgtaaactgaaatgaaattgtacttccaatggaagggcaaaaagccaggacactgtgcttctgtcttagcaaactcaaactactgatgtgggttacatgttacctctaaatcgtgatgccataagaaatttggcttgtatatgtacatcagctataactaggattccactgcagtgttgttcttgtggaatatgtacaaatgacttcaaaatttggggctcccatcttgccagaactgaattctataaacttttagttgcacaactaaatttgttaaactagttcatgtgtatatagtttctcctgcggtggtgaacaggccgatttcttagaaccacgattttgtgcagggtatagtctaagagagcttttaagatgatcaattccttgtcttctaagagcatttgggttgatacctgccttgtgagctgcgattactccaatggcttcccaatagttctggacatttagctggggagcaaaagggtcaacactgtaagattgctatgatttcttgcataagtatcagaatgagagctttgtaaaattgtcaagacatgtggtacataccgcctctatattgaacttgtcaggggtatcatcaagaactgtttcattttcttgaaccgtaatgattaagggctgcaaaaaaacaattattcatgaggataataaaatccaaatggaaagataaaacatcacttatcactgatatctaccttgttctttgtagcagttctagcaaaggcaatagtaccatctcctccgcaagcatcttttggaagaatcacactatcaacatcactagccactatgcaaccattatccatgtttccattcctcctcatcacatattgaggggcattgcttaacccggcaagcacacaaggtagaaaggtatgtccaatctgttacaaaaaaagatcaatgagaactggtacaaaaagatgatataaaattaacgagcactgcttaatttgacataggacagcactgatctatatgctaggaatggatgtgaacaagtggactaactttaagaaaacatgtaactaccagatagtgaacatttgaaattagcctgatatacaacatttcattgtagggtcattactaagcatatccctgatatttagttaacttagttatgcaccagcatagttcagcagaaagagtagaaacctcttcagcagcagatcttggggacactgacagactgagaactgggggtaaaactgcaggagcatgggcagctgggattttgaatttcttcacaattagatgactgataatcgcttcaactcctgccaacagatcaactccctgcattgatatggcattgaagaaaatacaagattagaaatgatagatgcttggaaatgctgaacaccacccacaaatgataacctcagcatgtctaccgtgatcagtatcaaccattgaattgcatcaatataaaaattcagcgagcaaaatgacaccataaggccaacagctttcaaactacttgaaaagagagtgttgttgcaacttgcaagggacatttcagatggtccaaacagtaaatttgaaaaatcgaagagcatcccataacaaactaaatcaagacaacatggtgtttcaagaattctaagtggcacaactatcagtaacctgttaggaaaaataataaaccagctacttgagcaggcaagtattacctttccttcccgataacaatctgaatcttctggatcatcatctggaaagcgcgcaacaaccgccacagcattcacatcagagcggttcaccagggcctcaactgccctcaggagagaatcagagttcccaacactccctgtagacttcccacattttggatcaaaccatgtcttgatctagaccacaaatgagcaggtcataagtaagcatgaatattacatcaggcactaaattatctttctaactagaggtatcactagatcttaaacgtattctcactcacaggacaaaaaaagaagggatcagaacagaatgagcacctccaaaggagtatcagtcacaatgtactcgactacagggagcccaagagaagccctcgcggcatccgcaacctgcaagtgacggagtcgaagctcctcctcgattccagaatccaacaccaaacctacctaggttgaagcagccacaatgtgtcaatgtatcaacaaaaccgtagctaactagctacctacagttacattatccatggttgtgtctgagcaatctctagaaccactaaattggtagtagtaccttgttctggtgaactggttggagagcccaggatccttcagcgaacctgtcaagggcgtatccctcaacgtagagcgtgttgggcatcggccagtagagcatcgcagcgttcagcacctgtgattatgtgaagacgaaatcttcaaccatggagaagccaaaactaaccctaacagctactggaagttaatacttacattggggtgggagatgacgcagtcggcgacggcaccgagcgcgcgcgccacgggaagcgcatcgccggcgaaacccccgacggcggcgccgactccggtggggaccaccaggacggacgtgtagggcctcctgaagctcgggccccgcgcgctggcagaaggggcgaggcaatgagcccgggagctccgacgagtcggccgcggcggcggcggcgacggccggaggaagggacgggtgaggtggagcgccattgccgcggcgaagcgagggcggggacgcgaacggataaggctgtgactcactgggccgccaaattgggcccaccactcggcccaattatgcactgaatcaagggggcccacctgtcattctcacgtagaaaccaccaaacccttcttcttcccccatctctccgcagccaccggtggagaagattcgcgcggccgctcgcatgtcgtcgccgtcgccggcgttgtgcgccgccgcctcctgctccaccccgcttcgcgttgcgtcgcctgtcgttcgg

SEQ ID NO: 8375 - DNA, 40127 bp, Oryza sativa
tactatctttgtaccaaaatgttagtacaccaagtatagtactccatccgtattttaatgtatgacgccattgactttttaccaacgtttgaccattcgttttattcaaattttctgtgcaaatatgaaaatgtttatgtcatgcttaaagaacatttgatgatgaatcaagtcacaataaaaataaatgataattacataaattttttgaataagacaaatggtcaaacgttagataaaaaatcaattgcgtcatacattaaaatatagagatagtactacagatttggataacccttatccaaattcatacctaatatgtctcattttatattaggcagtaacatttttagacgaaggtagtatctatttctgtgtactagtataaatacaaaggacttatttaactttgtagaaatgttgatttggttattaaataggtgaataatgctattcatttcatacattagccctattaaatgttatttaactagagatgtgtatggtcaatgctcgataaatccaagagagtggagtatttattgccatctaaaaagagattaaggaagttacatattttgaccagggccatgtacatgaccaaaacgttttacttgcaatgcatggcactcatgccaatcaatagcagtaggtacgatgccttctattgactcactctaacgtgtaattattttcgtattattaagagttggatttttaaaatttttatttccttcatataaatacttgcacatattaaaaaaaactcttatctggaaaaatgagttcctttataaaattatactaaaatggcatcatttatacaattatactaccatcctatccatgccatggcaagaaagtgtaaaacccaaaaggataggggaatgtggcttgatctaaactagagtgtggagtgtggaggggcccatttataacggaaggaacagaatgcgcgtcaaccatcaaccgccaccggccggccgttgatcagaatcggacggcgcccacggtgccgttccacgtatctcgctgcctccatctaccggcgccttcgatcgattccggcgatcggcgtcgttttccggccaaacgccatggccggaatcatcatatatatcttcatctcatcactaataactagctgcatttaatttattcctcgctgatgcatttatacgcatgaaacaagatggataagcacgtaccagtactgcgaggagtagatatgtacccaaaatacatgcaactccaaagatagatatacagccacatcttttcgtttatatttatatttatcagctaaaatttaaatttttaagttgattttagggtttcttatcaaagtttattttcttgcatttgattttatatcactgtaaacgcgtatataaaagtttttattaaacaaattatctttcgcttacaaattacacttctactagatgggagtctatatcatcagctggctgcgctgtgtctgatgttggctggcagcagcagtagcaaacacatcacatgatgagatagttgctgattagccagagagtacaccacgcatggtacttgttctcctccctcgattagcaagggtcccttaattagctagtgtcggtgataaactgcttgtcaccttagagtagccagctatcactgcatgctgcacttaaaaaaaaaaaagaaaactgcattctgatcgatctcatgcatgcttaacttgtcggtgaaaatgacagtcaagcaaatgaattgaaagtcgtactctccagctcgtgacgtcttgatttgcacatcacattatatattctcatgctttcgatcaggaaggagtccagcacgcataacgggtgcacaaccgccgcgcattcatgcagcctgcatgcacacaacaatccaatatataccaacagatcgattgtctgacaatccaaactactgctgtcaaaaatgttttatggttaatttgcaattgagctcgatgaacaattcaatccagctttcgaaataatggatttggtcgcgtgagaatgggcaattcaattttggagatctagaactgaataaagccgcatctgtaatccgtccttctcaattcttgatcaggtcttgcgtgcgtgcgtgtgaaagccgttgacatcctactgtatatactagtattcagtaatccaataacttctgtacagcacacgagaatctcttcagggttagttaaagggatattgaaaaagcgctttttcagtcgtactcaactctgtcgtctctgcttgttttggactttgcttctggatccaaattcacttattgctttacgtagtaatgcatcgcgattatttaatccaagaataatttatgggtttctggtatgtaaaagaaaatagattaagactcggtcagattaatccagctcaaggacgaggttccagaagaacatacagcctatgcaactttccaggtaaaactaagatatattcagacttcaagtggcacatttgtgcatggcatatcttggagtttatacttgttgtctgatcgtacaagtagatgacgcattgacctatgaggctgttatcaattagtctgtacaattaactctggctaacaacctgacgacggggctaagtgtcgttatctttgaagctatacagtggcttctgaccgatggaacctcacgggacacacttgaaacttgatcagcagctagctactccctccatcgtatcctcgtaatataagagattttgaatgattttgaagggatctagattatttatagttgtggatattatgggtaccccatatccatacggcatggttatccgactagtcataggggataacttatatttatgtaatgtgtaacagatcatgacttgggtgttacgtttccttgtatattacggaacggcctaaagtcctggtttgataatattgtaaagtagatttaggaaaccgataccgtattggttaaggtttctatcttgtaatcctgccccccatcctatataaggtgggcaggaggccctctagggggcagatgagacaactagatcgtcagatctataatacacccggcggattcaaatccccaaacaggagtagggtattacctctcattgagagggcctgaacctgtctaaatcctttgtctccgcctccatccacttttaggtctcgtgcgctacccccttttattattgccgaaatcatgtttcgacagttggcgcgccaggtaggggtgcgtcgagtttcttattgacgagtgcgatggaatcaattcaagcgttgagattaatctcaacaagttcgacgacttcaaacgataatcggtttgtcgtttcaatatattattatcagattgatctataatcacatttgatgctctggtattttttttcctcggttacatgtactgccggttggggtgttcgctggttctctgcgggaccaccggtcgagccatcgtcgtcctcacgttgttcgtcgcccattggcagcacgacaccgacaccaggcgtacacgacgacggtgcatgctatgaccatacactggctagagcaagcgtatagattggttctgatcaatctagtgcatgcactgccaagtgccaacgatcattgcatgactggattataggagcaagcaaacaaacctcgcatcactaatatatgcatgcctatagcaagtatatatgtatataggcatctgttttctatggtgctaataaatttttgttgtttgtttcgcatgtaccgccgggagcaacgtgctcaccggccgcctccacgcatgccgccaggcggcaacctcatccccgcgtcggccgcgtttgttgctatcgtcaaccgcgtttcggtcgtcgtgcacatggtcgccgagttttgcggagtttctggttgcttgcaggcctggcctattatgccgccgctgttgggcgtctacgacttcaccgccggcctgcctccgtcgccgccgattggtgcctccgcctacacggctggcctattatgccgccgctgttgggcatctacgacttcaccgccggcctgccttcgccgccgccgactggtgtttccgtctgcacggctggcctattatgccgccgctgttgggcgtctacgacttcaccgccggcctgccttcgccgccgccgactggtgtttccgtctgcacggctggcctattatgccgccgctgttgggcgtctacgacttcaccgccggcctgcctccgtcgccgccgagtggtgcctccgcctacacggctggcctattatgccgccgctgttgggcgtctacgacttcaccgccggcctgcctccgtcgccgccgagtggtgcctccgcctacacggctggcctattatgccgccgttgttggatgtctacgtcctcaccgttggctcaccttcgttgccgtcgactggtgtttccgcttacacggctgacctattatgccgccattagtgggcatcttcgctttcaccgtcgaccgccttcgtcgccgccgactggtgtcttcattgttattgatggacgactttgttcccacattggccacttctgccatcaccaaggggaatattacaaagctaagtcatcatttattttttatatgatatttttccttttcctctgcctcactacaccaattggtcttccattgagtagtgagtcgggggctacagatgttatatcatattttttataatatttatcttgattgcttgcgacataatctgagtacaaaagtacctatcgagttatggagttctatcttcctatgctttccgtttggtttgccaatggatggtttcctttgggccgattcctagcacccgggggctcgttggatggaccgagtaacgcaaggtgctaagtattattcggaataaatcaaaagcatagagatgagataaatttattttctgctcttaataattgcaaaagtacctaagtagtaaattctgatccgtgaaactttgttccattaatgacgaactcatgtcactcatatgcatgtttgggaaatgcctaggccgactcccgatgcttggtggttatgactagtcgggcagagtgtttaaacgtacagagtcatctgctcggggaaatcaaaattgacaagaggagaaatacatatttataaatattttaaaatacttgattttttctcgagtattatatttatatcagatactactcatcctatatgtttgttctgcaggatccagatccagatatgcataaaagggattcatggctttaagcttatctcttacgctccaggaatggatcagtcagaacatcaccaccggctcgcctcgaccgccgccgactggtgtttccgcctgcacggctggcctattatgccgccgttgttgggcgtctacatcttcaccgaccggcttgccttcgccgccgccgactggtgtttccgcctgcacggctggcctttatgccgccgttgttgggcgtctacgtcttcaccgaccggccgcttcgtccgccgccgactggtgtctccgcctgcacgtctggcctgttatgacgccaactgatgctatcttcttcacggctggctacatcgctgtcactactaataggcatcagtatcttcaacacaagctgcctacgtttgccatggctgccgactggtttcttcacttccatggctgcatgattctgccagtgttgattggccttaccatcttcatcgccggtcgtctcgtctgctgctgactagtgccctcgcctctacatttggtttatacagctaccactactgatggacatcatcgtcttccgccgccgactagtgcttttatcttcacaactgcgcgtcttcactaccggtttgcttctgttgccgccgactcgtgttcacttcatcacggcaacacaactttgtcatcatggtggagcgacttcatctttattatcttcggtaccagcaaactctattgctgctacttcacaagttttgctacatcaccaaccatgacgttgttgtgaatctcgacatctcggcatgcgatgccgtgttattttactacaacaagtggctctccaacattcatgatttctacttggacatcttcaacacatatcttcaatcaagcaatgactattcgacgacaagaggctacagttctcgactctatgttcagttgtttcccaactaatcaaagagtcgggggctacacaaatacaaggctcaaaattttgacaaattttatgtcaagctgaagaaatcaattcatcaacccacgagtcaactccaggagtcattatcttcatctttgcttcggagcagacattctacttcaacaacttcaaatatttcggtttagacgagttgggcaacaacatcaactcttcacggttgacctactatgcaaatgctgatgagcgtctttgtcattatcattggttgctacactgctattggctggatcaccgacatcgtcatcttcatcatgtcggttgcgtttgtcgtcgtcaactacacaactttatcgctgagcgccttcatattcattgctggctgacctgactgccgccaactggtttcttcgcctccatggctatgcgacttcagtacttttgattggtatcactatcttcactaccaccaatatttttgccacctctggtgggcaatattctctctatattggttgtcttgtctctatgccaactgcgtcagctaccatcaatgaacaattgtgactacgtgctcaggggcttactagctcaaatacaagtattatatcttcaatttggacttgctccggatacatgcaacatgaattcatgatcatgggtctattttatatgctcaaagactggactatttattattccccgtaagggttatcaactgaatacttgcgccagtcgggattcaattgttacatctattttggagtatcccataagggataaccactcggatcagaagctattcatatgagctacgcttggtctatattacccggaagatttattactcgggagcatgttatatgcgtcatcctttaaagggtgtcgaaggcatatgttttggcctaggcctaatatgtctgcagcccatattttcaggtgtggcctgtcacgttcttttagggacttaggcactttttgcttaggccaaagtgcgcgtgatcaagtgcccaataccttaaaattcttttataccgcagttacttaactttttaggagttggtacaatgcatcttaaaaggtgtcaaacagtaaagctttatatagctgtcccgctgacttttttatatataagtcaaggtgttgtttgggtttttaagcaattgattggatacaatatcattgcttttcgccacgtaagtgtgcatttttattgaccaatattatggcttaggctgattatatattgtggtcattttctaggcggttggtaaatcctttataagtttatttacttggattttataccacatatgccatatatttccaggtgtggtggaaccatgtgtcttctagggacttaagcacatctgttaaagcagtgtgcgcatggcgtatgcccaatactttggaaatttctttattcacaacatacaagcttttttatagctgttttgctatgtgaattttcaataatgtagccaactttaggttacactcatcatattttgcaaagcagtcggtatatcactcggatcatgttattcagggatttacaccgcatatgctacatattaatatcaagttgcttggttaattacgattatcaaaaccacttggttggttggattatttattccttgactatatgcttggtttgttcaattaaccacattgtcaggggctacacctattaggtgcatctagtcgatgcacctgactatatttttcagccctccacagtcttcagatttggtaaaagtactcgggagaccatggcgaagatgattgaagcactcggctttggagtaatctagttcgagagaaggttatcttttcgactgcgaaggtctcaggagctactgtggatattatgggtaccccatacccatacggcatggttatccgactagtcataggggataacttatatttatgtaatatgtaacagatcatgacttgggtgttacgtttccttgtatattacggaacggcctaaactcctggtttgataatattgtaaagtagatttaggaaaccgataccgtattggttaaggtttctatcttgtaatcctgcccctcatcctatataaggtgggcaggaggccctctagggggcagatgagacaactagatcgtcagatctataatacacccggcggattcaaatccccaaacaggagtagggtattacctctcattgagagggcctgaacctgtctaaatcctttgtctccgcatccatccacttttaggtctcgtgcgctacccccttttattattgccgaaatcatgtttcgacaatagtactattacatccctccaaaatctcttatattttaaaacggagggagtactacaatagtagctgaattttgtacttgcaagattatccggcacaagatagaatatattcttgcgagctgaatggatatatatatacgtgatcgactatggagtacacagcataaatacttatattcacttattccgaaaaaaatacttatattcacaattatattcgcgaaagtggtatggtatggtagtatattatgacatggatgcatgatcgatccagccttatagcatatgctacatatgtacgcgcattactacgtggtgggctagatgacctgggtttaaagcctcattctttctaattatttgatattatgtcattccctaatattcgcgttactacgttgcaaatgggtgggcggcatctatattatgaaaattatgctagcttatagataacttcataacacataaaactggttagaagtgaagtgagcgtaactcaacagggttcaagttccagacttgacacggccgttcgtatttatgtctaattattttttcagtggtatgcgacgtacctgttgacataaaggtaaggtgtacgtgtgttttttataaggatcagtgtacgcatgttgtgaacgcttatatttgtgctgtgtttctcgaagaaaaaaatatatcacctgataaaaaataacgcatcatggccattgctacagatattgtaaattgtcgtcattggcactgtaatatagccaactagcatacttatcaaaccagtttggatttaataacctattcttgctcttcagacatcaaatcagagatattacaatattagtacttagtaccagtatttagacttggaggaccagtgaagtacagagtgccaactaaaaatttgaatataaggtaaagagtaaattgcattgccggtacatgaacttgtcagatgggtgtaatttagtgcacgaatttgtaaaatgtttgttttggtgcatgaacttgtctagtacatacggaggaaggcgaaaaagacactacatagctaatcttattgatttagaagtttattaggacactatgtaaacatagttctaagaaggttgttattggacatacacattttcaataaaaaatagaatatgatacagtaatagtagaaaaagattaaaaatccgagcaatgatacaagggttagaaatatatgaaattcatcatttccacgatgaagggtaaagtagagaccaaatttataaataatgcatttcttatgcatactcactacacgtatgtacgtcacattctaatcaacatctcaacttcgtaaaattaacattgacaagttattttggtcctcattcacacgaactagacaagttcgtgtactgaaacaagaattttacaaatttatgtattaaattgcatccacctaataacaagtttgtgtactgccaatgcaatttactctaaagtaaaatttgattgggaaccaaggccccgcttgtcatacattgaatccacccacgtgttttctcccaattgaattgcatagactcgagtatatgtagacattgcaaaagtttctttagacatgctctgataaactggtcaatgtatgcagctagctgcatggaggaatcggaccaacccatgagctaatctgatctgagcgacccttcagaattcagtacagcatcaacctctcgttgtcacttcggactaccggagacaaattccctatagagattacttcggacattctttgaacaatggcatataaaatcgtttttgcaaattgcatggtacactgggatggatgaatcatgaatggatatatgctttggcaaacggcctaaaaattctcttatataaatgtgggatcactctctttctacaagcaattctacctgctacaatggcttagatctacatgcaaaggtccaaagtatcattattaatactcttcatttttaacagaaaggcccagcaacataaaaaaagagtagattttacatacacgttttgtgacacttaacgcttaagtattaaagtttcaaaaaatcgcaatatcaacaaatgggttcacccgcgagatgacatagttctttccttgcatatatttaggatgtaggcatggcgaacttaaattttcgcaaaacatagttctatctaggatgaagctcccaaatctatattctaggtggaacaaccacgtcattttgtaggtggatctgtccgttgataatatagttttgcgaaaatttaatccaaaataaatatagttaagtgccaagtgtaaaaacatgtgtagttttttacaacttggaccataaaatatgtaattctattaaatttactcaaaaagagaaggactagcactcgagtgggcttaatttttttatctgtgagatttatgggctgacacaagtaagcctgtgcagcccaggtagagttcgttttgtgcccagcccaagaaattaacacgaagaattcggactatccaaataagtccgaataagacacggcccgcagattatttacggctcaaatgagtcagaatggattgccccaaatgcaaaattctgtgcatatgcactgccaattaattcacagcaactgtactcctgttcatatcaatcaaaacacaattatttggataaaaaattccgacactatctatctaacctactacttgcactgtccatggttgaattcctgtcttgttttaccggccttcagtggtgaaggagatcgagatggagttcctggagtcgtcctcggcaatgccgcccagcgccgccgccgacgccgacgccctcgtcgtcatcgtgtcggtgccgagcgtggtggccgtgttggcggtggaggcggcggaggacgccgtggtggtggtgctcatccaccggccgacccggccgtggatcgccggcttgccgggcttgggcagcgtgaaggagtcgctggacagcatgaggtggacggtgtacatgtccggccggtccgacaccacggcctggcagcacagcagcccgagctgcacgcacagccgcgcctcgtcggcgtcccactccgccatcgccgggtccacgatctccatctgcctcccttcctctgacagcttccatgtctgaataatttccagaaaaaaaaaagattcagtcacaactcacaatgctgctcctggaagataaattttcagaatccagtgttgttatttcagagtacttacgtaattcaggaggtcggttttttcggcgtcgagatgtttatcgatgtttttcctcccgctgacgatctccagcaccagcatcccgaagctgaaaacgtcggttttcgtagacaggtagccgttcatcgcgtactctggagccatgtaaccactgcgacgtatcacttactgtactcacacgcaaccacagagattttgtggacggatcaagtgaataacaacgatgggttctggtgtaattactcactatgtgccggaaatccggaaggtgttgacgtgcgtggcgtcctcgaggaagagccttgccatgccgaaatctgaaatctttgggttcagctgttcgtcgaggagcacgttgcttgccttgatgtctcggtggatgatcttgacgggggattcctcgtggaggtagaggaggcctctcgctaggccgacgattatttggtagcgtttgggccaatccagctgcacgctcttctttctgtctagaggtacataaacaggtatcatacatacagcaggttgcagagcattttctgttttttttttttatgttgtactacctctgtcctaaaatatagtaacttttagtcatatatctggactagtgctaaaagtcattatattaattttggaatggatgtagtactgaatactgatctggttttgtatggattatatatgcagatggaattaagtataggtacatgcgtatctttatgtttaaactggaaattgtaaagaacataattagttatgctttatgtttttttttaacaaaatcatggagcatttcaaactatggtacggagtagctaattgaactttctgtcttttgtttgtccacacagaagtttgtgtgtgtgtgtgtgtggggggggggggggcggtgttcagattactccaaatgacaagaaatcctattcgagaaatggtcaatccaaagacattgggcggcataatggcatacagccatacccgatttgatgtgatatgttgagcctttgagattaagcaaatcgaagtattgcttttgacacagtaaaggtcaatgagaacgtcaaggcagatttttccttacattgactgacaaaaagacttcttgcagattctgtgttctgcttaattgactgaacaactctgtgtgactgtgtctgtgcgaatatatgctttgccacggctaactcatcgttttggtctccttgaaagttgaaaccactaggccacaaacaatggaactccagtagggacttgtttttctaccagaaatgactgtttctacaagcactttccctgaattttgttcagaactaccatagagttttggctattatgatttgtgcaccacaaactctccaacagagtgcctagcttccgaggttagaacctttgtgttttgattaatgataaacagataacagtgattcgttatactactaaaaaaaatgaccaaactgtcagatttagctcacaaattctacccgtaattcagaagcaatctgatggcaattaataattaggacattttgcaacataatacagtagtatgcagatgagagagaggtgtcaccgaagaggaagtggtcgaggctgccatttgggaagtaagggtagacaagcatcttgtgaccggaggaagcgcagcatccgagcagggagaccaggttcctgtgctgcaccttgagcagcagcctcacctcgttcaagaactctctcacaccttgccgtgactccagcgacagcttcttgacggcgatctcctgcccattctcgagcaccccctgaagagagatggtaacaagatcaaccgattttttgtcagttagtagttcattcttcccaagatgtaaaattcctgacaagtaatggtacgtttattatttactactactgctttgctttgcaggagtaaaaatgatgctttggttcgtgcaatgttgagattagaatctcaaaagagaggaaaaaaactaatatcgcatattaatttgacgaaatgatgtctgaaagtagcagagcaggtataatcagttattagtggtgaaaaaaaaaagagagagagccagcaaacagtagaaaagatatttgtccatggaaaagatagtacacccattacccatacatagacagggttagatcaatcatttgtgtcgttttggtaggtgaaaaggacaaaatcagaatggaaagcaaggaatggctttgttgaccaaccaataaaaaaccagtctttgttaatgttaggtgaattccacaagcaaaacagggcaacagcctagcagcaaagcaaagccatggcgaaaggggacgatgagatggcagtaagaaacaagccttgtagacggggccgaatccgccgcggccgaggaggttgtcgtcggagaagccacgggtggcggcctccagcacgggcagctcgatgaagaggctccactgctcctcctccctccccgacgccgccccgccgccgccgccgccgccaccgccgttggcctcacgatcagcgcctcctcctcttccgccgctgctcctcctccacctcccgcaccagccgcacgaccacggcatggcagcagcagagcaaaatagagagaaattaaaacaccaaagcacacgagtacacgacgcagacacgcagaagtgcagtgcagttagctaggtgtgacgtttcaacgacgcgcgcgacccggtggcggggtgcagagctagtttagtgcaggtagtctggtgatttatggaggagacacgtacgtacgtcgtccatgaccgtggggtgtgtttgtatcgcagtgttgcaggcggcaaagccggcaaccgcgtttgcttgcttggtcagtgtccaaatgggacgagagacgactcgtgccttgactttctagtagtactagctagctcccatcgtatcatacgtggccggcggcttttcattccagccagccattaatagaagacgcgcaattgattgacctatcatcgatcagtcgtgctcctcactttactccctccgaaaaaaatactacatctccgtcccatgttacctgtaattttgactttttatatgtaacatttaatcattcgttttatttaaaaaaattggtccaaatataaaaaatgatagtcatacttaaagtacttttatgataaaacaagtaacaaacaaaataaataataattctaaatttttttttgaataggacaaatgattaaatattaaaataaaactcaaagcgacaagtaatatgggatggagatagtactacaaactatactactagtatttcgacagaaagttatctagatttgtcaaccttttatcaatgctctgaacctatgggatataccgcagttgaacatatgcatgaagtattaaatataggctaaaaaaattaattgcatagattgcgacaaatttgcgagaggaatcttttgctaattgctacacgatttgataatgtggtgctacagtaaatatttgttaatgacatattaattaggcttaataaattcgtctcgcagtttatagacgaatcttgtaatttattttattattaaactacgtttaataatttaaatatgtgtccgtataaccacgtgacatggcaacatgatctaaggtcagcggtaattacctaccgccggccgtcgtgatgcctgtgggccctacagcccgtcagcacggcctgtctcggacgatttgcattctatccagcccaacactatttgggccaccgagaattgggcctattttatgggccgtgatgggcgaataggcgggaaggagcccaactctatgggcttcttcgggctccttctacccgagctaatgttattaggccgaaacggcggctctggcttacgttgttgggccgaaactagcgatgaacggaccaagcttgcttagttgttgccggtaacatgttactgctacaagcgatcaatgggacaattatcgcccgtgaattctacctgatgatttatccacgtgctcatcacagccagcagggaaggccagaggcgggatgattaatttgcatggccgacacgtgattgccatataggattaacggggtgaaattaaacgacaaaaatcatccctgatctgttcttccctgttgacaccaaattaatcgatcctttttattacggttaaacaaccaattctgggaggtgatgcgatgatgttctagctagtaagaagagaccaaacaaacagactattgagagttgagactgctaccaaattcatcttatttattggacagcaaccacaacatactagtactacgtactctggtcaccgaaacattccctcacgatccagataaaacaaacacaataaagaaaaaaaacacaataaaggaaaaaaaacatacgtgaccacacgaatgttacacatatgtcactgctactcggcagcaagcaaggcgttaacgctgatcgagcggtcagcgcgtgcgcccctgctcgacgcgtcgctcttattcaccgttggatcgtatgatctgaggctaattaacatgagtagctaattaagctggctggttgtgacacttgggccccgggaagccgtggtagcgatcgaggcagcggaagcgcggcggctgcgactccacctgcacgcacttgccgcagccgccggagcacgacttcaccttgtcctggcagctgcacgtcggcggcatcgaccttgtgcacacggcgtcgtcgcagcatttccacggcctcgacctcaccgcctcctcgccgccgccgccggtgcacttgggcccggggttgacgccccagtaccagtcccggcagacgtagccgccgccgtcggcacgcttgcagtcctcgcaggcggcggcgcagtggtcgacctcgtccaggcacttgtacttgggcggccagatcctgagcggcgactgcttcagcttgtcgcagcagtcccacggcggtgacggccattcgtcgccgccgtcggtggggaggcggatgttgctgttgggggtgacagcggcggaggagatggggatgccggcgaggaggagggctcccagggtgagcgtcagcaggctgccgctcttcatggctgatcgttttttgttctttaagaagttgggtttgagatgcagagtgtgatagtagtgtgtgtatttatagaccaggaaggcagcaacggggcccacgaacgagtccacgagatgtggagaagagcgagcgcgcacgtggcgctgtccccacttgtcagaacacgggaaacacgactgaactagggaaactattctaatcccttaataatgttcccttaaggatgttccctcgtttgctcaaaaaccatataaacggttatgaaaaattctggaaaaaattgacaatattcagacaacacatatatacaactccataaaatcttaagtccaaactcaactcacacatcgagatataaaaaagacaaattcagcgtataaatagtagcgtactgtttatatgtaaatttatctttttttttctcgatgtgtagatcgaatttgatcatgaattttggtgaactagtaggtattattatactctacactgtcaatttttttcagaatttttcataattatttgtatcaaatttaaaagaaaaaggtatacaaggaatatcttctcgagggattagaatccactcccactaaaatatggaattgtggtcgggtctggacttctcggtggatggaaagggcggatggtaacagtaactgcacatgagcttcacgaggatcttggcatcgtgcaacgcatgtgacggtacacgcatgcagttgcctccacgtgcgaaaaagggcactagcctgacgcatctcgctaatcgatgcctagtttattgatgccctctgcagccctggtccctggacggagtaattggtcatgtcatgtcaatgatgtcaagtctgctggctgctgcaccctgcacgctgcggaactcctcagcctcaagccctcaacacgttgctcatctcgatctttcgtccgtcggcctcccgtgtcgtctacgtgggctggacgggcctgagcgctttgggattttgggcttttaagaaaaacaacgagcttgggctcctaatctgattcttggggccttgccgtcagtgggctgcaaagaccggcatttactccatcagttttaaaatataaggatttttgaataatactaactcaaacatttttaattttaactatttatagaaaaaaaaattaaaacatcaatcatataacattgatgttagtataattatcattaaacttttttttatttaaaacatcttacttttataaatattattagttaaaatagtatatcgaagactatgctgaagtttaaaagtgtttatattttgaaacggaggaaatagatcgtacgtaattggtggcatcagctgaactggtgcgtgccagcatcgcacccactgtcgtagtgtagatcatggatatatatacgagatcatagaagtagataattaataactcaccaggcgactgatcagtatatattagcactgtattagtgtattctcgatctcacacttgcagttaatttcgagatgaacatatatatgatcggtactacgtgattccgatccttaataatattagattaattagttaattaatcaagcagcttaattgtgtggatcatatgaatcaagcgtgaggaggaaggaggcccttgtcctggaagctcttgatgcagtcgtcgaacatctgctgcacggagaggaatggcgggaagccgagagccctgatcttggcggtgtccatcttgtgggccctgtcgtctcccttgtggctgccgcactccgcggggatcgggtaccccgggtacctctccctcagcgaccccacgatctccgaccagtgcgccacgtggcacgagcagatgagccgccccgacgccctggcgtcctccatggccaccacgtgggccagcaccgcgtcgtccacgtggacgaaccccaccgtcgtgttcgggtacctggggagctcgccgcggaggagggcgagcacgatcagcgccgtgctcgtcggcgcttgcgacaggatggggcccacgacgaaggacgggttcacggcgaccatgtcgaggccgcgctccttggccagccgccacgcctccctctccgccagcgtcttggcgtaggcgtaccagaggccgtgcgccgcgcagtaggcggcgtcgctccagtgcgactcgttcagcgccgccgccgcgccggcgccgtagcggacgcaggagcaggaggaggtgaacaccacgcggcgcgggcgcggcgacgccctggcgcaggagcggagcacgttcgacgcgccgcgcacgatcggctccactagccgctgctggacctcctcctcgtcgtcgtcgtcgttcggcttgccgttgttgctgctgctgttgccgaccaccacgacgggggacgccgcgtggaacacgccgtcgacgccgcggacggcgtcgtcgaagctaccctccaccatcaggtcggccttcaccagctgcagccgctcgctcgcgccatcaagctcccataggaaccccaccttggcttcatcctctgcatgcacacatgctcagatctcagacgtgcatacgtcgtgttcgatcatttgcctcaacggcgcaagtgtgcgtgcgtgttacctgggtctctgacggtggcgcggacggtgtggctggcggcgagcagcgcgcggatgaggtgcgacgcgatgaaccccgtcccgccggtgacgcagtactccggcatctctctctctctctctctctatctctagcttactaccgagagcgatctctttatgtcgaaatgacgttaatttattctgaacttggggagctcagcaatcgaaatgttaattatttcttcctttgattatcattttagaagaaagaaactccgttggccggtttgaattaggttggtcatgggaagatcgaggtatagtattactcttttctagagaaggttagtgtgcatgatgagcttgaatttgtaactgcaacttactaaattccaaccttctcttgtagctattccacctgtttcaaaatatatcaaccttataccagaatgtgatacaatgtgcagatttttattgtagtacaatgtactcaagattggtttattatgggacagtgggattagtaacttccaacttgctcatcgtcagtcgatctcgctggattcattaattagcaaatgacacattggctccatcgtttcatttatgcttatgcaagatgtactaattaatgtgttgttagtatactttaggatcgatcaaattaaaccctggttgctcttcgatccatcctcacgatcctgtccaagtaacaagtagatgcaaggcgtagagagggtaagctctaggttcaattctgcaacagcccggttatcatcttggtggttacagctacttgcgtcgtcggcgactgtacattcatcgccattgacgtccttggaggaagaagatgaattgtggcccggatgctttgcaccacgttcgtcgtgagcttcgcttcgcagacggcgacgccgtcgacggtgttcatcatcatgtagcgagggtggatgctctatagtactatccatcagcttggagttccagtggttcatgacctctttgtctgtcctccccggtagcctcccagcgatgagggaccaacttgatatatatgcatcaatattaatttgatcattgcttaattataacaaacggtgaattaatagcggaatattgttgatattgggggaattaattaattacgtacgtaccggttgccgagcaaagcgtgcagcttgaggaggagctcgtcctcttcctcggagaagctcctcctctttctgctccggctaagcggcgacggcggatcaccggccggcaagtgctcggagatgagccgtggtggaggctgcgatgacacctgcagacttgcagagctgcgccgtcgtggacacctcattacacatgtgttagcacaaattacagctagagatcgtcttagctagatcgatcgatcagtagcagtagaagagacaatataattctgcatgcatatgatcagatgtatatatagaaacggggctagttgctgggagatagagaggctttgacttgactggaatggaagtcgatcaggttggtcgagctgaggcgaccggcagctggttggttcagccgggtacgtgttggaacgaacgataatgcggcttgctgcaaggggctcgtgcgcgggcagcagcgagcaagaattcataaaccggccatgaacgcttgctggtagctacaaaccatccattcccggccctgttgctactcccctgcttcgtattgtaaggtgttttagtatttttctaaattaaggtgactttgactaacttttttagttttttgaaaaacacaccaacatttataacgtcaaattattcgttaaaatctaccataaaatatgttgtatttatttgttattgttgtagatattagttatttttcctacgaatgtagttaaagttaaaaaatttcgacttacaaaaccaaaatacgaatactgcatagagcgatacggtgaggattccatatgccagcttcaaatttctgaaatttcaggtacccaaaaactattttgcccgaatttttcacccaaaccagctggtaagtaagcatgcgagaaatgctaatctcaagaggcgcacccgacaggaaactacagtaaattaacagcaagtcaggtgctaactgaactagctacacacgtaaaataaaagggtagttccactttgatcggtagctgtaatagggaagcagtatacctaccaaatcactccacaactgaatgagacttatgctaccaagcggtgcatgtccgcaggtcacacgtggccggccggccattctaatcgaccaaacgtaccacagtagatgcatatgcccgagcatttgctaaaattcagcataaacttctacattcattgctgtaaactgaaatgaaattgtacttccaatggaagggcaaaaagccaggacactgtgcttctgtcttagcaaactcaaactactgatgtgggttacatgttacctctaaatcgtgatgccataagaaatttggcttgtatatgtacatcagctataactaggattccactgcagtgttgttcttgtggaatatgtacaaatgacttcaaaatttggggctcccatcttgccagaactgaattctataaacttttagttgcacaactaaatttgttaaactagttcatgtgtatatagtttctcctgcggtggtgaacaggccgatttcttagaaccacgattttgtgcagggtatagtctaagagagcttttaagatgatcaattccttgtcttctaagagcatttgggttgatacctgccttgtgagctgcgattactccaatggcttcccaatagttctggacatttagctggggagcaaaagggtcaacactgtaagattgctatggatttcttgcataagtatcagaatgagagctttgtaaaattgtcaagacatgtggtacataccgcctctatattgaacttgtcaggggtatcatcaagaactgtttcattttcttgaaccgtaatgattaagggctgcaaaaaaacaattattcatgaggataataaaatccaaatggaaagataaaacatcacttatcactgatatctaccttgttctttgtagcagttctagcaaaggcaatagtaccatctcctccgcaagcatcttttggaagaatcacactatcaacatcactagccactatgcaaccattatccatgtttccattcctcctcatcacatattgaggggcattgcttaacccggcaagcacacaaggtagaaaggtatgtccaatctgttacaaaaaaagatcaatgagaactggtacaaaaagatgatataaaattaacgagcactgcttaatttgacataggacagcactgatctatatgctaggaatggatgtgaacaagtggactaactttaagaaaacatgtaactaccagatagtgaacatttgaaattagcctgatatacaacatttcattgtagggtcattactaagcatatccctgatatttagttaacttagttatgcaccagcatagttcagcagaaagagtagaaacctcttcagcagcagatcttggggacactgacagactgagaactgggggtaaaactgcaggagcatgggcagctgggattttgaatttcttcacaattagatgactgataatcgcttcaactcctgccaacagatcaactccctgcattgatatggcattgaagaaaatacaagattagaaatgatagatgcttggaaatgctgaacaccacccacaaatgataacctcagcatgtctaccgtgatcagtatcaaccattgaattgcatcaatataaaaattcagcgagcaaaatgacaccataaggccaacagctttcaaactacttgaaaagagagtgttgttgcaacttgcaagggacatttcagatggtccaaacagtaaatttgaaaaatcgaagagcatcccataacaaactaaatcaagacaacatggtgtttcaagaattctaagtggcacaactatcagtaacctgttaggaaaaataataaaccagctacttgagcaggcaagtattacctttccttcccgataacaatctgaatcttctggatcatcatctggaaagcgcgcaacaaccgccacagcattcacatcagagcggttcaccagggcctcaactgccctcaggagagaatcagagttcccaacactccctgtagacttcccacattttggatcaaaccatgtcttgatctagaccacaaatgagcaggtcataagtaagcatgaatattacatcaggcactaaattatctttctaactagaggtatcactagatcttaaacgtattctcactcacaggacaaaaaaagaagggatcagaacagaatgagcacctccaaaggagtatcagtcacaatgtactcgactacagggagcccaagagaagccctcgcggcatccgcaacctgcaagtgacggagtcgaagctcctcctcgattccagaatccaacaccaaacctacctaggttgaagcagccacaatgtgtcaatgtatcaacaaaaccgtagctaactagctacctacagttacattatccatggttgtgtctgagcaatctctagaaccactaaattggtagtagtaccttgttctggtgaactggttggagagcccaggatccttcagcgaacctgtcaagggcgtatccctcaacgtagagcgtgttgggcatcggccagtagagcatcgcagcgttcagcacctgtgattatgtgaagacgaaatcttcaaccatggagaagccaaaactaaccctaacagctactggaagttaatacttacattggggtgggagatgacgcagtcggcgacggcaccgagcgcgcgcgccacgggaagcgcatcgccggcgaaacccccgacggcggcgccgactccggtggggaccaccaggacggacgtgtagggcctcctgaagctcgggccccgcgcgctggcagaaggggcgaggcaatgagcccgggagctccgacgagtcggccgcggcggcggcggcgacggccggaggaagggacgggtgaggtggagcgccattgccgcggcgaagcgagggcggggacgcgaacggataaggctgtgactcactgggccgccaaattgggcccaccactcggcccaattatgcactgaatcaagggggcccacctgtcattctcacgtagaaaccaccaaacccttcttcttcccccatctctccgcagccaccggtggagaagattcgcgcggccgctcgccatgtcgtcgccgtcgccggcgttgtgcgccgccgcctcctgctccaccccgcttcgcgttgcgtcgcctgtcgttcggttccgccgccccggcgcgcccgcgcccgtcgtatccgcggcgcgcgcgtcgtcggcggcggtcccggccgtctccgacgacctcgtcctccgcatcgcggagcagctggaggactcggtcgcggcctcctcgccgctcctcgacccgctccgctccgcctccgcgctctccctcctctccacgcgctggccaacccgccgctccaacgaggcctaccgcttcaccgacatctcctacctccgctccctccccatctccctcccctcccgggacgcccccgccgtcgcgccgcccgcctccccctacgcctcccacgtccacttctccgatggcgtcctcacctcctcctcgggcgcccacgtctccgccctcgcggacctcccgcctggccacgtccgggaccgtgcggccgccgctctcgccgcctccgcgggattcgccgacaaggacctcttcttcgacttcaacgccgttggcgcgaaggatgtcgtggtcgtgcacgtgccggagggggtaagtatggccgacgacccggtgcacatcatgttcagttacagtggctgcggcgatggtagtatgatgatgtcgaacccgagggttctcgttgtggcggagaagggggcggaggtggccatcattgaggagcactttggtcaggaggacggtgggtgttattgggctaatccggtgatggagatcatcgtggaggaggatgcgaaggtggtgcattcctatgtgcagcagcagtcgtttgcggctgcgcataccaagtggaccgtcgtccagcaggtagacctttcttgtgcattttgaattgctttgcatatagttatgatttgtggatcgatgtcttaaccatagttgttgttcaccttcaatgtgcttgcttgttctgtgagttgagctaggataggataggataaagacaattttggttcaattaggactgcacatggttagaaacatagaattactaagttgataagagtagcagtggcatatgttacaatttatatgtttcaacaatcttatctaaaaacaatattgcaattagaggtagcttccttcttgtttgtgatatttagttttatttatggggtgtcatgagattgtgttattccttctttagtaggatgacagtataacagatcaatgaggaatgcactacacttattttgtagctagaagcttcacatgcagaaatgagatttcttattccttctttagtagggtgacaatataacagatcaatgaggaatgcactatactttctttgtagttagaagcttcatacgcagaaataaacctcctaaagtaaaagggtttcctaacaaactgctgggagtgcattattaccactttgtgctttgatgtttcaattgaatatttacaactgggacatactgtgaaataaatcatctttatttagaacaacaaggcacatacaaaattcctgtattagttggatttaggctttgcttcattttctataaagtttagcttttcacaccatttgtcgtctaagctagcaacctgtggaaccagaaggcctgaaaaccatggtttcagagaaagtttcttactgttggggcataaggtcgtactgagttcctattcattgctgcttcagtggactaggggaaatgatatctaagtgttcaatctgagaagtgaaagatagtgtaattaacttaagaaatcctagctaaggaggaacaagaggttcatcctcagcgatgcaaaagtataacctcatgacacaaaaataaagtgcaggatgagaataatgcgatagcaaggagagatggcagtgacaactcacctaaatgtggttggtggtggaaaccccattagtagaccgtgacttccatgaaggtattaggcagtagaaatccctcaagttctcacctcctgtgcttgtctgttggttttctatggtggctgcactgtgctaggagagtgtatgtatggctatgggctagcgacactaaggttagtggctagttggactgactgacccaattcgacatctttgcattttttttcctttaaatttcgttagacagcttatggtaacttagcactaataatttatttcataaatttatttttttattacactctagaaaggacttgtattggaatgttccatactggaattatcttgggacaaaattgacaaggatgattttacctattattttcagttttcaatgatgaagattaaagcaaggcttacttgagtaggaaataacagtaagttattcttatagttgtctaacattctttgcagaatacatctagcaactatgagtttgttgaggtaagcattggagcaagattgaacaggcacaatctccacgtccagcagttgggccctgagaccaacacacaattgtcaacgttccacttctcagcgcagaataaacagatacatgatcttcatagcaagcttatacttgatcacccaagaggtcgttcacaacagatacatagattgattgcttctggtacagggaatggcatatttgatggaaatatcaaagtgaacaggtatgtgatcagattacttctgtgaagtatttcaactgtattattttgacaaaaagtattactgattttcagccatttttgagccatcagtgcatatatgtagatcttcaagttttttttattaattcaatagtagattttctaactgcttaggatttaaatggtggtggagtactgacatactacatacctgaagtttatattgctttaggatctttatttattagttaaaatgtagtgaagccatctgtaaatatagtgttagagacacacttcctcaattcaagcaacaccaaattcaatacaagagtggctcatccagcggaaggagtagcagttttctactgcaatagtgaaggttttttaggtggaagatggaaaggtacaaaggaggctagaagcttctagaacaaggaaatgaagagaaggggtagaggagtagatcgacgaggagccaaccgacctccagatcgccgccgccaccgtttggcgccttggccaatcgatctgttcgatccccaaatgttgctaacgctgctgctttgtatgctgctcctgctttgcttgggcctcgcttggacatggctaacttggcccatatacagtccaatcgggttcctaacatatagtcttgcatatgtagcagagcaaagctgttcaaatagcaatttttccttatgaaatcaggagattgtgcacaattattgtttgtttcacttctgagcagcttcagtattctgttgatattcatgaagttctgtttatgcatcactatttcctcctgtcctagactcctaatacattgatgtccttgattcacagatatgcacaacaaactgacgcagggcaagaaaccaagtgtcttctcctgtcatcgaaggcacttgttaatgtgaagccaaaccttcagatcattgctgatgatgtcaaatgtacacatggagctgccatcagtggtgaacatgatccaaatgcgatctacttcttgcaagcaagaggcatcgatgctaaaacagcggcggatgccctaaatttcgcctttggagcccatgtgataaaccaaataccattcaagcccatagagaaaaagacattagctcatttcaaagcgttgttggcttcctcaagacaaaacgacgaatgaggccctcattattgttatggagccagttcaacatttttcttttatcaaaatgagaaatatagaaagaacattagaagatttttggtgaaacacgacgagaaacagataactgttttgcaatgtcaagagtgatgttattctagcatgtaaagtcagttaatttgtgaaccacttgttcattacatgttgaatcaagcatgcatgatgcttgtgaggcagattatatatctttgctttacataagactgaagtttctgtcgaccgacaacttatttatcttctgaatgttggtttgcattttacagcacatgagtactctctccatcccaaaaaaaactcaatcgagcagtcacatcctttcctaatacaacgaatctggacagtcatgagaggtcacatcttcgtctatgttaagttttttgtttttttacggagggtttatgatgctgctgcctgtgtatgagaatcgttatgcagacatatgaaaagcgccctaggcacagtgttagcttccagggaatctcatctcagggcatcgaaatatgattgattcgaactaatcaaagttgtgtatgtaattatatattatgtggtactgttgattattaattgcgctgactatgaaccggtgaccaatgatttgtttaccgtacggtctttaatttggttaattcactcctagtcagaatcaacagggcgaccgggtagctgggatcgttcagttcaaaactactcctacaggtatacgtagtgtgtaccagtgtagtgtgtacctacaggtatacgtagtgtccggtttgcttgacctaacaatgtgttcttcacctactaccgggaaattaaatcaaatttagattagattaaattaaattaatctggtcaagaaatgcatatgcatcctacagtggtgcgaaactaggggacgttgcacacagattcataatcatctcccattgccgacttttcgagctcttcttctctgacgttgtgtagctctgatgaatcttccccgagatgcccctacttaattgttcacgtgtgtgcatgcgtagcaagtatgaccaagacaaaactgccgtatattatcagataacttctgtcactaatccagatgtatacggagatcaagaattcaagatatggatccgcgtatgaggaaaaggactgccgtcacttgatgaataaatgttcttattatttttctttttgagtccccacattggaaaaatatgcacggatgttttcatgattaattcgatcatctgtctttatccagcttcggtacctaattatttaggtcaccgataggagtacttgtttttgtttaattacttctatcagttctatgtgtgatgcagaggttgcagtgttgtattcttttattatcgaaaaaatacgcactcgatcccctttatcctcttcctatggagtggaaacaagttattgtataagcatgtattctcactaggcaattatattagaatagttaggcactgtcctttttagatccttctttttagatttttttccctcagatttttgtcataaattatttgctcatgcttctaaattacgatttttttttctgaaaaacattctttcactaattagactccttattctaagctatttgcgaagttaattttccaaaatattaatgtattgtgttagtaaataaacagcccatgtcaataattgtttaaaaggacggtctcaaacatggtcagatggtccaagagtagttagtgaaccttggtggagtatttactactaatggttacaaataagtgatgttttgaaaaataacatatcaccactaaactagtttgattatttaatcagtactataaaaaccatgcaaaatatagcaaagttatattattaattatcaaactattttttaaaacaaatctagccatattattttcaaaaaagatgaatgaaaatatttaaaaatatatttattgccaaagttttaatgcattgattgcgcacattctaaaatgccgcttagttgtggcaggaatgagtacgtatcgatgaagtctttcacaaagataaaaaaaaagagagagagagatggatttaaattaggaatgattatgattgattgagataaaaaggtaggtaaataaattaactgaaatgatagttttgattggttgagaggaatgatagttttaaacactagtaaactttattatattttaggatggataaaataaccttatgagatggtggaaatttgcagtattggtctcatgggtcagccagaagatggtacatgattggtgacaattgttttattctggcaatgggtaactaatcgcacattaaggctaggaatcttccaagcatcaatctagcatactcaaggacaacgatcgaattggaaccattttggtgctgattcctgagccatgcacgtgatttctcgatcgggatacaagattattcagagcacggtgtcaggggcactctcacttcatatataattatctaagggtgtgtttagttcacactaaaattggaagtttggttaaaattgaaatgatgagacggaaaagttagaagtttatgtgtgtaggaaagtttggatgtgatggaaaagttgaaagtttgaaaaaaaatttggaactaaacacggtgtaacactaattttctttttgttgttcggtagtgtaaaggaggagcggcggataccacgatgttgctctaaaataccatatcaatctattttttaaatttataataattaaaactcaattaatcatacgttaataccatcttattttacgtaaaacacttaacattcatatttatctcatatttataggagaagagaacaccaccttacttctagtaaatcgtaggatttgcatcgattcatcggccgtgtgcttcctcataaacatttgtaaattgtttagtaaaaattagagttaataaaaaaattatctttcaatcgtattaatggtcaaatatataagattccctcttaaaaacacctgactaaaaacaatgtagcatgatttttgtgcattataatcaatattttagaaacgtttatgttgtgatacaaattttaatcctagaaaagcttatatttgaaggagaagttgattatttttaatcacggagggagtaagtatacgatcaatgtgatttgtcaagtgtacacagtacgatcgatgagtgaccgtaaatatataatgcttgccgtacgaggaaacgacagccaatattaggacaaattataagtaaacaatgattaattatgttgttaattataagaaactgttcaaaaggaccagctagcagctgaatatctctgttcaagtgttgactagctacatatataatcttgcagaacttaattaactagttggtcgtgcagagaggtagctctagatttaaaatggactgtgtgtagaagcttgcaagcaactagctaaaatcacatcagcaactaatttctactagtttaattaggttgatgtgttgcccaaaatcaaaaaattattcagccaattaacgtcgtcgatccatgtcactgacctgcacgtttaattatagccatttacttgttcaaactagtaaaattaatcctataaatagcagccctcccagagattgccaagagcatcgatcagtcgatcagctaatctctttctcctttaattcattatcctttgcatgcccctctccagctagctaaggtgacaaaaactgacatcactgcttgattagctacttaattacttatttcgtcttaaaatatagttatgtttattttcaattagctacgaatctaaatagtactgacattgctgcacgatatggccagaaacttagaatgcaatcaactattgtaaaatgtatactgatttttgtcttgttgattgcgtgcagatgagtccgaggattcagcagctggccgctgtgttgttggcggctgttgtcgtcgtcgcagccgccagggatgaacctgcagcagcaaaaaattaccaaactcaatgggatacagtaatgtcaatacttaactgtaagagtgattctttaatcccaagctacatctgcagcgtgattagcaaaagtcgctggggttgggcgtcagatgaccccaacgacgacgagtacacaccaccggatcatccgctgccggcgccggcggcggggcggcggcggtggccggtgatgacgagcttgaacctgacaaagtacgtggactcgctgccgcggattgccaagatccggggctacggcatccgccatggccgtccagtgcccatcaagctcaccatcggcatgtacagcaagacatgggtacgtacgttgtgattacgggaaaatatatatctaatatccagaccaacgtatatagtgaagacatgtaaactaccattaaattaagaaaaatatatacgcttgagatttatccatattatcataagtaaaactgttattcatgattaaatctgggagtaaaaatttcaattttggtgtcatgaacaaatcttagatatttatttttagatccaacaatatactaccttcattttttattagatgatatatatgacttttgaaattatgtttgactatttgtcttattactaaaaaataataaataatgtaaatatgctaaaatttaccggtaagaaaataaaaaaggactacctatatatgtgaaagtttcatataaattatattatatactccctctatttcagttatatactccctctatttcagttataagacattttgactttgagtcaaagtgctctaagtttgattaagcttgtaaaaatagcaataacattttcaacccaagacaattttattatgaaaatatattcaattattgatttgataaaaactagtttagtattattaatattactatatttgtctatgaacttaaataaatttgaaacagtttaattttgaccaaagtcagtacatctatagaagttacaatgtagctatattatacggttaaatatatttatgtctatcgaactttcaagaaaaaaaaagaactttcaagaaaaaaaatatcaataaacatgtagcaaaatcgaaaaataatttcaaaatgggatgcttgcgcatgcagcaattccaccgcgacatgccaccgacgccggtgttcgtgtacgggcaatcgctgcagacagcgacgttcccggggcccaccatcgtggcgcggcagggcgtgccgctcgccgtggagtggcagaaccacctccccgacgcccacatcctcccgtgggaccccaaggtccccaccgccatccccaagaagggcggcgtccccaccgtcgttcacctccacggcggcgcccacccgccggagttcgacggccacgccttcgcctggttcacccgcgacttcgccgagaacggcagcacatggacgcggaagacctacacctaccccaacgtgcaggcgccgggcaacctctggtaccacgaccacgccctcggcctcacccgcgtcagcctcctcgccggcctcctcgccgcctacgtcatcgagaagcccgagctcgaggaccccatgaacctcccctgcggcgaccacgacctccacctcgtcatcgccgaccgcgagttctacaccaatggctccatctccatcgaccgggagtggaagccggagtacttcggcctcgtcatcaccgtcaacggcaaggcgtggccgtacctcagcgtccagcgccgccgctaccgcctccgcatcctcaacgccagcaacgccagatacttcaacgtcacgctctccaatggcgccctccccttcaccgtcattggctccgactcctcctacctctccaggccggtcaccgtctccaacctcgtcctctcgccggccgagatcttcgacgtcatcgtcgacttctcccggttgccggcggcgatgaccgagatcgagatgctcaacacggcgccctacccgttccccaacggccctaatgtgacggacccgaacctcgacgggaaggtgatgctgttcaaggtcgccggcaaggggaaggtcgacgacatgccggacaaatccaaggtgccggagcacggcgtgccgtacgcgagcgtggcggcgctcccgccgccgacgacgacgaggtacatcgtcctgtacgagaaccagaccgcgccggggaacctctacatcaacggcctccggctggaggacccggtgacggagacgcccaagtccggcacgacggagctgtggcaggtgatcaacctcaccggcgacaaccacccgctgcacctccacattgccacgttccaggccatcaagatgacgaagatcgagggattccaggtgttcaaggactgcatgatcaaaaacaacaacaccgccacgtgcaacctcgaccagcacgccgtcgggcccgtcgtgccggtgccggaggaggagaagacgtggaagaacgcggtgaagattccgccggagttcatgacgtcggtggtggtggcgttcaggcttgtcgaggccaatcagccctaccccttcgacgccaccaccgagccgggattcgtctaccactgccacgtaagcgccacgtcatatgctcgacgtgcccgttcgttatcgtgttcattgatcagttgctccatttctaatttattttgactgtgcagatcctggatcacgaagacaacgccatgatcaggcctctgaagctgcttccatgaacaagaaacgtagtgctgatcgatgagaatatgagatgaagaagcttcttcactaggattaataattctgagcatttacgtttgagtgaaagttgtttatgttatgttatccaagtctttgtttatgagtgaaagtttgctagtcataaactggtgcgctctgacggggtatctgtgctacggacttaatttgggtttgtactttattggaagttatatatgaattatgttgttgattgttgaagtacactgtacaaaataatatagcttatttcaggaaataaattttaatccttcaagggatgttcccaattgcatgtcatttaaatagtcataatttatttctaaaaaaaataaagataagatagagattggtatgtaacatataactccacaaacatgcaagtttaaatttaactataataacgaattaaactataagttttaacaaaaaaaaataatgaatttaactataattgatttgtatacatgttctcaccgtcgtatttatttattttcgctgtaacttatagatggatgatatgcaaagaaatgagaggacgtctcctcgagactaatagagtttgccttatttgcaagaactactatataaaacatggcatgtgatttagcgtaagtatggtgcctcacaagtcacaaccacgcactccccctctcctatcctcttgatgtagaaaaaaaaagggataattgatcattttattctattcttaaggttatctaccaatctgcccctattttcttaagtttaatcatttatcgtctgaccttgtttttattaaccgttaggtttttgtttaggaaaaaactagctcaaactgaccaaaatgcccttaattacacatcaaccatatccccaactttctcatccagtcccgaccgaattcatctcggtggcatgactgagttagcgctagggttttcatcactgacatgaagggagctgtggtaggctagggcggaaggagtggtggtggtggcgcttggatgttgctgcagtgtactgcgggagggagcagtggctgggccgcgtcatcacgcacacctggcaacttgatgggtggccgggtgaccttgaggggtggcccagtacgtgatgacgcgtgaccctcagctaggtaacaccgctaagcacatttcataacaaaacttggcatgcatagcttcacattgtagtaattaattgattttatcggctcaaaaattgtgtggggttctaaccaatacgtttttttttatgacatgttattgatggcgaatttgttgagataagaaatgatgagcaattgcacaagtggtttgccctcaacatagctcatggagtagtgcacatcgaagcccaagttgatggttatttataggggtgaaaacggtaacggtaattaccggccgaccggcgttcgttttcgactttctaccggccgggccatatggaaatggtaatcgaccgaaacaaaaatggaaatggtaaaaatatggaaatgaaaacggaaatggttttgctgttataccgatcgtttccgtatttaccgtattctcgcggaaattaccatttcttataatatgataattaccgtattctaaatatgtcgatattataggacatgtctatacttgacccacagcttatagattgaatgactcttcaataaaatctctaacttttgtacatggctaaaatgaagttaatttataatttatatagtataagcttgaatttatgtatatatatataacatacttatgtaaagttaaatatatgtttttatagtttaatgtttccgtatttgttatcggtttccgatctgtaccgacatgtttccgtccgtattgttccgtttccggttttccgatatttccgatatcgttttcgtttccgactttaccgtttccgatttcgtttccgagaaaaatatggttacggaaatggttgaggctgttttccgatcgtttctgaccgttttcatccctagttatttatgtccattgcaatgctcacccacaaaatgatgggtccatcctaatttcaaaaatggtacgtatccaattgcaaagtacaagtaatccacttatatctttgtgttcttctattgatctaaacccaatccatgaaagatgcatgaatcctatttagcatatatgcactagcaagagaagtagcacacaccatatccaatctccttctccttctcttactagaaaattttcaattcaagattgtaaacctttaatctcatatacgaaaaattttaacttagatttgaaaactttcaagtcaaatcgatctttcaattcagatatgaaaacttccaactcaaatttgaaaactttcaaatcaaatttgaaaattttaaattctgatttaaaagtttttaaaatttgagttgagaattttgaattttttagatgaatgttttgaaatttgagttcaaaattcgagtcgaaagttttcaatatattgttatgaaatttgaggtaaaagattcaaactctaaaatacattagaaaaattcacataaaaataatcaacgttgtacgatgtagatgcgtccgtaatggagatggtgcgtataccaaataggtggccccctaaaagatgtggtagatccacagatagcaaaggctaatcttaccaaaaaaaaaacaatacaaaaaaaacaaaaggaaaaggatgagctataattatgaggcactaggaatttaatatgtagaggcaggagtgtacgcagttttattttatcataaaaaaattatttcgcaatcgatccactatatccttgtttatttgtataaagcatgtgttctcatgaggcagttatattctcatcatctggtgctgattcctgagcaatgcacgtgatttctcgatcggggatacttagattactgcgcattaccaggggcgcatggtttcaactttcaacctagctcatcgcttaaagaaagtgacacgctcactttcttcataattaattatctgacactaattgtcttggttgccttagggttctttcattatttgtagattcatgtgtatcacaagcatccggactattatcttcctcctgagcattgggccttggctgttcctaggaaagcaagccggagggagagatattgttcgttgagaaagaggatgaaaagaggacaaaatctttacctcgtttttattgatagagcaggggtttgaggaagacggtgaagactggctgagagtagagagcagggtttacctttttcgctttgcaatttaaaaccactcctcaccgcgttaccaacaactctcggccagcttagtaaaaaggctaaaaccaataattgacttttacaaaccggtcaccgacagtttcaaaaaattgagcggttaatttcttaaaagaaaaaaaaaagatcggttttgttaactcagatatagagagaagcaggcctttcaaaggactgttggatgatatcaacgttagataccaggatgttgatttaattatagcaaaggtttccttttagtatctcagatatcaaattttaaatttcaattgtttggctgaaaatatatggatttccatgcattgaaatccatattaaaaaatacttatatatgcgaataaaacttaaaatccggaaaaacttttttttaacatgaaggaagaagtaaatgtatgtcacatgggcggagtacgatggatgtgtgtgtgactgtaattatgtagtattatttcctgccgtacgaggaaacagccaagattaggacaaactatatataagtaaacagtgattgattaagaaactgttcaaaaggaccagctagcagctgctgaatatctatgttcaagtgttgactatatataatctcgcagagcttaattaattaactagctagctagttgggtcatgcagaggaagctctctggatttaaaatgttgtgtgtagaaactcgcatccaatttctctacttagtttaggttgatgtgttggccaaatccaacaaattattcggccaattagcgtcgatgcatgcatgtcactgacctgcacgattaattgaccgtttacctgttcaaactacagtaataataatcctataaatagcaaccctctcagattgccaagagcatcagtcgtgtggctcgtgtgtgttagccacacgctcacacatcgatcgtcattgtcttagctagctaatctttctttctcctcggttaattatcctttgcatgcccctctccaagctcggacgctgctagctaaggtgagaaactgagacattaattacgacattgctgcatgatatggttagagattaacttagaacacaatcaaactattgtaaatgaatgaactgatgtttgtattgttgattattgcgtacgtgtgcagatgggtccgaggattcagcagctggccgctatgttgctggcggctgtcgtcgtcgtcgcagccgccagggatgaacctgcagcagcaaaaaactaccaaactcagtgggatacagtgatgtcaatacttaactgtaagagtgattcgttgatccctagctacatctgcagcgtgatcagcaaaagtcgctggggttgggcgtcagatgaccccgacgactacacgccggcggcagatccgtcgccgacggcggcgaggccgttgaggagcacggcggacctacccaagtacgtggacccgctgccgcagatggccaggatccagggctacggcatcaaccagttcggctttcccgtgcccaccaacctcaccatcggcatgtacaacaagacctgggtacgttaattaattactcgcaaataaatatctaagtaggttttagtatattattaaaaaaagtactgttagatattcatggtcaagcctcgttttttttttgaacgaatgtcaagcctcgtttttgaacagtgaaacaacaaaaagtgtacaatacagtttaaatttaagttgaaatgttaaacaaatcgtttgcaatgtggggatcgtctagagtcgacctgcaggcatg

SEQ ID NO: 8376 - DNA, 5433 bp, Oryza sativa
tatacgtgtggctggtagctgggcacatcggggctgttaacagcggccgggtcaacaacgacggggcggggcgggggcggccgccggggaggacgaggcgcttggacagcttgaggtcgtcctccaccgcccttgcgaagtcctcatccatcgccgccgccatccttcgtctggctggaggaggagaggagttggaggaggggaggacgaggtgtctccgtcaagcctcctcctcctcaagacccgcgccatcgacgcccgccgacctcgcgccggccgctggccctacgcccgttggcttcgcggccgccggttcacctcgtcgaaggctagagagggagaagaagaaaaggggagggctaacgggtggggtccacgttgctttccacgcggacatgccacgatggcaagccacgtgaacaaaagtggcaaatagtcaagaaatcacctctctgcagtggtaaaatattaagcgtgaatctaaaagaggcatttggataattaccaaacttaaaattggcaaataccgggaaaaagtggttgggggcaatacgaggagaaacttgaatgtgagttagattaggtagctaatactttagattacctacactgcgaaaataaattaaaatggttgcgtcccttatataatatggggacgaggtagtaaatccgtaatatatgagcttggctactactttcaacggcaagtaaccatagcggcacaccatcaatagcatattaggtaagatgataaccaaccaacaaccatatgttacgatttaatccctccatccataaaagttttgtcaccaaaactaaagaaaaattaaatcattttggatattataaaatcaaaagtgaatttaaatatgcagccaataagtatttagattactccttgagttctaattaaatatttaatttatctaattaaaatcaaaaagtgaatgcaaatatgcaattaataagtatttagatgactcctctcattggagctcattgtgactccctttgttttatattataaaattattttaacatttttttaatcgaactttttaaagtttgatcatgtacgtagaacaacatttccaagacagaatacatatattatcaaaatatatttaatattatatttaattaaactaatagtattttgttgctgatgttgctaattatttttatagatttagtttatctaggaaaaaaatgatcaaaacgactagtttaaaaagagcaatatctattccacattccaaaatatatttaatattatatttaattaaactaatagtattttgttgctgatgttgctgattatttttatagatttagtttatctaggaaaaaaataatcaaaacgactagtttaaaaagagcaatatctattccacattccaatggccccaaactcttaaaatatcggccatcctctttattaaaagagactactcgattgttggaattgaataagcctcccattcccatcgtatgggatggacgaaaattgaactgataaataaatctttcaataccgacaaataacaaagttgtcacgagcccgatccatttcataactgtcaaccgcaaaatgctgggaatactgcattccacctttctacagcctggacagagaattccgaatgttgatagcaagccccactttgaatgatcactgatcagggatgacatgctgatcaaggaaggtataccacgtcaagtgtgatcgaaagcaagcaggcaaagaatgcaaagaaggggcatttggaattgcagcaatttgcaatctgggaattgagatgccaccacatcatcagctactccagctagctaacctcgtcaacacattgttggctacgcactcgacattgattcctgtaccacgcaacaattactaccaagtaatctaggggaaaaaaccaaagatgaatccgatcgatcacttggcggcgtaattgggtatctcgtagatttggtggatcctccaaatgtcgtcgtcgaaggccatctcggcgtcgccgcgggcgccgaggcagcggaagtcctcctccacgaaggggaaccaccccagcagcttctcctcctccaccccgaacgtccaccacgacaacccgttgctgagcccgccgtcgaggtcccactcgacggtggtcgccgccccggcctcgtatcccgcgccgccgccgccgccgccacacacgtcgggcacggtgggcgccatgtccgctccggaggagcaggaggaggacgccgcggatgtcactgccgcccccgcccccacagacgacgacgacgactcgcgcgccgccgccgccgccgccgccttcttggctgccgccgacgccgccttgggctgcctcggctgcttcgccctccgctgcggcttcgggttggcgttcccggccgcgccgccgccgtcctgcccctcctggagcttcggctgctgcgctctcgtccgcttcatgcctcctcttcagcgcgcggcgcggcgcggcgaggcgaggtgaggagaagaggggagtgacggggtgtgagcagtgagagtgggagtgttttggcagcgaggcggccgcctcttcgcgcttttgtagtgtactccagcatcgagtggctcggctggtttggcgcgccgccgtcgccgcgcgcgcgcgcagccggtatgtgcggaccaggtcgcgtcgcctcctctgtcctggcgtgcggtgtatcgggccaggtccgagtcgtgacgggagcccgtgcggcgaggcaacttgcaaccggtaaacgcaccaatcacacaacgttgtaggtaaccgctttttttttcccttcagatagtgaaaattaacgagttaattaattgatgaagcgcacgaggttgtactgtagacagggaaacgagcagcagtagtaatcctcctgatattttgttgggtgcagtcgtgctgtgcagcgtaccgggccagggtgtgtggctttggcagttttttttttccacgatatgtgcgcgtagcaacggccagtgatggagggacggctcacgtggaaacccccggaaacttggggaggttgggcgtcgacgagggcgtgcgcctgtctgtctgcgtacgcaaaatcgcatgccgacatcgtgaaccactcctttgtacaactattagcttccaaagctctccaatctctacttttcatggtattactagtgttttttagtctcgtgtttttttactactactacagacggagtatgcgtatacttgacgtgcatcgatcgtgtggttgacagatattttacgtgtatactagtggtgatagcggcattgtatatttgtatcgtggcacaagggacgggaggagaaagtgtgtgttagccgtatctcagtcgagaaagcgatggattaagggtcatttaagggccgacaggggcgtggccatatgtcggcaaagaggcgtgagtaatggctcgcagatccacgggacccaacaccttgccaacttgacgccgctcgagtcgtaataatacgagtatttttatgcaggaacatgcataatactcctacaatgcgttgcacggacgggacggcacgccactctgccagaacaaccagatttgacgagaggaggctcgtgccttgcctcgtggtcggccgggtcctgcgccgagaggaggaggcgctgcacgtctgcacctgcccgtgttcgctcgtctcaccgcccacgtttggccgtctgacgtgacgggatatactcctacagtcctactccacaacgtgatggaacaagatactagtactcgggctaatactggagtactagtagtgtatagtacagtactatttgatactgtacgtacgtacgagtatctcaaagtaccctcacaagtctcaaatctcacttatggagccacctaggagtagttagcagcctggcaggcaatactagtatctgactgggccgtgtctggtttgggacgagacgaccacgcagatgctgatctgcagcaattttgacaaacgggccggatttatatggccggcacataggccttaatctgaatgggccggcccaccattactcattgggttttgtttgaccttaccgggctgtgccctcaactgcaattctgcaaagaagacgacaatccaaagacgcatgaaggcggcatcagaacgccgatacaggtggcttccaaaaaaaaaaaagaaaaaaaaaagaacgccgatacaagtgacgcatgtctatggtcagctcgtgcagtaagacgttaagtctcacagcgagtgtaaccttcgtggtactggttgctataagtttagaatcataaacatgcaaattgctgaacaacgagatctcaaaatcttggatagatttgagttggtggccgaagagtttaggtttggacagtctcggctataactttcttattagtctagcggcaaccggtcacgctcagtagagatcgattcggtgttaatcttctccttgattatacgtaggcgttatcggtgcatagtgttaatcttcttttctagctattgtcttacatgacaatagttttataattttttctactctatttaatgaatcatcgctatgtttgattatgaccgttaaaaaaggagatgccaatgacactactgtgacagcatcccagctacagcactccggtggatcttaagatatactccctccttccaaaaacctaagaactatttcattctttggtttctccaaaaatctaagtcctatttatagtcactatgtgctaaattaaatgttgatcgaaaaccaagaagccactctagtgcttattggttgtatgttcattggttttgccacatggtgagtgagttaattacttcttggtattgatgcagaaagaaataggtcttggatttttggaaggtgggagtagtagtatactccctccgtacctataaaggaagtcgttttggacagcgacacggtctccaaaacacaactttgacttcttgtttttataaaaatatttattgaaaagtgatgtatgtatacttttatgaaaatattttttaagacaaatctattcatataatttttacattttcaaacttaacaacttgagagttattcatgatttatattccccatgtttgacttaagcattgtcctaaatgatttcctttacgagtatatagggagtatatgttagtggtcacgcttagcttttcttcctgtcgccaaaagctaacacggtcaaatcgattcacacactgtagcagatagtatagtaaaaatgcatgctacatgattcatgtaaaacacacagaaacgcaaaagggaaaaaaggaagttcggatcagcactgctactgcatgctgggggatggccaccacgggctgcacgtttcgaccggccggcgtcttgcgtccctttcgcttcatgtgatttggtgcccgaaaacattcgacttgt

SEQ ID NO: 8377 - DNA, 13918 bp, Oryza sativa
ataaggcatgcgttcatatgcaattgactatgattttttctgcattcatgtagtatgcaattgactagaacttcatctccattaaattattattttttaaaatcttctactcttaaaatatatttattggtgatccaaattaggatatgttaataattatttcttggtttttgattaagggtggttatatgttaaattttggaatgcagagagcggttctctaaacgttactacctagcaattctccaagcgtcgttccgcatgcatgcaaatagccgagggacagacaacatcaacaaaatttcacatcctcagccctctaattagggggtgtttagttctatgggtataaagttttagcgtgtcattgggtattatatatgatgtcgcatagggtgttcaggcactaataaaaaaactaattacagaatcagtcagtaaaccgcgagacgaatttattaagcctaattaatccgtcattatcaaatactctctctatctacttttgatagtcatatttcatcttggcacatagaccaaggataagtaattctacttatcatctatttaaacatgctactagtcattcatcgcaaacaagtgattcattaatatttatatttctcgatgtccatatagccaatcttgtgtggaagaatggagagtcacgcattaaatctgagaaagtcattaagatgataggttgttcgattaaaatatgcctatcaaaaataattttttcagatttgaaaatataactatcaaaagtagataaagagagtatttattgtagcaacatgttgtcaaatcatggaacaattaggtttaaatgatttctctcgtaaattaattgcaatctgtgcaattagttatttttagtctatatttaatacttcatgcagatgttaaatcttcgatgtgatagggtgtaaagttttaggatgaaatctaaacagggccttagggaaggaaggagtactacactagcttcaccattaaaatacttcctccgtcttaaattttgtctcgttctagtttgatcatcaattccctaaaatagatagttttatcatcagtcaaacattgatatattttgattactaaattttaaaaattcatatagcttaacatcatcttaaaaatattttcatgatatatataaactcccttcatttctttttataaaacatgctactatataaagtaaaagagtcaaagttagtgaattttcaccaatgattactccaggatttgcacatttagtattaaaaacgatatcaatagaattatactcttacgttacgtagtttcgtgaaagattacttttgtatgcgtattaacaataccatttatgaggaatcaatggctaaagttcgctggctttgacattttcattgtatagtggcatgcctgcatgcctcgtaaacagaaacagaggtagggtttacgtgcgtacgtttataagagtgagtgcatgtacgttgtgagtgtctgtgttgtactgtgtaattaaaaaaaaagaaacagagagttattcacacgttgttaaactatgattttttttaaaaaaatattaataaaatatataaatacttgacttagaaaaaatctataaaaaaataaaaaaattggaaagggggagtagaagtaatgaacgaaaagatccaacaaagatagtgctataaaaagagactcaaaaggaaataacactgtaaaatgacacgataccatgcacttcttccggtccttctcgtcacagctcacagaagtgtgctggaactgacatttgacgaggcaggaggacgtcgaaaaggtaaagatcgtgtcatagttcttctacagaatcctactacaacctgatattttctaacatcacaaggattgtcatttgtcatagcctcataggtactcctacaatccaacatcacaaggactgtcggatgagcaatctgagattttctacagttctgaagaacgtactatgaatttctacagaacgatctgagattaacatcagcagggtatgcaaaaaatggtatgtactcatattaaccagtttgaacaagtccgctgtaacacatgttaagcgtcaatattgttcctccaatgcaaggtaatcaatttagcacgtagagataaattacacagccgtacgagagcaaacagcttcgtttgggtggaaactagaacgcctaaaaaggtagaaaccagaaaggcatcccaagttcccaacaacttatacagtaaagttggggctaaaagatcaaatcagttcttgattaaattaaatgtgattttacataagacatactgaacaagtcattgtcactactgctttaaagtccacgcctattcagaagggataatcctgataacatagtaaagacgatcaatgagtagaaagcttgtagagtcgacttactagtcatttctgactagttaggagttggtcatttagtctatttcatatataaaaagagcatatacggtcgcatctaaaagccaaaccaaataacttaagcttaaaaaaataaatcattagagtactaacagccgcgctgccttaatgtctccataattatcaataggcaaaccttttgctgtgaatctatctaggtgcttgctaattactactccctccatctacttttgataggcatatttccaaatatgaaaaatttatttttgataggcatatttcaatccaacaacctattctcttaatgactttctcggatttaatgcgtaactctctattcttccacacaagattggctatatgtgcatcgagaaatgtaaatattaatgaatcgcatatttacgaggaataactagtatactctccattacaaattgatctacatatttcataagtataccaagacaaaaaaaaataataactctctcatactatatttactctagcaacaaactcaatgcatgcatcatccccactatttcctagccaatagcaaatcaagatattgcatgtgggttataaatgcttgtgtgcatggatgcatgcatcaatgtccatttactccaacgcacaaataacgaatagacctaatgaatgaacataaatatgtagatcatttagaaataacctcaaaaaaactatatgtagatcaatttggaatggagggagtagcatgtttaaagataaatagaattacttatccttggtctgtgtgccaagatgaaatatgactatcaaaagtagatggagggagtagtatataagcatagcatgtagaatggccaaaagacgttgcttagagcacccgcaatggtaaagtaatgtgctttctataaaacatgtacatttcagcaatagactagattaatagtaaaccacctcaatagtatgtctacataggtatctatagctctctcatgccttgcctcgtttttctctatagactatctctaagttagtagatagctttgctctctctcttcatttaatatcttccaagtagaaaaatatgctgacatggatctcttgtagagagcctatagataaccattgtgggtgcccttaaattcaacaaatttaactggctatcttttatggaggcagcaaaacaatctatgggatacccaccaacttgtccatcttgcaagaattccaaattagacccaactaaacgttatgctttgcatatcaattgatgtacaatttttcatcagcaaaggtctttgactgaaaattgcaattaaccatgaattgacaccaaatcttagtattgtaagcaactatgcacctccagcaattacaaggaaatatctttcactcagagaaaggtagaatttacctcattcatccggtggtgtccgcacaacagatgagtagtaatgtgcctccaactcctttaggcttcctgctgcctcctgcccaatcctctccagcattctctctgttccttcagcttgttgactaaggatctcaatccgcctatccacattttcagttaacgaagcaagcccagaaaagatagctgttctcttaagctctgacactagtttcaacagagaatcagctgaatgtatctgaaaagcatgatagcatatcgcagctgaaattacacattcaacgggtttgccaaatgatactgattactagaactagcttccaattatattacaaaagcatactttgtagaatggatggttgcaatatgttaacataaaggtagatcagaaaatacataggcaacaaaatgtgattcaaactcattattcattaccattaccatactgtctatgataagtaaggccattgcgtgtctgaggtaggttcttctcaatccacagatatacacaaactatgatatcatgttctgaatcttactctgcgtgactagagtcagtttcttgcttgaattttaactaaccaatccctgattccctgtttcatatgcactgcattttcaccctacccagataacatccctaccgttattcaaatatcaaattccatctctatagcgatgtccttgtttgcactagatatctcctttccagatagtgtttttgggtgtcggattaaacacggtgatatctcctctgcgttggatagcttcgtctatttgaactttgactcagtagaggcgcgtttggaatcctcactaagtttacttagccaggataagataggataggccgtctgatcgctagctcatagaagttagtatgcttgtttggttcaagcgagttgcttgtctgtacgtccctccaagtggttccagcatgtctttgactgcttgcatccatgacattgggcttcattgcttgccgtccagggagagccaaattggctctccatggtgggcaaggatttgttgacggttattgcctactttgcttagcaaagcaagattaatttgcctctaccaaacagctgaggtttccaagcaaagctagtttcactcttgcctaggattgccttctagttataagttccaactagatcagggtgcacctgaaatcaagaaatcaatactataactcctaaatcctaacaaacagctatcaaggatatggcaccaaggattcactgccatggcttaatttgacccctaatacaatggtaataccaaattgagcaagtaattcctcggtatttcttcttacacaccaattgtctccactactgaggtaggaggaacatctccagttctccatccagccggcacatcaaatgtgatattaaagcttaaaattaggggcatcgtagctctaaatttgctcatttagacaaatactatagggcatgatttaaacaccgccgcgaagaaacaagtcatggagcaagtgtgtaccaagcgggagccgcgcatgtccatctggaaggcctcctgcgtgttgcgcacgggcgggtcgttgacctgagacgagcggagcggaagtaggagttagggtttggtacgacaccaaggaagaggaggagggagaagtggggagggggggacgtacgcgcgcgatgttgatgaaggcggcgaagttgtcgacgaggctggagacgtcggcgtcggccttctggaggagcgtcttctgcttctgcaccgcggctgccgcggccgccgccgtcggccccgccgccgcgccggcgctcttgctcatcgttgctgctgctgctgcgatggcggcggcgcaggtgggtgcctctcgtctctgggcttcgtcgggagaggaagcaatgcgaggcccacttcatagcaccacgtcgtgggctatccgaaggcccatgacgagacttgacttgcgggtgtttcttgggccacggaatgcgcaaattctgagttatttggatgaggaataagttcacttaggtccctcagcttgttgccaagtctggaattcgtccctgaaccgcagtaatatgacgtgttcctcaattttcaaaaccagtgcaaataaggttgcaagacggttttggatggtggttttggttgacatggagcctatgtgacattgacgtggtacttaaagtcttttcaaaaccataggacccacccgtcagtgagtgtccaattaaaataaaataattacagtggatctcaccttttttttctctcttttctccgctctctccatcttttctctccctctcattcgtggtgaccgactagggcgggccaatcttcttccagaacaggttgagcaacatcaagaatgtagaagaggacggcaacctgtggccgaccgccaggtaccgggaatgagaagaagcaagaaaggagaaaagtgagagagaaaaaaagaaggaacgaaaaataagggggaccactgtaattttttattttaattggaactcactaacaggtgggtcccatagttttaaaaatactttaagtgccacgtaggcgtcacgtcagccaaaaccaccatctaaaccgtccagagaccttatttgaattggttttgaaggttgaggggcatgttatatcttgttactttagttcagggatgaattcagactcgtcgacaaattgagggacctaaagtaaactttccctttggatgaataagtcttgagggaggcgattctacatagagcaagacaggaaggagaaaaatatacatattccttatttagaccagtgattgtgtgattgggcctcccaaggcccaacagatcgaagttttgtctgaaatctgaagcagagtaataacccttcagttcctgaatctgaccaaattcgacgaacagaattatgcaaaaacagcagattcgttcacccaagacatgggcctacactggttgatctgatatgtcaagcaaagaagagtatacacgagaataatgtttttttgggaagaaagagaaaaaaaggatcgggaacaggagttgacaccagctttgcccgattcctttctcagtctcccttttctcaccacctttcgatccatcgatctcgcttccttttgctttcttgttcctttccctttccccatctctctctgtcgtctgatgaactccgaatttgctgtttgctgctgctgtagctaagctaatctgctgttccgtgttgggtgctgcatcatgtccctgatcaacgtcaggtttaccatcacacgtcactgttgttaatctgccttgcaagtaactcaagttgtttttttaaaaggaaaaatttgatgatggtggctacctagctagctccgaccgacaatcaccattaattagatgcctgcctacaactgatgactaacaaacctacctaattaagtacctatgcaacaagtggtaatcaagcatacaccacactatagctaatctagcacagttactgactccatcagtagctgagcattagctctgagtacattagaaagcagctcaataatgagatacctttgttgcttaatgatccaagctatagtgtttggacccatctacttaaacgtggaacctacagcacttagcatgcatgtgctacacttaaacatttcagctctagcaatgtgcatggtttttataactaactcagtgcctagctaatctagagttaattataatggcatcagcaactagctagggtctttggatcagattgcattgcagaattaatccagagttaatttaatttgccagggtggagggcactgtcaaagtgcttggccaactgaaagctactaagtaggccaaaattcacacttgcagacacacatcatgcataaacattatcttaattactaggagtgaaacctgaaatgcatatgctggagctgaacaaaaaggtagtgtttttatctgaagacttatcaagtactctcccagccaatcaaaactcaccagttgagcacaaagcctttgtggaaaagatgagcaagcatagattagcttagctataccagaaaaaacaggctaagtctcaagtgaaaggcaaagtacagataccaataaagtgggcaagctttcatcagaccaaatgatcagcagtccaccatagttgtgcactttaatccctgcctcctccttgatctcccctacataatgctatgctatgcatgtcaaggtgtcagctgctagcttaagcatggcatcttccttctaatcatagcactcactcctagggctactaaaacattggctctacttgttgatttgtgactggttggcgccacagggggaggaccccaccctccacgaaaacgcagggacttcttgcacttgagcatgatgatgccctaatgtcttccatgattcgatctgaaggagacattgactccattgcttcagttctagactagctacctcctgcaggaccccctaaggccccctttgaatcacaggaatgaaaaaacggaggaatagaaaaaacataggattctgataggaatacaagtgtaaaacagaggattgcaaaacacaggaaaaacataggaatgaccgtttgattgagccgcaggaaaaacacaggaatttgaggagagagaaagactcaaaggattcttaatatgaggtagaacctcatgttaaatttccttcaaaatttgcatgggaagagccattccataggaattttataggattccataggattcattcctttgattcaaagggctatataggaaaaattcctataggaattaaatcctttaaaattcctatgaatttcctttgaatcaaagggggcctaaaagagggggattgatgaactccggaacaagaagcaaagctgttctcttctctattggaaatccatgctagtgcacactgcagtcatgcatgtttctttcttcttggcaagcaacattattggtttagctagctagttaaaatttatttatttcatatatatgagcagtagccttttaggccttattaatgttcttcaaactgcctcgcctaaaattgatgttcttcaaaaacaatttagtgtcattttggagtactcttttcttagataacaggaaattttcattacccaaaacaaacaagcagtcatctgattacaggaaaaaaaacatattttggagtactataagatgcagcaacttaagtttatagtcatatggatgagttttatagaagttttcagttcttgctagtctgatgaatgccggtaggttgttgttgtgtgtgaattgtgttggttttcatccatctatctatctatctatctatctatctatctatctatctattatctatctattatatactaaaagtccattaaacttccttaaaacgctctcaagctgccatgtggtgttctaaaaacgctctcagattgccacatggcaaaaacatctacccttttatttttcacttaaatacgtgggtccaatattataaaccattaaatttatatataaaatagtgtatgtacggcgccgctgcccccacagatccgatcctctcccatcacggctcgcgcgtacgtatgcacgcccttctccatcctcttttttctccacggtagttaagataagcattatattgttaactaattttaaataaaatttccatggtatatagccggatctcccggcctcaaagtatatcttcatgcgagcctaccggcatggacatgtactgatgtatgtgatcgtcgatgaataaccttttaactatatatatatgttgaattgttcttttattagtctatctttttatatcctaatatatcaatcaattatttaaggtgcacattgactatgattttattgtcaaataaaaaatagtgtgagacatataccttcacgatttacaatttgttagttactttggtttttaatagattgatacctttaacttatatatatactctttcatcccaatcagaaattatatatgtctggcatgcttgtatacatgaaagcatcagctaacctttgaaatttcaattaatgtacactccatggacaatgatactggattccatgaatgatttcagagtaaataacacaaaaaacttcagatactatgatcaaattattgcaaaactatagatttgaattggtgtatcacaaaactacacatttaacaccaaatttatcacaaaactacacatttaaaatgaagtgtcacaaaactacacatttagtaactaaattatcacaaaactacagatttagaaccaatttagtcaaaaaaaatgtttacagctccagcataataatggtgctagggattaaactctaaaaactatagttttgtgttaacttcaatattaaatatgcagttttgtgatacttaaccttaaatattatttttttgataaatatgatgctaaatctgtagttttataatacaacgccttaaatatgtaattttgtgatagtttgatcaaaatacatgtagttttgtgaaatttaaataaaatcaaatgtgtgattagatcaaatattttgttcctaaaaattcttttaacacctctaataagttgaagaaaattcaaaaaatttgataaagaaaaaggcaaattaaacctggaatcgataaatgattatatgatttataaataccccatagtaacataaaaaggtattttaaatcaaagcaaatatttgtgattgtattaaacaccttgccactaaaaaattctcttaacgcctctaataagttaatggaaattataaaagttatggtaaagaaacaaacaaattaaacgtatgatccttatttctgcttaaattaatcaaacctacatgtccatcccctccactgtttgatctcatcgtagatatctcacatttctcttctaatataagggtgtgcaagagtgtttgcaaaaaaaaaaaaataccacattggtcgaatgcattagtcgattgagatatcaaggttttgaatggctattacctttgaatcataaattttattgtttttatccatttaaatcattttttttaattattaaaggttgaacactaaaacaactgtatgtctcatcatatttccatttatacaatagtcataattttctatgaggaactatccctagctggctagctatgataattcgattacgtctactatcaaataataaattaattattggttttctacataaattggtagagcaattaattatatattgttacatatccaatgtcttttatagcaacttaagttttctctcttttccaatagaacttcaacagacagatgtcctaggtaccataaaatccaatctccaatagacaattttataaataacgtaattaaattcgtcatgcaatgctaacggagaaaacatagacaaatcatagttttgaaatatggcatgtattattccgttagtacattatcttataagtttctcaaatgcaacctacgatacatgcccgcacgaatgcgcgggctaccttcctagttaaattaaaggacatataagtaacccattaaaaaccacagagggtcttaaaaaactagagaagcgtatatacatgaaaatgaatttacatcttccttacagtaaagtaagaaacgagtttacgtcactgaatattacagcaacctatcaatttgacagtaaaataatatagagaatattgaagagttatgttctattcaataatgataataaaagagatatgttctattctgaagacttttctcctcgatggtccttttcatcaagcaatgcttcaagccaaattggtcaagaatagcataataacactaataaccattgtgactatatagcggagacaaatagatggttcaatcaacaagtgcatccttgtctgtcaaagcctaatttgatgtgcttctaccttatgtcctggttccactagaggatgcatgctgcatgccaactaagatgcttgcccaaaattgggaacaccgcaattacttatagcatatttgaactcttcaaaaatcacacaatttaagatgcaatcttttcgcccattaataattaagttgaaagaaggcctataaaacaaacaatataataagaggcagggtagggcccacaatctaatcacgttccatttgagataaggttttcttgacataaaactacatcaatgcaaggactcaagtgagatcataacaaaagtgttttcaaatctccccttttgagatcttgtttgtagttgggacatcttggtgatggtgactcacatgggcctcaggccaaaggttttagctagcattaattctttagcctttactcctaggggtcaaaaaatattttttttctaggtgccttgtggtaataagggtatcaattcaacatagctagcagtttgttgggaaatatgatggttcatcaacttattgcttctagtggttgggtgtccaacttacaagtatggtttaagaaagctttgggaaaatgttgtttggtggtcattcagtttgttatgtccccttctttcaaaagcaggtacttttttttttcagaacataacaatgtgcaatggtgatcaattattgacctttggaagtatgccttccacttgtacagaaattttaaactatatgtcaaactagcagtgagaagaatttgttctgtgtaacatatatattacgcctcaacctttgcagttacatatattttagaactactaggagcatgtaacatgtaagtttacatgaaacagttcatcccctgcatttctgttccaaacaaaagctgatgaaactggacaatgcacagtccaaaaggaatcgtactcattgtgtgccaaattggtcacagaggaatgtttagtagcagcaaattggatttaaaatatgttaaccctgacaaagcgatccctgaaactgaatataagtagtacgagggttcatctctgcatataagaaagtgatcagagaccatttttttttatcacgtgcattgcaagctctctcgacagaaagaggtggcaatggcaaatgggcaaacatgtttccaggggcggaaacaataaattagaacacccatcttgcagatcacaggaagaccacacaattaactacaaataattacaaaataaaaacttctaaactagcaaccgccgaactctagtattttggaaaagtccaacggctacatacagatgagtgctagctagctgcttaattctggcaaaaaaataatttcttaaagagcaattatgggcctagtgaaagcaagctttttgcagtacaattgtgactaaattagtcttcaaataaagcgtacgctggtggactaaatggtacagattaaatacttaattattcggtgctttgaagattacaattgcatcagaaaatcgagacaggaagaagaaggacaagtctgagttgatatcaggatagaaacctaccggcgcaatatgtttatcaacatgcctagctttacatcacctttcatatcacatcacttggaacaagaatttggcaacttgaaccctaagaagttgccaatccggccccacacatgcatacatcgcaattctagaagatgattaattgcatatcacttcaaacaaattaattaattaaatgttaatttggccatccctttcatctagcagctatcttcttagctataaatttccttcctgatcttgtgcaaatattcaaaccacaacctagagctcatctccggttttagtcaccaaacaattgaatacaaattaattagtagtaaattaaaaatggccggctagctctttcaaagagtaattaacttgcttgttggtctaaacttccaaggagagatatagaatgaattctctctgcactagacaggactcgccatgcgtcacctacagcttgtctttttattaaaagacctatacctacgtgtacttgggccaccaattaactaaacccacaagcaacacaagatcccaagatgatgcaagcctagattaccagtagttccatctcatgcaattcgtagccaattagccagtaaatcttcgagaaaagatgatgccatctctcaattagcttgtttaattatgattggtttat

SEQ ID NO: 8378 - DNA, 22352 bp, Oryza sativa
aaggcaatacctccactgttttcacgtaatatggttttgtgtttcttctataatttttcaattctaagtgaaaactaaaagacaggcttgataattaactaagcagtctacactatttaaatatatatatttttggtgagatacccctttttattttttagacggcctaaaataaaatcctcctacaaaaatgcacgtgtcccgattacttgaatggagttatttttacatatggtcctactatgaaaatcataaattttacaagtgcttgttaagagggcggcttgatgtcatccatggcggatttgattgtgcaagcgcttgggagtgccaaatctggtggtggtgacagctgcggagatgactacggtaggttgcggagatgactgtggtgaggaccgtgacccagcggtagtaaagatgacggcaacaacgggcgaataaaggcgaggtcccccacggcggcggcgagcagatgcatacgagttcatccatagaaccgatgggtagatccaagtgtgctcatccaccaggctagaggtagatgaaggcgaggttgtccatgacgccaattggcggatccaggggtcgaggttgtccacaacgccgacaagtagatctaggcgaggtcgtccgtgatgatgaggagctagggttcctaggtagcaacggatctggtgacgatggcgtcggctttgggagcggcgatgattgcgacgacctaattgctccctcttctatgcgtatgcgatcttgtcgccctcaccctcttctcttgcatcaatgggtgaaattgttttgatcggcacatggagcaatgatttttgaattgttggatattttttttggatgaattggataccatagacgagtgacttattagctagccacatgtgaaaagcccttcttcatagacgaataacttagctggcctcctggaaaggggcatttcacatgcggttgtctatgaaaatggacttctacaggaaaccacatcctacatgtagaaatacaatatttccacgggcgtttttgttacaagcaattgggccaaccacctctggaaatcgaatttatctgcccaaaaaaagattttcataatagtactatgaagttgggaaggtcatgtgatgaaatggcttgagctacgcattttctcatgctccatctatttccaaattaatatgtcagcgacaataattactgcttcacattaactaccaccaatactaacttcctatggttaaattataataaacaaaagttgtattgtcttgttaatcccttctttatataaagttaaggccaaaagctcaaacctcgtgcttccacgtcatcatcaaattgtgaaccgttggatgaatgcattagatcgcttctcagacgtatagagcccaacccattagtcaccgggtgagtctcttcgccctcagtgccaaatgtagctcacatgaacacattgacccatctccatacacatctacatgtatccagcccgttaatccgtataaaagagttttatggctgaacgccccttcagttgacatgcgctacctaaattatctacaatttttggatagggctgctaaaaagaatttctccaagaaagctatttgtttcttctgtttcttcttgaaattatacctcctatctaacaaattgatgttaaccaaatcctgcagcaacacgcggagcatcctctagttaacaaaggcagaagactctaaatttgaacactgaaaattctggaagcagctgcaaccgccaaaagactcctcaaacatgaccttaactagtctgctgaaaatctatgcaatgctatcatggatgctgtcacacatttcccccttacacaattcctagtagtcccaactagctaatctacgtccaatactttctccatcccaaaatgaatttatttttcacccatctcacatgccaataaaaaatttagaatacctctactttatcaaatctcaatgcaactatttctcacttcatatatttctaacacaattatttcatactgtcataaactccgatgcaatgattactttaaaattaaatttattttgagacaaatggaaatgataaaaataaacgggacggagaaaatgtatgtcttggttgtcagaacatgggatgtggcccggccatgattgttgatttttttatgcacattagttgagtcgtttcaaatcaagggtacgatcgatctcaacaacatgacaaggaatggtcgattttggatatggtcctgacttgaccagatgggatgtttcactgttgataagaagcatgcattatgttcaccgatttggcatttcaatgtaaccccgttttgtcacacagtcggtgcagggaggttctccaacacattcacaaatactacttgtctctcttcaccaaagcttcgagagttcatttttattatatgctagtatatatttctaaggcttggttcttaatagaagatgtacgaaactgagtttatgataaaatggtacaaacgagtagaaagttaaaaggttgaaatagctttcttaaagacaagctaataaacaagtttttttaataaaaaaaaagtagtgtaggaagcgtgtctatgttaatcaaatccataatataatctgttagcttaaaaaaatcatgaaccaataaaattcatgccattaagaactaattaatcaaatccaaatttgtctcgccaaatttatgacggtcagggaggagggaaatttaaagaaaccggcgaggacaaattaaaatgtgaatacatacacaacaaaatggtgaccttgatatacatgtactttttttaaaagattacatggaagacgtagacacacacagaacacgcattcacacaccatgaattaatgcaccctagaatcctaatgaaagcacaccataattgattaatcggatccccaaagtttatttttttgttaattttttggagatgataaaataggacatatattccttggttggaattaatgttacatctctgcaaaatatcaaaaataaatctcaattgcatttacctttaccaaaaatacaaatgtgttccccgcacacggaattaacattgagtacaattttaggcatgtaagcatgtttatcaaaattaagaagaaaatgatcttcaaagcttttgaggtactacctccgtcctctcatacatccaaaatttcttatattttaggacggagggagtatagtactatcagatagaccagatatgataatcggagcattgactactgttgtatgtgggaaaaaaatgcatctttttttttcagttcattttactagggttgaattggcttatattattgtttctaaatttagcaactccccagcaacaacatcagtgtaagtacactagcaagctacttttgcctttgcttacaggcaagtgctactaggaataagtggaaaatttgactttattgagctagaagatggatttgatatgacaaggactcagagcaagtctcatccactgcacacaaagaaacaaaagaaacctaggttgcttataattgcaaacattaatgagttaattagctgccttttctatttcgttcttgagtgtcatttttcttcagtaatgttacgttaatgctgcaaaacatgcatgctagctaggtgtactgtatatgtagactatggtacaatatatagctatagctccctattttagctttgatgaagcattgttaatcattttgcagaatgaattattcctgaaaattattgtatatgtttgatccgaatttcgttttgcattcacacatgcatgtgaatggatattaaagtttgcatggttggcttatagtatatctatgtggccttctttttaagattaaatattcaccgaattattaaaataaattaattgttttacgctttaaaaataggtgtatgagaaaaatgcgtcctctatattttattacttagaccactttgttttaagcttaatttttaaaatattaatttttatctttataaacaagaagattttctcaaaaaagaagtgtattaatataatcattaacgataatctactcaataatctaaatcaaacgttacataccatatactcctactaaagcaaaagcaaaacggtgtagttatgaaatactccctccgtctcaaaatataagcaattttagcatagtgacaaatcaaacatttttaactttaaccattaatagcaacaaaattaaaaaaaaatcaatcatgtaaaattaatgttactagatttatcgttaaacaaattatcataatatgcaactctttttatttaaaatatattatttttatagatattattggtcaaaataacatttcggagggagtaaatgaacaggtaggtactccaggacgcatagcggtaccctgcaaaaaaattggacatgtgtgtttgtccgtgtcggtcaacatgaacaagcaaggagacatggcctgccccttgaagaacccccctccctctagctctgtccattctgcaaacagtcgccgaacgaaagttatacgtgcatggagacttgatgcatggccggaatatttctgtgtttgtcagatcaggtctgattgatcaccagctgcttctctctctctagccttactactccctcctcccaaaaataactgcagccatggttttccgcgcccaactttgaccactcgtcttatttgaaattttttattaaaaacataagtcacgagtaaagtagtactcatgttttattatcttataacaacaaaattgctaattataaaaaaatttcaaataagatagataatcaaggttgggcgctgaaactcatgactgcacttattttgggacgaagtcagtactcgtatacttcatccgtcttataaaaagaccaacctaatatcgaatgtaataatctatctgttcagatttataatactaaaatacgttacatatctagtactagtaaattagtttttatgagaagaagaaagtatatcatagatgaaccatatatttgtgttttggatgtatgcttgcatgcacacattacatcctacggttgtagcgccatatatcagcactgtttgcagaacaaaatcctgtcagtgatcgagcgtctctagctacgtacagatatgcatgggggcctttgttggaatccgatggacaatatataacgttaaagagaagataacatgtgtcaagcaagctttaatttgacggacggggcctctctagctacatggtgagcattcactggataattactatatttcttctaaaatatatatagtagtaatctaggattaaattaacgagtactacgaattcgaatctagacaaactcttatttggtcctaaattactaaattttgagacggggagagagtatatgttagaaaagtatcattagttgtggtgaatgatgatggagttgtgagtgcaatttgtccatcaagtatcgaattctattgctcacaatatgtactctgtgtaaatttaattactacactgaaaatttatattcattacctttaattaatacactatattcttaaatcaatctgaagtgaagctcagaaaagattatacataattaattaattcgatgtatatatgattattgttgttagttttcaaggtttaaattcaacaaaaagtaatgttttcagcagcagcaattaatatataaatgtattttaatgatatgggaaatattaatgttagtcaaatatacatcaatattgtttaggactgtatcacatatatatatttgttacaaagttttaacgaaatattattaaatatttccttaaaactatctgatccccacgtaattaattagattaacttaatttctatatcacgtgttctgattcatgtagtcaagtcctggagaggaaaaaagaatctcccttaaattagtatgcacctatcaacgctcttcctttcccattctatcaaaacgcttttaatttttttttctcgccggccattctctatcaaatgccatgtcccacatcctttaagaggaagtctactagcacagtgcccttgaaagctccaggagtcttatcaaagcaaaaatttcaagttggaatcatctctagctatagcactttctttctccacctttctccatccatataaatatatacaacatatatttaggagaaatggatgagatatccatatgattgtaaaattgttccctctctggcccgttagatttgatgtgacgatatgttacatccatcgtcgttttccatctagagtacgactggcaatttttctcagaaagaagcatgattggaaaagatatatttaataactacatcctaggttatatagagcaacaaacttaaattctaagtcaaatcattaattatctaacatggtagtattatctcaataatgtacgcatcaaaagaaaacaagttttactccttccatgtcataaaaacatgtttcaagtcaaacttaatgtgaacatcaatattttaaaaatatttagttagatgtatgaaaactatatttgtagacatgtacatatatagcatgataattttatcagggtttataggtcaaatttgtacgtgggacaccatgcatgttcatgtgtaaaatgacatgttttcatgactgaagggaataactgatcgaactcatgtatattcatttgtttaaaaaacatatatggacaaaatgtacctgaaattgtatcactagcctagctatatatacttcagaatgtctatctagtgtggcaacttgtgatagcaaaccacacatatataacaataacaaccctctagctcattgttgagttcttctggaaagtagcgtggcgacgcgtttgtgtgctctacttgttaaatttcccaaatttgcacaactcaatttgagttttattggtaaccctcttctcttcttctaatatattgacgtgcaattcttttgcgcgtttgcagaaaaaagttttattggcaaccacacatatatgtagatcgagatcgagatagccatctcaaagcgacatgtcattgccgactttccctagcaagagaaagctagcaagccagagagaggcatctcactctcacacacacatctatagcttgattctgacccatattgttcccatctccagatgcaattacagcacacaaccccaccaacataaacgagatcacttggagacaacgacctctccttcgatgatcaatgcatataacaacaagatctctttcacaaacccaacaaatcaaagctaattgaatcgccttttaacaagaacaaacaaagagagaacacacatacgtacgtacacaattacattaacaaagtactactactaacaatagttacatgcaccatcgatcgatcaaccactacaagaagctagctagctctagctaatatgtttaaacacatctcaataatattctctccatcgatcggaatcatcacgctattgatcatcttctacttttgatttttgcttgatcgatcactagtacttctatcttgatcgatatgatggaacaactcatccattagctaatgtgacagcatcatcaacatcatcatcatgatcatcatctcatctcgctttaatggagagacatcacaagaagcaacttaccatctcatctatccatgatccatccatccacttagcctttagctacagctaagctcagctggatacgtagctacctagctagctagctagattcctcctccccactcgccgagctttctcgccgccgcttggcacacctcgtcggacctccacgtgtcgccgccgtccatggcgccgccgcagtagttgtagctgccggcgttgccggaggcggtcatcatcgtcatcatggcgctgccggtgcagctggagttgaggtagtcgaggagcgtcgagtcggagtagtactcggccggaccaaggtccagcccgtcgaggctgaggcttcccagcgccgacgccgagtcgacgaacacgccggcggcgccgtcgtcgagctcgccggaggactgcatctgctggtcccatctcagctcggagaagcagggcagcggctggaacgccgccgcggccgccgtcgagccggccgacgtcgacgtgctcgggctcgggtcgatgtggtggtggtacacgttgttcgggacgacgcacgccgttgctgcttctgcttgctgcaggtgggtgtcgaagtcgaacggcgaggaggaggcggtggccatggcggcgtggtggtggagtggcggtggcggcggcggagtggggtcggtggctgctccggccatcttctcgaggaggcgaggcatccaatagcagcggacggcgtcgcggaagacggtgctgttggcgtcgaccttgagctgcctggcctgcttctgcaccctcgtcctccagtagttcttgatctcgttgtccgtcctccccggcagatgctgcgctatcctcgaccacctgatcaatcaaattaaccaatcgatcttgatcagagataattgattttgattgatatatatgtgcagattgatcaaatcaatatgtatacctacctgtttccccacctggaatggagctcaagaatgagcagctgctcctccggcgtcagattcccgcgctttatgtcaggcttgaggtagttgagccatcttagcctgcagctcttgcccgtcctcttcaaccctaatcgattaattaacccaaatttgttcaagattgattgtacttgacctagatgccatggttagatcgatgatgattgcagagtgacggaggactcaccggagcagcgggcgaggagattccagcggccttcgccatggcaggcaatgtagttcatgaggaggttgtcttcctcgagggtccatggtcctcgcctcagctccatcatctcctctgccatggcctcctgctgctgcttgctcatcactcccatgggccctgcaactctcctctgcgacattgctgtctactacctttgcagcagctgggatatatagctatctagagcttcttcttctactactagtagtataaatgttgttggtcagttggtggattggatgatgaggtcgatgtatgatccccttggagggtgcaactcatacaaccatatatatagccatgtacctccactagctctcactagcttaattagcttgccccttaactactctctcaactctcaactctctaggagatcaattagggaagaaaagaatggaagagagcaagcacaagtaagtacaagagaagagggaggagagatgcatatggcctagctgcagagagagagagagagctaaattaagttattattggtggctgcttgagatcaatatatatatatatatatatatatatatatatatatatatatatatatatatatcccttttataatgacttgtggcaatcatatgaagggaatttttgagggggcatgcatgcaactgcccctaatcaagactgaaaagtactactacttgtaggaagaagaggggtacattttaatttggtgggttaattagcttcttgggggagaagagaaggaagaggagaggagaaagccaagtgcgttgttacacaccaaaaggtcagggcaatctgtcaaagcttccatctttttctatggaatgagagagagagagagagagtgagagaagaaatagtgcccagtactgatctttagattctctcctacatgaagcgtgtttgactgaacaatttgtcatccctcttgcagcactgtgttaggattagacgagagagggagagtgggatggagagatgaccaaattgttggatgcacacattggtgaaccacacacctctccacgatctccttttgcactgcaaaaaaaaaacagtaatgcaaaacgttattctttttgtttcttttggaatatatattatccttttgtgataagctcaaatcccaaatagagacatgtacatatacatatgcatgcatgggtttttatttattgatattacaccaaatcattggtatgttttcgaaagctaccacactttatggtatagtgaaatgcaaatgtgtctccacgcatgcaactacctgcctatgggcctatggcacttaaccatgcgttcaatcagaataattatctgtttcataattaattatttactaccagtttgaactagaattatttgccagatgaggtacggtctacttcaagcaaagaataagcaatcaatcagcgagacttgtgcttgcaaagcaaatagctttgtagttctttctcccgaaaagccaatgaaacactaaactttggagacagcaccctggtaagtaagcaaagattaggtaggaatgcctgtataagttcctaggataatcatataaaatattcgtaggacctaatgattcttgacctaactgtctgcatgccgaccggttaaaatgttcaattcaaatgtttagcttaaatagtttgtgcgtgatgttggcacagttgcatgcataccatggtgtgtagtcaaatacttgcaattaatcttaatatttgccgcatctaaagtgtcagttttgcggcttcccttgaccgaattttcagaagtacagtcactgttaagttggaaaagaatcaattcaaacatgcatgtccttgaaacatataatcaattgaaaggtcattgaattatactatatgaataccccgttgtgttgctgccggaaattaagttacataatatgtataaataagatgcaatataattattaaaactaaaacaaattgatacttatgaattttgagcctaaaaatgattgagattgcatggtgttatgagagaagaaagaagagataatttgaactatggatctatcagccaaaggctagaaataattagggtgatgtggcttaatgagagaagagagaaatagcattaactatacttagtggggatgaactatataagtatataggatttgagcacacatgtcaaaaagatgacaagtgaataatttacaatagacttgttgcatgatatatttaacatgtataggaaatagatgaagtgtaggcattcttgttatcttgctattaatggtgcaaacaaaaaaaatcgaataaagcctaagccatgcatatttttcatgaaaaatacaattttattggaatttgtaaatatattaagatataaataagtggtccgataatgtttgtgtgagaccagaccaatgtctaaatcaatacgtatttgtgatcggatcgagtaattctagcactagtacgtgtaagttctcatatgagccatactacggtgctctctgttggtagtaaaaagcaatatgaaccgttgttctcatttggttgaagggtttagatttatttgtactaccacttcagttagcggtattagaaatgtggaggtgcattattataaaaaaaagtgtggagggatataatcaacatttagcaatgacgactagacctttttttcaactttttttttggctttttcgatggaatataggtgtgagcaatgccagcggaatggatgaccaaataatagatctagaaaaaacataaataacaaagttacctctaatcattgtattggtaaattactaatttattcttaataatgaacgattatgatcatttggtaatttctcttttagagcacgggaacattgctctttttcatatatgttagttaattattagagaaaataattgtaaatgaggaagaaattaacatacactagctcgcataatagttttagcgtatctgcaattggttacgctaagttataacctttggtccattaaacatcatcatatcgttactcacaaagttctcttttatatgcttccttgcaaaaaaaaaagggagttctcaaaaaaaaaagggagttctctcttttatttgcggcctttttttcaacagaagcacgataaagctaacaataattcataaacatgtaactttgaaagaaacctacacaagtacaataaactatactagtacaccactagctagccatgagttagctagccatgagttagcgatcactcatatgtacacaaatataaaggattctagtatttgaaatatgttagcaattatatgggtttctaatactatttctcttacccaaccgtccctctcatttaagtttcacctaatgttacccctaaccatccttccatgcatccccatccaccccttatttagtaaggagcatcataggccttgttaagttagggaaaaattttgtgtgtggttgtcacatcggatatatggacacacattgaaagtattaaacgtagtctcataacaacacaaattacagattccgccaggaaactgtgaggcgaatttattaagcctaattaatccgtcattagaaaatgtttactgtagcaccacattgtcaaatcatggtgcaattagacttaaaagattcgtctcgcaatttacactcaaactgtgtaattggttttttttcacattttatactccatacatgtgtccaaacattcgatgtgatgggtgaaaagtttttgttttgggaataaaaaaggccatagtatgtataaaaagaaattttacaatccttaaatgataccgaaatttttagaacaaatacccgtagctcctagttttgaagatatcgagaggcaccaaattttacactggaaatatggtacctcccagtacctactcaagaactgtaaaatcagtcatgttctaaaaatctccgttcgttacctcccgttcccaactttcctccctcattttccgtgtgcacgttttttaaactgctaaacggtgcgttttcttaaaaaaaaatttctatacgaaagttgcttaaaaatcatattaatccatttttgaaaaaaaagtaaatacttaattaatcatccgctaatcgctgctccgtttttcgtgccatggagtgagggttcccaaccctcgctcccgaaggcagccttatttgatgactcaacttttcctttagaaacttggttgtttgagatcacaatgaatggtgtttcgacttctccgcactataagtctagctatctacgcaccccatttgagacatcgactttaatcttttcaaatacatattttctccattagtgcttaattaaccatcagttctatatagtataatttatctttattgtgatgtctatgattgttgtaacatcatatatatatttcgggtcctttttgtcattgacaatattttcaaatacatattttcaccattcgtgcttaattaatcatcagctgtacatataattaatctttattgtgatgtctatgattgttgtaacatcatagatatttcgggtcctttttgtcattgacagtggctatatatgctcatcagctaggatataaaagtatataaatatgattttagatctgtccagtcgtgttactcatgcataaacttgattaattattgcctataaatggaccaacctatatatctagggtgctgattgatcaagaactcgagataattctacttgaaagtaacaaacaacaactaggaggatacgctcaaaagaagagaaaaaattacattggtggtccaaattttaacacttgcaaatattgtaccagctggtaagcttttcctatggaccacgcactaataccatggcaaacaagtgattatccatatggaccacataatgatcgttgcattagctcacaaactactagaaagaacaaaattattgtaaatttagttacacatgcatgagccagttaacggcatgattagcctttctagaaaaacaacatatgtagcacaccgttttatcttccttgtcattttggagaacgatgtagtcaagaaaacttgtattttccattattgtttctaatcattatatgatataaaaactattaaatattttatatgtgatgaatccaaacatttctctagatatttgtcatcgaagtttgcagggttgaataacattttctagtatgtcctaaattctatttgagacagatcaaagtagatcatttttttttcagtagtgcatatatatagtaaattcctcatatatatgctaaaccaaatgttactcttgtatgatagtattaattatttcatttacaattttatatactcaatctatctgaaactaccagctaacttttatgcacccttcttgtttcgccttcatatctcatcctttaatttcatccttcccattctaaaaccaagcttcaaatattggcaagaaagggaacagtaaaattttggatgccatattaagaaaaataaatgtccgtacgtacgccacatgatgaatttgtccttgtttttttttcctttggcatgtacttgcaagtttcatctaactcatggtccttaaatagtccacaagtcctaaccattcatcgtcacttgcggttaaattaattacgtacccaacttgcaacagaattcatgtgcaagatctatgaacatagtatagccatgctctatatagttttgtgtatatatagtagtccttaattagttttctgttatcctatcatatatattatattgcatcatatcatattataataattattaagttaaggtaaaagagaaactctctgcctatgctctctaggacataagctagttaccatgcatgtttagtaagggaaagaaaaatatacagttgactgtgatgtgggtccatacgacataatgcatgcactatatttaataaagagtacacatcaaatttgtaggaatcttaattttggattaaaattgttcaaaaaaaagagagagtccatgcatgtcaaatgacagtaaaagagcgagtgaaataaattaacctgcaatctcatttccatatatataaattccaaagtaaattctctagctaaaataatgtgagtatattttggaactacaattactataactagtccttgcaattgtgaaagaaattcgacaagttttgtgtgcgattacgcgggtgatgtatgtgtgcgtgcacacacaccgccgccaccaccacgcactcacaccacactcacaccacactcacacaccacaatccctaagcaacgctcaaatagatgaagaccaatggtatatccctagcaacactaatttctatgtaaagtttactagcgtgtgtaatattcgtgaggttttaacaaatcataagaatgatcgtatagacataagtcttaatttgcatggtccaatcaccttgtattgttaactagtctgtgcatatttacttctaattttgtaggtcctaatgggagtttatcagctactaaactcaaactgtttcttagggaaaaaaaacaggtcaatgttgttgctagacaaatttaaagtgtttgtatctataattagtgttgtaggaaaaagttgattagatgtatacatatatgtaccctctataacttaactaattgctcctcactaatgacatttttttctcttctctcaccaaacttattttcttgtagtgactagtcaaatgtgcaaattataaaaaacatgtgatgtcatactatttaactataaagcaaatttatctcgcaccacctcatgtttaccattgtgatgcagctttaacctaatgttgcaacgcacggggtttacatgtagtcatatgggcgattatgtaaattgactaatcaattatcggcaaaccggagatgcaaactaagtggtagcttgactaagtaattaactgcgaggaaaggtgaaattatcgcaatcaaatatctttgtatgggaattcaaaattaaaaatattgtcacacagaacagatagttaaggataccctagcttgtgcttaataggattgagtaagtgaaggtggggggagggacagtaggtctggtttatgagaaaaatttgggcgtccccttaatatgattcactcaagagcatatatatattgggaaagaaaatggggaagagaaaatccatagtcgtagttaagagcagttaggtatagcagggcatgtacaatggccactgatagagttgtagaaagttcttagccttgctaattagaaatgttgcttatattgaagaaagagaaagaggagagataaaatatcgttgctataattaataatggctaagcaataactcttagcctcaatctataaaatggaaactcgattgcattcggatgacaaaaaggaaatactagtaatgaagaattattttctaggttaatggttagaacccttcatgtctcaattgttataggggtaaagtgagactattatatattccttaagaatattcctttggcgctctatactattatgaagccctgaagatgaaagggttgcttaattgtatcctccaacaaacaacttggtgagtatatcccagttggtattaagaaagcaattgttgtgcgttgtatgtatagatatgtcacggcgtcatgtacgcatgcaatgcaactctcatcaataaattaattaccatatgtatgtatgcatgcatggcgatctttttcgcagtatacacacatgtcgttagcatgcatgggaagtcaagccctgaacatcgatcgcctcatgcatagcaatgctgaacagtgtacaagaaaaatgatctagggaaataattaatagaaacaatgcagagtagtcatgaaatgtactacctccatcttaaaatacttgtcgctttaagttcttgtttgtaacttttgattattcgtcttattcaaaacaatataatttttttatttattttgtttgtgacttgttttattataaaaataattgaagtatgacttatttttttttaattagtagtgtggaactttttcgcgaacaaacaaaaaggattacatttcaatatattcattaatgtggaattgtggatgcgcgataattacacaatgctagtttgcaatgatatagtttgctccaaactacagtaaaaccaacagtatgaccactcagctaaaccatctgaattaaacactgaattttatatgaaacatatacagtgactccaataaaaattttccgtatttccaaacgatcgaagcctcagcaaccaataaattaaaggagatcaaaagcggtttaccactactgtaacacatgcttagctggttgggttctacggtcgacacatgtcaaagtttcagcttcgatcaatcccctccgaaagcgatcgccattattggccacacagaagcttattagcttagctacctagtaatcacatcgatctcgatctatctcttttcagtggtggatgcaacatgatcatgataaagccattagctagctagcgatcgatggaaaggaggtgagatcgagatcgaccattaattccttctcctacctacaactcgcccctgatcaatatgatcatcttcccttaattaatcaacggatcgatgatcgaaatgatgcgtgaaaacaacacgtcgtctccacttaataacttgcctggctgcttttaatctcactcactcagtcgatcagtgtgtgtgtgtggtggtttgttgatctcatcatctatcgatcgccagagtctaagcctactcgttttagggtaggttacctaggcgcctctccagcgacgacgccgccaccgacgacgacgaccgcgacgacggcgacggcgaagatgcagagatcaagctagatgcatatatcgatcatgcacacacttgccttggcatgtgattatattgtttacatcgtggcatgcaaaaaatatggatgaaatgacaactccaagaatcgcaaacctgaacacgctacttaattcgattatcgatcgttaactgctcttgcagtcagcttgaattggttgcttattctcatctagctagcaatcttgactactgttacgtacgtatatcgatcgatcgatctagttggccatcgaatatatgtcgataattatgacaatggatgtgagcttagatatatctggccttaatcatgcccatctcctttacatcgatcttgactagctatagctctttgcttcgatacccatctctctctcagagacacacacacacacatacacgttccaattctgcacgtttccacattattcccgtgagaatcgtatcagaatatattaattcacactgaacttttgattaggattaatccaagttagctagctctagaataggtgcagagagataaagagctttttcacagcacataatcttaactaggaccaaattaagagagaattagctagcttcgtactagtatgtacatatattgtgtgcatatgctggaaactaagagatgatgcatctgcctagtgctagctagccagctattataattaggagattcatattcctttcacataatataccactctagctaggtaatagctatgccttaggtcgacctttcatccgaacaatttttaatcaacgtgtttagttatatatagttattagtggtgttaatctagcaaggctagcaacttgttgcgtacgtaaatcaccaaggaaaacaactaatcttttgcattaatttaccaatcgatgcgtcgacgggttaaacatatatactaaattattgcacacttacgacaacctcccatgagagggaaaacaagtggtttcttgatggatcaatcatgatttatataaagtatagaatactaatatatcatcaatcgcatacactagcaacagaatgaattcgatcatcagttgctaattaatagctccgcctatctcgccgtgttcttgaggtattccagaatctggtagtgtgtgaaacaggaaagcaatctagcgagcacacatgatgcttagacgattctaattaattaattaatagttaattaattaaggcagacgtgttacgtctgattttaacggaatgcacgcacattaatcagttgtttaatttgacaccccacaacatacagaggcttgggcgcacctggccggttttgatgattaattctcttccaattaacctccaatccatgccagagacttgacaaattattaatctaatttgtttgtacgtgtgagctggatggtattgtgtaaataggttaattaattgctagttgggactgaaaccagccaggttcatgcatgagtacatattgttcatgcaagttacgagttttgtagggagggaggagacatcaaactgtacaattcgactacctgttgcaacgaagaaagattaactaatgctcctacggatatatagtttggtgagtagactaagccatatgttttaagtataatgccatattgccatccattccatggcattgggtcatcatgtgtgtgcacatgaagctgacggcaccaaccgtctactagttgctaagctagctactagtaggaattaataggagatagagcaacatcatgtgtctaagttgctgtaaaacaattgtaattaatattgagttcctgcggtaagctaatgcaaacttcttgtttatgttaattattaactaccagtacacctagagtttttctacgattcttcctaccataattcattgtacattccaagttattgtagtttaacagtacttctggcacaatgttgacacctcctccattttttttacctttttgactttcatgcatggtatattggtatgagagatagactttgaacattatttttatatctttaattaatatttaattaaaatattacaatattgcagaaacgtttccaatggcaaatttaatgatatatttttcgtataataaatttggacagttttaaacatataattctaaaaaaatagagttatgttagtcgtatggattttgaggtatcaaaagagaaaaaggaaaccaccacatataacgaagccaaacatgatatcacaccatatgagattaaaacttaatgataacagggagccacaatattgattgacgagagattagatctgctaaacctttacctttacgagatattttttacgtacactctcccctaaactagtataattacaatgtatcaagatattaatgtcccccggccgacctacctagagcgattattctattctacaattgtcatatactagttataagagatggtgtctctctctatttaagagagacatatagagtcctactctatttttaacaactccaaatcttattttacagctacatttgtacatatattcgtattcatcacacactttaatgtttttctacatagtcttccaaagagtgcagaaaattggccgctgctctcaacgtgccactgcacttgaagtttgtttcgccgctgtacgtacatggctacaacagagttcaatgagagagtttaatcaagcataaatatctagcgagcttaataaaaaatgattaccatattttaattcaccgtgctgcttgtcgtttaacgcagatatctacttgtgtaaacattcgagtccaaggtttcaatttttctgccaacaattattttagagcaaagtccgaagtttcggatgctttgccggcctgcacagataaccatcagggctgcaatgaaaaggccttttaaccacgtattgagatgtttgggccgtatactctacgtcgtgaatctaatgggcttagctcacatgaactttgggccgtaggcgtatgtttctgctcatcttcttttttcccgataatatagagctatggaagatgcgcatgtacactcacatattttggaataagtcccatttcacacatgctcaagaatatatttcgatttatcatgacaaggaaatagtaaaattgatctctcgagattttggcacacagcaaaacagagaaaataaaaatcttccttcgagagagaactgtctgatgtatgcagttcgtcttcctttaactgaatattctgttcagagtggcagctaatctgacgccgccttgcgctagcctgagattcacaaccggcaatctgctcccgaaatatgcatctgcaacagcagcaatcaagagcaataaacccgtggtcaggacattttctgaagtgtttaactctgcatcaaacgtaaatggcactgctaatggtagtattaccttccaggagtgaatcttctgtcacgtccttgtacgcccagtcgcatgctgcagcgatgctctcagatgcataccttgcatatatagttgtaatcagttacagccagaaatcaatcaagttaagtggaaattcagaaatgaacttttggatgtgaaagcatacgtgtctgggcatgtggtctggttcttgctgcattcttcccatcctggcactcgttgtgaccattctccctgaaacatcaagcagtaagtagatcgagctgctagttgcctcaagcacaccagaaaaccatttttcataccgttatattctgcatcagtgcatcgacaaattcagccacgccttccccatagtagtcgttttctgccgttttgatgatgttgtcatcccaaacctgaacgacaataccaaagacaaaggattcctaattgattttgtcacagtcatatccatgctttatctgatttttttttcttttgggaagtgggatgctagtctgaatgctttttgcagtgggatgcttagtctgaacattggacttacatggtggagaacagtcttccttgtataccagtgcacatcaatggtgtttcctcctttatcggaggtaaaccccacatgaagcggctgtcatctccaaatgattaaacactaattactacactagtctactatacaagtacttacagagcgtactaatcacatttttttgggtgtacctggtggatgtcccccacaaagtgtgcaaggaacagaagtgcttgtgtcaggttatctgaagaactcaagatcagaaacttatcatcagcctgagactaacaaggcaaaaaaaattgcagaactgaattaaatggagcagtattacattgagtagaaggggatgttgcatcataggtgaggagctgggaggtgtagttgttgatggcgccggcgacgcacctccccctgaagctatcctcgtccttgcagtctcctgacaatgcaacacaagaaaccaacatgatgcatgctgctacaatgtgacagcatgtccatgcaaatttcagtcgaatttgaggacaaaatcaacaaactgtcgtaggtgtagctgcagaggtggtccggggtgtcgatgtagtggagcggcgccgaccaggggtacctgagcttgacgccgtcggcccaggagcagaggctgctcaggttgcccccggcgtacgacggcagcaggcccctcaccgccgcggcggccgcgtcgctcagccggccctgcacgagacgagacgatcaga

SEQ ID NO: 8379 - DNA, 48435 bp, Oryza sativa
tccccggcggccgcccccgccccgccccgtcgttgttgacccggccgctgttaacagccccgatgtgcccagctaccagccacacgtatacggccgcctcgacccgccctagctcatcccactccacaggcgtgagtcacctcgttggaggccggagagggaaaagcagaggggaggggctgtcaggtgggatctacgttgcttcccatgcgggcataccacgaaggcacgccacataagtaaaagtggcaaatagttaagaaatcatctctctccaatgtcaaattattaagcgcaaacctaaaaggaacatttggataattgccaaacctaaaagtggtaaatagttaaattccccccccccccctttttccactcttcccttgcctctactgaatcatcctcggcgagatggatttggcaagagttcagtggctcgtctcggtgtacaaactaagtgaaaaggtggaggaaactgccatgcatatgtgcatccatgcctttcacaaatgcatttcggtaatctgttggtatatactccctccgtattttaatgtatgacaccgttgactttttaatcaacgtttgaccattcgtcttatttaaaaaaattatgttattatcatttattttaccgtgacttgatttatcatcaaatgttctttaagcatgatataaatatttttatatttataaaaaaaatttgaataagacgaatggtcaaacattgattaaaaagtcaacggcatcatacatttaaatacggaagggagtagtagataacaatgtcgcccatggaggagctggcgattttgcgccccccccccccccctcctctctctcctcttgccaggtgaggatgccgcgcatgcactaccaaatgttttagagtataatttgttgctggggtttatggaatcgtcgccacaatgttgttttgcacgtactgaataagatcctgtttagatgggactaaaacttttaagcctctatcatatcggatggttggacactaattataaatattaaacgtgactattaataaaacccatctataatcttgaactaattcgcaagacgaatatattgagcctaattaatccatgattagtctatgtgatgctacagtaaacattctctaattatggattaattagacttaaaaaatttgtctcgcaaattagctttcatttatataattagttttgtaagtagtctatatttaatattctaaattagtgtctaaatacatagactaaatttaaatcctagatccaaacaccacgtaagtcgctacctcgccttgtgactatattgaagacggcacactttgggcgagcatctccgacgatcggccaattattctcttggaaggagttactttcctcctctcttccataatttgtacccctccgtattttaatgtatgacgccgttgactttttgacgaatgtttgatctttcgtcttattcaaaaaaaattatgtaattataatttattttattatgacttgatttatcatcaaatgttttttaagcatgacataagtatttttatatttgcataaaatttttgaaaaagacgagtagtcaaacgttggttaaaaagtcaacgacgtcatacattaaaatatggagggagtaatatgtaatttgaacgatttgctgtgtggattttccctctaatttaataaaattcaggtatgacaaccccctccccctcctcccggggacgggtttgatattctaaaagaaaaaaaaatagcccatttagtaccggtatgtcacacgctaccaaacatgccggtgcacgctgcctgtgacggcatagtactcctttggcggtagcagaggtgtgtgcctgttggggcacgcgcacgtacaaaggcaaagctaccatccaccgtccaaactcggcgattttgccttggattcgccaaattgactgacgtgcttgctgctgtcgtacaaaccgtccgggcgatcgatcgaggtcgtcgatcggttccgtgacacgatggaacggccaggcatgttcatcccgtgaacgatctcgtagaccacactgtctagtacgcatgagtcatgacacggctactggccgtgctacactgcctttgtgcctgggagtagtcccggccgggccggagtgtcacgcagcaacacgttgcggcgcgccgacatatgggaaagggacgtgaccatgtgtgtgattactgattagcaatcggtgtgtctggactgcactccattgctcgcatgttgtgctgcatgcctgcgttgcgttggtcgcttgctcgacctggctggcattgttttatgggcaaccgcagttgcatgcgcaatccaatccaatcgatcgcagccgatcgtcgcttttgcctttatgtaggagtgagtactctgctccaccctcgctgaatccttttctttgactactgctgggccactattccggctaccaacacaaagaccagactggctgtcagttaaaagcggctccaatgttcatttgttcggtttccggcctgagcacgagctactccagctgttgccaatcattaggcgccactaaaaatgattccggcggagattgcgcccctttacaacgctcacgccgtgtcccttgatccttgtaacactgtataattacgtgcaccattgcgcacgcacggatcacgccgtaccgaatggcagtgtcggcagggatacgttcgtacagcgagacggagacggagatggtccagtccagccacggtgggcgacagggacgcctgtggcaaccgtcggcgtcgcacgtacatacagcacgtaccgacggaaagggatggcagtggtggtggtggtggtcacaggctgtggtggcggagggcggcaaggcaggcaggcgagcgaaaggaataccgagacggagaccccaatccgtgcgttgcggtccatggctggtacgtgctgcgactgcgatccggttgcggacggtccagccagcgccagccacggacggccaaagtttcggctggatcaccgggtcgcccgcttgggctggaccaccggcggcgacccgttgtcacgtgacggatggctggattgatgtaggactagtactactagtacgatggtagtacgaatatgatatccatccaacgtcctgcgtgatgtgtgcgcggtggatgcgatgcgatgcagtcggcagccagggcagaaggcagcagcaatcgttggttccatcgatcacctgggttttggcttggcgcttctctccggcttttggcgggcagctagcgcagcagcttctggcgtccgatggagacgcgacgaggccagcccaaccctgccgccgcgccagccatggaacagtacaacttgtggagcagtagtacgtgcaccatcgagatcggttttggattctgattgcacggaccgatcgacgcagagcgctgcactgccccgcaccggccgcggcttgaccggacacgggcctctgcactgcatgtgaccagcgatccggactgccagggaacgagaagacagatcagtcgccggaaaatgtcaggtcctcgtcctcgccatgttacccctaccacaactgctccctgtccagtgtccaccaccacggtaaaaaaaaaaaaaagcgacgaaaacgacaatgcgcaccctgtaaaaataacacagttttttttacagcggtgattctgacccctttgaaggctcatccccgacaggggcatgcgagagagagagagagagagatcggtcatcgacctcgatccacgagacggtggcagtctggcatggccgaacagagcattggacgtggtgtgcttgcgcggaagccttatcgcggacgctttctctgacgaccctttcactgcacggtggcccccgccgttgccggcgaagtactactaggcctcggctcccggactctagaccagctacggcttcctcgtattgggagggacccatccacacgcaggctttaaaatatcgcgggaaggaccaaaaaaaaaaaacaagaagaaaacgcctttcgccccaaaccggggcttggctcttctgtagctgcacgggtttcgcggcaaaagtagctgtccttgcgttggctcgtggcttgtcgatctcgcgcgcggcaactacggatcgtgcatggatggacgcggagagcctctcgtgtgctgaaccgcgcggcacaccgcaagcgagagttggttagtctttggccggggctcgaactctattgatcagagcaagtacaccgtcttggactctgccagtacagttttggtgatgtgcagtgcccggaaaaccgggctaacgtccaaacggatgccgagtattggcaaacatggtcgtcgtcgcatcacgtacgccactagccaagccaaatcgaggaaattattgttggtgagcacataaattccagaaaagcaagtaactccgtcgaccattctcggtgtgtcggcacgatcactttctacaaccgcctgcgccaacgatcgcaaaaacgaatccggaaatccaccaccactaagcgccgataaggaggcaaaataaaggtgatacgaaaggcttgaaccggacatccccaacaaacctcggcgcgatggtgaaaccgggcatccaagtggatccgggcttgcggcggctgcggaggcggtgcggtgggtttcgtcgcgcggcaatggggtcgtgtgtcgtcgtcagtcgcgggtcagcgcctcgagcggcacgaaaggtgcggtgcggagttttgcggaccgcgaccgcgcgctgcggctgcaatgcaactggcctgacctgacaacggcgcggcgcccgctctgtgttttggggtccggttggttggctggttcggcgtcgcgtggtgtgccgttcggcaacttgtgctctgcccgcgcgcggcgcggctgcagctgcatggcggccgactcctcatcgggcctcggcgcggcgtggcgtgatttggcgccgcgcggctcacgagtgggggggacgtgacctgacgtgacgggagccgcgcgtcgctttcgggtgtcgtccggcgcggagcacggacaaggagcagagcggccacagcaatttgcagtgagataaccttccagacttgagataaccttcgcctgccgactcgattagcacgaggacgaggagtacgtacttgacgtcgacatcgcaactcagaatcggttcgaggacacaatttgcaggtggttagaaaaagacggaaccgaatagactaagactaaaagattcggtcatcaattcggttagtcttctcggttaactgaatagacaaaaaagacttaattatagaaaaatatctaaatgtaacctataatccactatgtttaataggattaaactctaattttcacactcctacttcttctaagcatgtaacctaataagagtttttactcataagtgcttacgatttttttttgtgatttttgtgttgaaaatttccattatttctttgcatatatgaaaatgttgttaaatttcggtttggaccgagaccgagattgagactgaatttgtcggtcctgatatttttgcgctgaaattcggtcttcacttttcaaaaactaaaaagaccgaaaaccgagaccgaaattttcgattagaccgaatgcccatccctacttgataaccttcgcccgtcgactcgattagcacgaggatgaggagtacgtactttaccactttaccagctcttatacataatcagattaatattcaaattagtactccctatgtgccaaaatataataatttttagctataaatctagaaacacagttatttcaattcatagctaaaaatgcttatattttgggacgaaggtagtagtttttttacagaggaagtaatactattatctgatccatattaagtttatttccactcatactatcatttatctaaaataagtttccttttaaataatcattgcatagaaatttatgaaagtagagaataattgtattggaaatagataaagtggtgaatagttgcattgagatttgataaactataaacattcaagtctttttgttattttttattggaatgcatgtaaaattaatttattctaaatttaagtcgttgataaacgaaactgagatgtgtagagcggagaaatacgcgcatttttcatggcaaaatctaaaccgagaagcctctcagtttagcgttaaccagcgacgaaccaatttgtaagaaggactgctacacgtgctgacatgcatgcttgtttttcctcttagacatgcatgtgtttttcttccttcttataaaattttctctcaaattacttatccgatctaaaattcgattacaccagtgtgttcgttacaattaaatcttcacaaaaagatcttacatgattatattacgatgaaaaaatatttatatttttgaattacttttattataacataagttacttttatcatatatatataagttacttttagattcgactaagttacttcttagacatataaaagtaaattcaataaagtctaaaagtaatttatatatattataaaagtatcttaaaacaaaacggaaacatactatattgcatttttcaagttgaaaggaaacactagatggagtacaaaccagctaccactagttgtgtagtcacgtccaatgaaaaaaggcatgcattaaagttactttccttttgttataagttacttctataatatatgtaaattacttttaaaccttattgaatttacttttatatatcgaagaagtaatttagtgaaatctaaaagtaatttagatatattataaaagtaatttataatttttcatcaaaatataatcacgtgagatattgttataaagatataattgttacgatacaacggtgtaatcggatcgtaaattggatgagtagtttaagagaaaattttatttgaagtatagatggataggaactcttatagatagagtggtagctgatttagacaaactagttaccactagccgtgtaatttttcagggttgtacacaactactatgcctctcgtgacgtgacggtggtggtagccacgcactatcccacctttgtatttggtccacaaatgttgttcacgggtttgtcaaaagtttctgatgggcttatttccttatgggccacatgctgcggtatgacatgaccattccttatcaagggcttcaaataactatggcccgaataattttcctgatgaaccaagcctgcagcaaccatcggtttgtttcgtaccaaaccacagagaaaaattccgaacataaaaccgtgaagtaggtcacaaaacagctttccaaaaaatactaaaacgttcaaatcagagttcatatgcaaaattcactcttatcatttttgtgatggacagtctaagctgtccaagcataatccgaattaaattcaaactttgttaccttcgacttcctcctttggaaagagtaaagagacgggagatgtaatatatttctactagggactgcctatacattatgtgacagattttctagtattatctactctctctcaagttagtaccactctctcaagtattcgtgagggcattcgtaccgcaaatccgcaatctagccgatgttctttcgactgtctcccttgtgcgcacatgtaagagtcagaaagaaggatatatgtttagaatcatgttttatttccacaaggattcaaatgcagaagagaatcagagatggtggtgtgtcgttgaacacgttgacataaccttgctgatctagaacctaaaataatcagagagacagaatggagaaatgcagatgaaagcataagaaagcttcgatctatgcttcgatctgcatgttccaagtcatggtgaagctcttgcccagcggcaatgccagccctcccacctccaccatcacgctcttcttgtgtccctccacgtcgcggtgcccgtgcagctccgcctcggcacctgcaaagtacggcctcgacgttgcaatggcggtggcgttcgcgccatcgacatggacggcgaggtccctgcctgttccctccagtccgagcacggacagcttctcgatgaggagccccttctgcaagctgtagctgcctagctccacctccgacctcaccgtcaccgccttgccgcgcaccgtcgcgtagaagcggacgtacgtcgcctgcccctccgcgagcaccatctccggccgctcgtcgtcgtcgacgtacacggcgccctcggcctccgcctcggtggcgccgaacgggaacgcgaccaccagcgtgaacggcgtcgcgcgggcctccttggagatcgtcccgccgcgctgcatcgggaggatcgtgttctggaacacgtgcacgttgatctcgttgagcggcgcgtccagcttcacggcgccctcgcccctggacaccaccaccttggtcgtgtcgaacaggttgtaccagctccccggcgggaacatggcgctcaccgaggtggcgccctgctcgagcaccggcgacaccatgacgctcgcgccgagcaggtactgcgtgctcagcccgtagcacggcgtgaagtccgggaacgagaagaacaccggccgcgccaccggagcgccggtgagatgcgcctggtagttgagcgtgtacaggtaagggagcagcctgtaccgcatgccgagcgcgttccgagccgacttggccacggactcccacacatacagctcctgcctcggcgacgcgaagttggcatggtccctggagaacgggtagaacgcgccgagctcgatccaccggttgcagagctcctccgtcggctgcgggtagaacccgcagatgtcggcgccgaccatcggcatgccgaagatgccgaagttgagcatggtggagatggagtagcggagattctcccaggtgcccttgttgtcgccggtccagtgcgcggcgtaggcgcccgacccgacgaacgtagagcgcgtcaggatgaacggccgcttgccctggagcccctgcagcgcctggtgcgtcgcgatggcctgcgagaatccatacaggctgtgcgcattgtactccaggatgccattgtagtgcgtcgcgctggtggcgatggtgttgaagccgagccgcgccgtctggccggaggcgttgatcttgtacggcggctcgtcccacctggtgttcgtcaggttcttgcagtccaagcagcacacccatggcgtcgtcgtgttgggcagagggcacaggtgcgtcgtcgggatctcgcatttcccggtgcagaagttggatgcctcgttcatgtcgatccagaggccatccacgggcacaaggtcatgaaacctcctcacctcgtcgatccaccacgagacgccattggggttgaggaagtccgggaagtagacggggccgggccacacctgcgccaggtatggcttcccgtccagcttgatgaagacgtcgccctgcatgccgcgctggtacacgccataggtgttgttcacggcgatgccggggtcgatgaggacaatgtacttcatgccctgtgcatggatcttgtcaaggaattccagcagcttgggacgcgggtagttcacgggatcaagggtgaaatccttcgcggcgtccatgtgatcgtcgtcgttccagatcacgtcgagggggatttgcgcgttccggtagccctccacgacgccctcgaccactgacaagttcttgtatccccatctgcattggtggaaccctgagaacaagcatgtgagaagaacattagagagtcgcatcgttatctgaaacgaattatttggtatttgcatatttgttttgcagtacaatttagagcaccgactctgcatttttttttgttggttaattactgtcttgatctgatcctgtgcagcgggagccatattttatcgatgtgctgacagttaaagttagtacttatgatctgcatctggcaatatgtgcatctaaacagtgtttactgtcgtgataacaagggagtactactttgttgaaagcaaaatgacaacacatggtattgcaggaaatgcctaggcaagacaactgatgtgttgctgattgtttctctcgtctctgatcattttgagtgagctgggtagatcagtagggcactagtataacttatgaaaaacattgtcagtgtcatattctacagagtaacaatgcaactccagaaactattcctagcagctggcatgacttcattctggagtagcatctattggaactactaaaccctgcaggggaatattgcatctattggaaaccagttactaattgcaatcaactactacaggtgaaaaatgccatattgcatagtaagaattgactgaagacaaatgaacccacaatcaaactgcccccctgctgtccccaaattccaaaaagcctaaattagcgtgtgccatgtgaccaacatcccatacccctgctgtctccaaatattggagatttggagtatctcatcattgaatctggatggtactactataaaattagctaatcatagtactaataaatatactccagtattgatggatggatcaaactatacagacaaaacaaaactaataaaactaccagacaaaacgtaattaaaggacaccagaactcatccaaaaatgatgaaaaaacaaagaaaatgaagttgggcagtagttaccaaatgcccagtacggcattggggctggtcgtccgatcatggacgtgtactgatccaccacggccaacggcgtcggcccggagaagaggtagaaatcgaggaggccaccgatgaccttgtacgtcagcgacgtccccctgtagaacacgtccatgccgttgctgttcagcagcagcacggcgtgcgcgacgccatggccgccacggctcctgaggtccacgtacaccgggtgcgagccgtagaggtcggtgttgaggttgatcgccgagatgtccgtggtgtagatggtgtacgggtcgttggggcgcagccggatgccgcccggctgcgtgttctcgccgaggccgtacagcgccgcgtccctgggcagcgacgtcgacgcctcgatgtactggtccttgaacaccagcgcgccgcagctggtgttgaagagcgcctcgcggctggacttccggtgcaccgcgaaccagaacgggtcgcggccgtaggtgaacacgagctcctcacccgggtactcgccggcggcgaagggcacgccggtgatcctcccgccggtgacgggcggggctggctccctctggagaaggttgtaggggacctcccacctcggcttgtctgcgtccgtgatctggactcgtatcctgtccttggtctcgtgcctgcgcagcattgcaatttcgccattagagcgctagcgttgaatatgactcagtaatctttagaacatatggaaatcatgctgtgaagcagcaggagcacgatgagtacattgtaacataatatataaaaaaaattgagcaaagcatcgaacttttgtggtccaatcttacttcttcgagcagtagttcaatcgagcttgattatgatatgcaagatcagaaatgcaagtcgttctttattactattgaagaaaagatgcaactaaactatcaattgttacagccacgaacattctcctcaaatgtaagtactatcacttactctattagataacaattgggagggagccaaatcaatggaacatgtatagaacactgtgcacagaaagatcaaggcatgtggaatcgaacaacaagtgatcactagtcgcataaaaaagattttactctgttcttacttgacatagagcctgaggagagggatgtccgggccgtaggtggaggtgcgctgcttcacctgcaggtatccaacgagagctcctccctcggggtgctcgaccagggacacaagcttgtacccggacccaaccttgggtggtgctgcggcaaacacgccattgctgctcgccaaggtcaggaagaggagacacaacgggatgcaggagatggccgcacgggacgaagaagagagagacgccagcatttctcgcatttcttctccctccttcctctgttaatttcctctcaccctctccctttgtacagagagagcagtagactgtgtcacacacacagctcacagctcatctgtgagcctggagataggagaggagaggagtgtgtgttgtgctgtgcatacgagtaaatgtgcagggagagggacgctgagcagtgtcagtactcctcctctactgcactgcatgcattgagtggcatgcatgttcattggatggggcgctttttttctctgttttataggccccatatccaatcggagtgctctgtcgctatgactgacagggggtccagctgagtgatactgtgatactagcgcatcaccaatcggggtattagatttaaataaatcaacttttattataacaatcctcgcaatatatatatatatatatatacaaagtagtattaggcaaaaaagaaaagaaaagtagatatagataatattgtttactttatatgggtatcttttattatttctcttacataatattattagatggctgaataaaatattactcgctctatcggtcccaaaatataacaaattttagcccttacggtttatcccaaaatataacaatttattcaccaacattattttctcaatcaattacaaccctccactgttcaatcttcttacctacctccccttctctaccaagcataatattctctcatttaattctacgtactttcttataactcttgtccaaccctaaaaaaatccttacattttggggcggatggagtattacctatgtactatttttgcaccacattgttaatgacataagggaataaacaactcttcctgctaacgtgtgacctcgctcagccacgttggcgaagagttgacgtggaggagagagggaaaaaagcgaatggcttgcaaaggtttctcgtgtcttatagaaggcatgatagcctcgacacatacacgtagtgagtagagacatggcctgagcatcttgttgtgtagcttcgtcgctttgccacgtgttccacaattgcgccaacgaccgaacaaattggatctaactatagtttcgaagaagagaggagtatgtaacaattggaaggcataccaggatgaccgagaggaccttaccacagtcgccatcaccattgggattgctggcaagagctcatggcttgatgtttctccaccctactcatataaactggagctcctcaccttttcccgtcgcattcgtcatttttttttcacaaattgtatggtattctcacatgattcaaaaggggattatgaagtcaggtctagggctcaaactgccgatgccttgtgccatcattgagtgggaggatggattgcactagaatgtgaagaaattttaaaaataggttactgatggggcaattggtcctctggaatgtcgttaaatgttgaacggttgatgcatatacttaattataaatggaaaagattcttttatatatgttaggagtgaaaaattgtaagaataaaaaatcaacatcagttataatgctaaatcattaattatagtagtatgttatactactattaacatactactatatatgagttatttgcatgatgattacgtagacactagacatgcaagcgggccaacccgtgaacccgcttataggtaaaattagtgagtaacccgcgggttgacttgagggttacctactaattttgacctataaataagtttatgggttaattcatttgcatctctatgacgtggcaagtcgagctatgatatgaaaacccacgaattatttagcatacactccctccgtttcacaatataagtcattctaacattttccaaatcatattgatgttaatgaatctagacatatatctatctagattcattaacatcaatataaatatggaaaatactagaatgacttacattgtgaaacggatgaagtaagtagattcgctggtcggcccacttgcatccctactatacttgtgaaccactgatcatgcttttagcagtgccaatgttgcaacggtggagtacatctgctgatctgcatgcatccacctggctcaagttaagccaagcacaagattgattaaacaaatggatcgaaagctgtgtttctttagctgtaaagataaaaaagaatggtgtcaggcacgctactcaacgatagattggagaatcaccgaaaaacagaataggccccagatcgcaacaaatgtctatgtgggcatgttcgtcctcgaggtgctacaaccctagtacaaccttgggcacagcaacacgtcagctttcacaactcactactactagtactggtactgtacttgcacaacatttgcaagaatgattaacagaaaacataagcacgtaattgcaaaaccggaataagaaaataaatgaatggcggcaagacacgtagtaaccggcattggagacgagaatcgcgactggaacggatagcgagaggctgagagcactggactgcacgcgacatgggcacgcaccttatcatctctgccataatatcttgccggattggcggaccacggcggccagccgcgtgcccggccgtgtcctccatcccttttgttcactcaacatcagctcatcaaccatcatcatcagctgcagatcctgtaagtggtgtagcgagaggatcatgaatgataggaggagtattttgattgaatgccgcacgcatgcacgcacatgcgattgtgctcgcgtgaatcgatcgagcaaattaagcggaacgacgcacacagtgaagcaagcaatcggcgcgcatgggcaactgacagcccatgcgtgaatgatgcttcactcatcgacgattgacttgctctcgctggcaatggcattcagctaagctatagagagatgttaaatttgacggatcaaaaatggacaaggatcctccaagcgcgctgcgtgtccgagaaacgcggtacaaggtgacaaagctggaaccaccgctggctcgtcgcatgcgcccacatcacccggcacgcacggccaagttaatttggacccccccatcttcaccaaacacacatcacccctttaatcttcacatgaaccatggacaaaattccaagttataaaggggttgcaaggtttgaacaagcacacgtacgcaagaggttgctgctacggtagcgatctagcgttgagaatacgttgaaaagatcccgttccggaagaggcgcttattacgtttgtaagttggtgatcacgcggaaggatgtgtgggacaagtggtggcgtggcaagagcgatcgcttgcctgtgcgggtatggaccagataattaggcggatggcccctactggctactagttgtagtacagtttttctctttgtccattgcggcgtctgcctgccacgaccgggccggacacgacgcactgctgcctcccaaatcccaaaggccaaagctcacatgtggcgtgcgagaccaccgctcacgagacggcttggggttggacgcacgctgcacgtggccgtgctgctgcccactgtaccgctctctcctcactgtgccatctatgggggcatatatgcgagatttcagaggcgaccacctgtgtgtgtaccccggcaattggcccagccaattcggcctagcaacatgtaaaaggagagcagggggcagcccatctgtagcgggccgcgacgacgaaatctgggctggcgcctcgcaggcccagacggttggattctcccactatggatgaaaacggtccaaaaacgatatcatttctatggaaaactgtctcggcatggttgaggatttttcatatttatcaatttaaatatctagttgttccatacgatgcatatatagacttttttaaaaaattatacatagtgaattacaaacagttggaaacagtcacacttctacgaaaatggtctggaattgctttaccaaattcaagtgtccctctagccaaaagataacatatcaaatttgatatgtttcaaatcagaattttaattttaacgtcgatgtatataaatatctacatttgatgcatagggatcatattataagatttatcttgaaaatactacctttataaacttatagactatatcaggtgtcaaatattttgcattcgaagttaggctgtgtttagttcacgctgaaatttgaaaatttaattgaaattggtacgatgttatagaaaagttgtatgtgtataaaatgtttgatgtgatggaaaattggaagtttggaaaaaaacttcggaactaaacagagccatagtggtaaagttatggaaactatttgagagacgatataatgtacaaaggtcatttattattttttaaaacgaataggtcaattattttttgttagaggaagtaataatctacatccatgtggacctacaaaatctaccctttattctccataattgtaccttaaagctaaaaaacgcactcattcggttctagtacgaagctggtccaattaatcagaaaatgaatgagttattttttctgaagtcaaaatgtcactcgaggccaaggtggaaagaggacatgacaactaatggaagccatggttttccccctcttttcggtagttttcacttcagcctttagatgattttcttttgactagctaaatgctcattctttgcaacataattaaaaaataaatcacattattaccttttcaaatgttaatagaaaaattcatattttcgttggaattctatgtgaattgttgatgctgatccaaatggctcactgtttaatataaagtggtagatgacggattcacttatttgaatttcaagcacaaccgtgattacactgacaacatgtatccgcataagttagcaccattgagattttttaaaggagtatccgtaaaaaaaggtataatcttaactataaatctggacattctacttgtccagatatatagttaggattggattttttagatgaagcatttagtaaattacatcaccaccatcaaacacagaaccaatattttttttaatatgtaatacaaaacaaagggtagttaaatatttccatgactatctttatatataaaaaacacctgaaagcctaaaatagccaaaaatgtaagcgaccctttgcaaccgatttcaaaggcataacaatattgtatgcaatatatttttagaagcacagtacaaacgcggacactcataacgtgttcacactcctataaatgtagcacacgcatcctacccctatgaacacttctggaaaaattgagtgccgtattttgagattaacaaagtcaccacaaatatttacatcgtctatcaatgaaataaattaattagtcgtaaatacgagcacccatgttaagtatagtactctccatgtagtattgtagtagcattgtatagcaatattagagcaaactaaaaacataaacataatatgtatggtgttagatagttttgtatcaataaaatcaattttctcagtctatgcagtcctagatctaattacttttttttttggtatttctagcattttcgagagggagaatattaaaagcaaagaaaacacctcaccggaaaaaaaactagcaacttgccacgtaaagatagaagtaaaatctattcagagaggcctctcgtttttgtcttaaccagcgacacctaaattttgagaaaacgtggagtactcgtactatatgcatgcattttcttaatagacatgcatgtatttttcctcttcaaacaaaattttctctcaaagtacttatctgatctacaatccgattacaccattgtattcgttacaattaaatcttcgtaacaagatcttacatgattatattatgatgaaaaaatatttatattcataaattacttttattatatatctaacttacttttatcatatatatataagttacttttagatttaactaaattacttcttagacatactacctctgtttttcaatagatgacgtcgttaactttttctcacatgtttgaccattcatcttattcaaaaattttatgcaaatgtataagatataaatcacacttaaagtactatgagtgataaaacaactcataacaaaataaattataattatgtaaattttttaaataagacgaatggtcaaacatgtgagaaaaagtcaacgacatcatctattaaaaacggagggagtataaaagtaaattcaataaagtctaaaagtaatgtacatatattataaaagtaacttaaaacaaaacggaagtaagtttgtcatgacactataagtaaattcgttgtagggataaaaatatgacttcacgtccaataaaaagaggcattcattaaagttactatctttttattataagttacttctataatatatgtaaattacttttagactttattgaatttacttttatatgtctaagaagtaatttagtgaaatctaaaagtaatttataatttttcatcaaaatataatcatgtaagatcttgttataaagatttaattgttacgaacacaacggtgcaatcggattatagatcggatgagtagtttaagagaaaattgcatttaaagtatataagtggatagtatcttctcttagatggagtgatagctggtttagacaaaacagctactactactgtgtagtcacgtttaaagatagaggttgaatggtctctttgttaacttttagatgataaattacatcatgatcgttttcatcggattaggtctcaccataagagacatctcttgcccttacgtctagaaaagaatcatttccttgcttgatttccccgtttatggacgtggtgctccggcaattgtgcaccgcaaatgccgttcatcgttgtgcacgatagcgacgaaacaaattaatatccgtgcaattatgtgttgatacaatcatggtgggcagacgaagaaaaactcgttgtgatggctactagcacgtacgatagcttcactccatcgatttcagccaacgggaaagttgatcgatagcagaaaaaaaaattaagtcacaaaattgttactatatactagtatgagattatacagtttcatcctataacttttgtttcgctcgggttctaaacttaaggcctcactgcagctgaaaacatcgtaaaagtcgaagaagtgcgatgagatgcagcagatccattcatcggttcatcagtcatcatcatgtcacgaactctcgacgaaggccactgcgatagagctccacgccggcgttgtcctccctctttgtttttctcttagaaaaatgtttgacggttgacgccggcaaacttttctccattgatgcgtacatgctgattttgtaactgctgctatattccgaaatataattattttagttaaacacatgtattaaaaagtaaatgaagtaaaaataattgtagaaaaattgtaaataagaaaagaaattagataagtaatgattgtgatttgttgagataagtgggtaagttaataaatacttcctccgtcccaaactaagtacagctttgcactatttatctccaacgtttgattgtttgttttatttaaaacttttttataattaatatttttattatcattagatataaaatataaatagtaggttatgtgcgacttttttttaaatttttcaaataagattgacggtcaaacgttagatatattaatagttgcctttatttttgggatagaggtagtacctttattttacaaaggagtgaatagccaattagaaagcggttagctttagcacaacagcagcacgtcgtgttgggttgcagaacagtacacttttggctaagctggagcattattagccccaaaatataccattacagaagcatacagcgaaattaacgaattgaccgatccgtccggtcgcttgcttggtgtctgtagatatacagttttatttaaggagaccttgacctggccggccatggctctcatccctagtcaaggtcacctcgagcaagttcaataggagccaactactagctccaattcatctatagctaatctaatagctcattcatacaatagttatatactacactattaatatctggtcccatctgtcatgcatacattgtgtcttggattctgtgctacagctggctataaatctgtagcccgctgcccttctctctcctcatttatctctttaaaatatgtttgcagctagcttatagcctgctattatacctgctctcacgagccagcatttgctgcgacccagtggacctgggaacaaggaaatgtcagtgatgtcataccaaagcaattggcttgacgtcacatctctgaatgtaagcaggtgaggtcagtacgtatggcctccattcctgattcttcagagaaaggtcgtcgctattgcggatattttctttgccggagagaaggcaaagccaaaccattctgctccaccaatgccctgggaaataaacgctcgggttgttaattttagtttcattccattatttgtacatgattaatttgatattagctattataagtttaaaaaatggttttaaaaagcacatcgtttagccgtgaaaacgtgaagtagctcatccaaagaacgaaaccaaatggagcgttggtcaaagaaaagagtcaagtgtctttacttatatattttttgtcattaaataatgtgttagttgaaaggcatacacccaagtgcccaacaccgtgaaaatcacacgccaaaacgagggtgcaatgtacacccaatctaacaaacgagcatttgatacgattatagttattgtgattgacaccaagcaagccggagtacttttttttttcttgagtttctccttgaggtaatgatcctcaactactaggaagatttctctgaaatcagataaaagatctctgatgcattagctcctttccttcattttttctattgtttcaagctcggctcttttggttcaacagaacaacttttctttgccggcccaaagatagttggccaaatgcccattttttttgttcatagagaaagcacggcagtagaggagtaacaaccaccaagtttggcaaatcgagaggctattattatctgtttattggcttagaagacaaatgcaaaattttactacttaattgtgtggttgtatttttaatttttctttcattagctaaatgcccgtgcttgcaatggattattgaaaataacaaaattaagtccttgcaaaaaaatatttttagttattgaaacaagatctttcatcttgctatgcttagaaaattaaagagatgcaacctacatgatacaaatagcaaacagaatattaatggcccacatctccgttgtggttgtgggtggcagactcaccatcacagttttataatagtaatatagattgtggtatatatttttcaatatctacttttagtccattattaatatatcaacataaaagttttatttataaattatagtatttgttactttgttcattttcctgcggtttatcaatcgaagctaatgcacatgcaatctctgctcttcatccctctttcccccgccgtgtcaatcaccattcacgattgctccttgccactcatgttgttgcttacagacacaaccgggtcgcattaggaaaacgctccgtgaagatcagtttcaccgcctctttgtcttggaatctaggcacataatatcgacgtggatggtacagttgcgctgttttgtcgcggtgaaaaggaaattcgtagtgggctggtggtcgacaaattaattggttcagcattggttggtttgagggtatgtgtgacctaagaataaaggattgggaccccagtcttgaagcatcttacagtaattatgaaagcaatttgcttaagctgcatcattcatatacagtgactccatcgtctctgcatctcatactgtaacaaacagtgctagaaattcattgctttaccaatagacaatttcatgcttgcaagttactactagtagttgcgaatctatcactagaatttaattatctactagttaccttttatccagttgatgatatgatttccaaagctcatagattcgcactttagcaagcccaagtgcaccaccagctttactgttttttctctctctcacgagttgtccacaaaagctgcacgcttgagtacaatcgtatcagtggattcgaagaagaaatatgaagggaacaaccatattgattaagctaagaagactatcatggagtctcgttttctaaagatgttcagttccaaaccagcttgtagaatagtactaaccactcgctatgcgatttgtcaatttctttgtgcttgtggacagggcatagctaagacttttcaaacctcttcttctagcttttctctcccctgatgacgcctagcaactgaactgttatacgtcagctttgtgacgacacgaaactgtttaggtgctggagtactcgtttttaatttatacgtattgagcacatactgactttacgtgacagtatattaatactagtactgaccaagacttcaaagttcaaagtcccctctttctccaaaaaaagaaaaagacctcatagtccaaatctcttaagtccttctatagattatactagtagtaataaacaaactcagtgacaccagctatcttttattatttttctttactgttacacccttctcagtacattctcacttgtagtatattgctatatcattctcatgaaaaataaacattttttaacttgtaatagtaactctagcacaatgaggttaatgtcctgctggttgcactccagatcatacattcacatactactattccagagtgatggccagagtagaagggtagctaatgatcgatcaatattttgggggtactgcaccctattcaattcgattcgattggggctcatcaatttctgatcaaatctgcagaatggtccctaacgctgagatatgttcatctagctagcagtacatggagccatggaggtaaacacaaataactccttcggttctaaaataagttactccctcatttcttattgtaagttgtttaacatttttatctgtcaaatttatttaaatttgataaagtttatagcaaaataaagtaacactttcaatacaaaacaaacatgataatgacactaattctataccgtagatatatattgctaactttttctataaatttggttaaacataaaaaaatttgactaagaaaaaaattcaaacgacttataatatgaaacatacgaagtagtttttatacatgtatatgaaggtagtgggacatagggagtatcaaagttcatcgtacagtacggattgacattcactccggttatccaattatacggagtaatacgttctacgcataggagtatcagatacgatcgagtatggtcctgctcgtgcttaagataccacatgacaaaggatatgagcatagatatcacacccaccatgcatatcatgcttgctaattaacttgattgaagagaagtgttattcgacttgtcctccgcatgtttgtagacctaacttaattgatctgttttctatagagttaattagccccgctaaaatggtgtcgattggattttcacacgagaaagtaaatgttataattagaaaaatactccaaagtttaacacttgtggtaaactgaggcgtgaaattccaattgttttgggtataagaggtcggcagaataattgttgtgacgataaaccaataaaagttttcttaaacctcacttttttacacattgattcattttgagtggggatttggaacatcaacaaaatcttcctattagattttggatgaacgaaaggaaattgccatctcgtatgaattgttgactttgcaaggggcctgtctttcgaaaaatattaatatacacgagaaattcacttctggtgtttatccataaatgtcgtttttaccatatttttgaagataaccacactttagtgatgagttggtgtattacaatggcccatataattatggatggaccggaaatgtggatcaacgtaaaacaatttatcgaactgtttttttaattaaccaaccgcttgggtttttgttttctgttttttctcaaagaaggttgcgcatttcacataacataaacaattcttttatagtgtaataaaaaaagaaagccgtataatatggcgtatcaaataatcttgttttatttatttagcatatgttccgatatcaaaatgtactgtaaggtgtagtaaataacatgccctaataataataaggtaaatagtcaatggtgtgccttatttaaaaattttatgcaaatatataagatataaatcaagcttaaaatatattttaagtgataaatcaactcacaacaaaaataaattataattacgcaaatttcttaattaagatgaatagtcaaacgtgtgataaaaagtcacaacattgtttattaaaaatatggagtagtaaaccaccacaaaattttctctccttttcttaggaaacactcctcatttctattctactatactacaaacacggccacacgcacccaccccccaccaaacgtctatgctgtgacgaacaccaccaccatggacgccaccaccaccgccaagcgcaagcgcccagccgcctccgacatcgccgacgacgcccccaccaccgtcgacgaggtctccgacgccgaggtcgaggagttctacgccatcctccgccgcatgcgcgacgccacccgacggctcggcgcccgccctcccccgccgcgcgcgccggcgtggcgccccagcttctcctgggaggacttcgccgacgcgccgcccaagcaggcgccgccgccgccgcagcagcccgccgaccacgagcgcgtcgccgagaacgccaccccgccccggcgcccggcgcccggcctcgacctgaacgtcgagccgccgtccgacgcgccggccacgccgcgctcggcgcgcgccccggcataggcgcgcgccacgaggaaacgcggcgcgtcgcgcatgcgggtgctcactgattacaactactttgctagctagaagcagctagctgcagtgttggattgatccatccatggcgctgccttgtcctccttgtgtgtgaacaggtgagacctggttaatcaatcgctcttgctgggaagaaacaatccattattggtcccatcatggagatgtactatcatgtaccaagacaaaatgacgggtttaattaattaccccctatattattcgttctgtaattcagtatatgtcattgttcattagctagtgtccacttgttatccttgacgggactgggttttattttctattgttatttcttcccttttctttggaatgagcacttgggcatgatcttgtcttaaagctttaaacttagttacaacatttctttgtttacttgtacatgcgtcgattaaatcaatatattctgttactgttgaacggtaaaaaaaaaagaattttgtaaggtattcgtaaagtatgtctgaactctgaatagaaaagcactccgttttagtgaatacaagagcacactgttttttttctttttattcagaaaatatattccttttttcagcaggggaaaagaggcaaagaaattaaagcatactaaagagtgatatgaatgtgcaccatcttttattcccagccgtcggcagccagcatctagctatacgcctatatatatattttccgcgaggagcacctagctatatatttttgcctacagcaaagatgtagtattattcttcaattttaaaaaatgggagagcttttgaagctaccattagggctttgggagaccctaaccatcacctgcaacgacgaagacaacgagcttgggggagcactactccaaacagatcaaaaggtagaaatttgaatcaattttgtaaaaagaagagatagttaagccgaatactttttcgttgttttctcttggaaggaaactctttcctcgtctattcttcgttctgtgatttgacaatatcttgtgttcctttctatattctgaaatgaaattcaggtggagaaactccctcctccccccttgacctttctttaaaaaaactcctttccatttattttttctttgaaattaaggggactcctttcaaattctaaataaattgtcttaactatcttacctttctaacttgctatgactaagctacttttccaacctccttccctcttatgacgactttacaagctgatgctatcgttctcgtgaaaaatgtacatcatttccattgtgtaacattcacaagggagaaaaaggataatcgacatgcataagaatacaacaaattcgattgaggcattggcatactcgaagaaaatgacatgacgcctttatatgagctcggctcttcgttggcttacaagcggtagctagaaaagggctcaaaattaatgtgaccaattcttccaagaagctcaaagataaataaacgtttcatgtctgatatggtgacatgtttaactttggcatgtaaaaccaagcgttttcttttcttgttgtctacatatactacctctattattttttttttcacttgatgcattgatattttctgtctttaagatgtgaattttgtttgtgttagaggtgtatgagacaaacattactgtgagcagtgttagaggtgtttatattttgatataaattttaaatacgaaaaacatttttattttaaaacggagggagcagcgctagtgtatcacatgcagctaaataacgtatcactatcgttctagtcttctagatgaccatattatgaattcgaaagaggttgtactgtgccacagtcggtagctcattgtagccagtcaagtcaactaattagccatgcaaatccttattaccatggtgcaagtgggcggaagttgtataattattctggtgcagaaaaagaatttgagccgtcgccactcggacgaaaaacaagtgcaagttccacttcagaaaacatgacaacaggtatagctcgccacaataaaaacaaaatttacgtgagcttctactccctttgtttctggaaaaaaaatagttttagactaatcatttgttttttaaaaaattatagtttaaaggtgtttaaaatagactaagaatccctttgttcgtgtttttaagctatggaaccgatagtactccctctctctctctctccttgttttagttggcttttaatctctttatttaacatgtatttcaactagtaaaaatatatctttttttaaagaatagatggagtttttttaattttttggcttgaccgtgggtggtggtcaatgacagaggatcctggtgctatgcacgcagagcggtaaagacaaaagaagtctctgtggcacaaactgcgatgatatatgcacatggctcggcgttattgcgccgaaatgaaataggagtactagagcggtgtggacggtgcagacgtacgtgcagctagcaggcgtcgacaccaaacccctcgccgtcgacggacggcgcgacacaaatgcacatgccgcatttgacgatgagagttatctgattctatctttattgtttctgaaaacagaaacatatacgcactccaaacacgtgaaaaaaaattgcgtggttcgttcggttcaaactctaaaccaatcttttcttgtggatagcggaactgcggaaagcttctgccgacatgcacactgccaaactccaaaaccaaactgatgcttgctcacggatttgcgtgtgagaaactagtttacgagggatttgacgtcgtgtgtgaagcatattgggaatgggatatcttatgggccctagcccttttggcccaatactttacagcgtgtgatcgcgcaaattaggcccaatattcaatcagagatgggccatgcgatgcgacagatgaaggaatatgtccattttaagtcccttaacttgacagcgagttcgattgtcttccctaaaccgatacaacgggtcccttaactgtcaaaatcagtgcaaacaagttctctcgatggtttagatggtgtttttggctgacgtggcgttcaagtgacggtgatatgacactagaagcaaaatataaaaattaaaaattaaaataaaaggtggggttcacatgtcagtaagacaaaagataaaaaaaaagagtagcatccacatgccagtgggtcccaccctcctctctgtctccatgcacgagcgcacgcaaagagggagaaggtcgaggggcggtggccatagggtgtcgtgatgtacctcatcgcgatgcggggtagttgttgtcgccgctgacagtgatccaaaacctgagccccctttccacacatgcgttgcacggccggccagtggagatgacgactggggagattgaggtctctatcgccgccctcgccacaaagaaggcactacaagaggccttcgacgtcctcactgctgcctgctcgcccttcacctggggcgacctcaactcctacatatcctcgctccagtcatcgattgactaacagcttggccggctttgggtcctcgagacgcccctcccagcgattgcaggtcccattgtggacgtcacaagcaatgacgagaagggctggccgcccctccccacccttctccctctccgcgctcgctgggtggctgacaagggagctccaggaggaaagaaggatagccaggagggagagaggagaaggaggtgccgacgcgccatggagattgagtgggggtgggacccactgacatgtgggtcccactatttgttatgttttatttgattgacatgtgggtcccactgtttgttatgttttatctgattgacatgtaggtcccacattttttaaattttaaatttttatattttgcttccagtgccacattactgtcacgtaggacgaagactaagtcaaagcaacaaagtaggcgtcatgtcagccaaaaccgtcatccaaatcaccgagggacttcgtctgcaccggttttgacaatttagggacccgttgtatctggtattgcggttgggggatgaaaatcgaacttgctatcacgcgaagggacttcagatgaacccatccttggcgacacaacaaactattgggccagagagagagagtctttcttgcatctacttagttgggtcagaattcgatcgtggttcgcaatcgcaccggcaaagcctacaagatttgagctacctgtcacatcctagctaagatagaatacctgatttgttgaggcgagatcgccatcaggaccagttgatctttgcaaatttcgtcaatatcccttgtttcaaatatctgggggtagttgttttatatacatctcttgttgaaaggctacaacgaggtgcggtggtcacaagagttggatcacccaattaaggtcgtcgtcgcaccttaattggcagctaatacaagagatgagcacatgttgtagagtattccactattcctgtacctatcaatgcgcagtgagtgacggcacctataagacgtgtgtaaagcgatagcgagcgagagaaatccaaggcgtaaaaaccgcctcgaaaccgtaccgcgcgccgctgcacaggagtgcgcgccgtgtctcatctgcatcgtcatgtcccacttaatttgattaacaaactataagtatttgtctatgaatggctggtgtgtgtatgtttgcaatagggagcagctgaaaaggagcgaagcgtgacgctgatgagaagaaacgcattgataaataagacgctcgatcgatcggtgacgcgaggtcggcaacaaaaaaaacccatcgcgtcactcttaaccgtgccacttcttgctgcctccatccggttcattaatttcgtagttttctgataagaagaaagccaataattacgggccgcaagtcagccaaatcagttactcctccttgcatgtctcgtgaaccagttaggcggttaacttgtatatcaaacagacgccgcgcgcgcgagcagttcgtcgtcgtcttcgctcgatcgtagtagttgccggccggcatcggcatgggcgacggcggggagaagcaggcggcggcggcggaggggtggcggctgagcgtcaacgacttccagttgccggagcggcccaaggacccgcacttcgtcaagagggtcatcaagcgatgccacggtacgttgctgttcatgccaccgatcgatctcttcttcaattcctcgatcgctaatagcttaatctgcctcctcaatttctcattttgcgacgtttgatctatacatggatcgatcggttaccaaccattggttggaactcgatcaacatccatggattaatccaagtccggcctgggactctgtttcgatcgaactcgatcctgggttccttacaatgaaatcaaatttggggggtgtcctgtttgtttacagtgatgtcaccaatcaaaactgcccagtagtttgacgcatgcatgcgtgttatatttaactccaagataaagtgccgtgagggtaaacaactaaagatcgattaggtagcttcatcaaattgcgctactgttagtggaatcatacgtacgtgtacagtactcttgctctgaccgagtcatcacttcaccaatctagcatcaagaatggcccttctgaagtagttgttcaggacaattaatggtaataaacacttcagtagattcgtgtcattacaaataatagctgttcaccaatcttaagcatggagaagagttgccattattcgtatatattgccgctcgttagacccaaaggctgtgcactcactgcttcccaagtgatctaaggcctagtttagtttcaaactttttcttcaaacttttaacttttccatcacattaaaacttttctacacacataaactttcaacttttccatcacatcattccaatttcaaccaaacttccaattttaacgtgccctaactaacttaaacttattaggagtagcactatgcgttcctttcttgttttgtcagagaacatctgaactactactgtagtactttttttagagggaaagaccattatattgaaataatgatctggcctttttattaagaaaacccacacaatagtctgaactagtacttgacacttaatcatgatctagctgatcaacgatgccgctaatctgccatgtcttgcggaaatcgatatatcttcgcgatgatctcaaggacgagatgtgtcacattgcgcacacaaaagaacacacacaatgcacggcggctaaatcgatataagaagctgacgaagccccttacacgtgtgaagcatgcagagttgcataaacttgcattcatgcatgctcctcacaaactaggcagcattggtggactgctagcttggtcctgatctccccgtttggtatgacaaaagcaattgttatattttctagcattggagtagctagcaagtaggtagcggctggtttgtctgcgcacaagttataaagaaggccctgttcagttcatactaaacttttcttaaatttcaaactttctattgtatcatattacatttaaaactttcatactcacataaaattctaactttttttttcaaactaccaacttttcctaaacttctcctcaaattcaggaactaaacacagctgaagtaatgcaatttttttgtctctaacagttgatatggcccgtctagattcaaactttgaacccaaaaatgtcacatcaaacttttctatacatataaacttctaacatttccgtcacttcgtttcaatttcaatggggtgtgtttagttccacgttaaaattgaaagtttgaagacggaaaagttggaagtttatgtataggaaagttcgatgtgatgaaaaagttctaagtttaaagaaaaaagttgaaatctagacatggcctaactactaaaagatacagtataagataatattcaaaattgtggtatcttttggtgtctctttcggaaaaaaacgtaaaaaccacttggttaataagaaaaactagggatcgaatgttcggtccaagtttaattattagacagctaagccttttcttctacggagtaatttgttatggatctctccataacaccgtccccatttggcttaggtggtgattttacatttctagccattttcaggagttggtacatcagggcatgtacatcaattcttattttctaacataatgggcctaaatgggcccgctttatctggcctagttataggatatgtgtcttttctgatgggccttgtccgatgattatctggcctactcctaagctcgaataatcatcccaattactcttcaaaagatctttaaaaaatactccctccgttttgaaattttgacaccgttgactttttagcatatgtttgaccgttcgtcttattaaaacttttataagatatgtaaaattatatgcatacataaaaatatatttaacaatgaatcaaatgataggaaaataattaataattacttaaattttttgaataagacgaacggtcaaacatgtaataaaaagtcaacggtagtagagaacaaacgcaaaattatgtaaagtacattagctcaacttggtactagagaaaattcttgtcccgtccttgcgcccacactatcgagttaataaatctctttataaactttgggcctataaactttaggcgtataaactttagatatatagaaatactatatatatatatataaatatttgaatttaaattcaaatttgaattggatatataaacttttgacttataaacttcgtgtctctaaattttagatgtataaatttgaggtgtacaaactttagttgcataaatttactaaaataaaagtaatgcggtgtaaaaaaaaaagaaaaacacgtggagaagaggggtgatcgctaggggtgatgtttcggagtttggtggcatcatcatcatcctgcagatatcggagaaatcgtgtgtgacttgtgatgatgatctgggagtcccaagtgtcgtctctgttcccaaagcctttgtatgctttatccaaagaagtggcagcgtggatgtacgcgtggccgatttcctggaaaccccggagaatctcatgttgcctagtcgcctaacccgcctaaatgacgcctaatccggcacaattaccccaaggttccgtgacggcacatacatgcaccggcgcgcgcacgtcacgacaacggacggcgacgtgatcgcgtgcgggggcggagcgaaacccgtgcagcctatagcctttggattctgctcgcgtcgcgactattgaaaccgatcaactttcggtgatcagtagatagatgtggagagatcgatccttggcgatcgctaccacgcgtgcccccagacgtatcagtcggcctcacgcccgcgcgcgccatggatatattctctccagctcggcccagttggacatttcgatcggatgagtacgatcgagttgcgtgctcctgatcatatcgctgcctctgcaccggcctagccaccagcagcaagcaggccatggggagccgaggacgacgcggcggcggggagagagagacggagacggaggaggatgagacgtggaagctgcgggtgggcgacgacttcaccgtcccggagcgcttccaccgcaagccccccttcttctccaggatcttccccgccggctcccatggtcacctactcacgcctcccatcctcaatcctctctcccctttcctgtttaatactagatggttttttttctcttgattgatttccctttgagatcaattctcttagattttctgcatatatactcactcgtactacagtaatactaccagtttagtaatcttcagggagaaaggaaacaaaagatggaaaaagcagctactgctctgatcatgcttcttcttttccagctttactttactcgtgcagcttttttacctcttcccttttttgttcaattcgtgatcgattatattagaatctcggtgtcttgtgatggcttgacccgcactaaacaacacgattgtctttactcatagtattgcagtatactagttgctcggtagactcagctggactcaattctgtcgttccactagtgtctagtctttggttgtagactgacgttaacagcacaagcattattttgatgcgaaggggccgtcatttcagtactgtccatacttctgcatattaagaatatcaacgaagaataaccattttgtctcttgagtcttggcaactaatacgtgaggtgctgctaattctcaagcatcgatgctcatatgaagaatcaaggtgctgacgatttagacacctgaaggaaatttcagtaaattgtgttttaggacatcttttattaaactaggagtggtccaacgtaaaacaacgctaaaattatctagtccaaagtaaaaaagattgattaaagggtgatctaaaatagatcgattaaaagatggcacagactgcaatttactgtattgcaattacatatagacatacttatcaaccttatattggcacatagcattagagatggcccaatggggggtccaaaagagtgatagattttgaggcccagcccgaaaatataatgggccagacagatttttatttgaggaccagcccaaaaaaggaaggaaggctcatacagtcttgttcagtcttttatcttcacctatgaataatgttcttactcaactatgtttgctaattacgtccactgcattaggtccattagtagcaaggaactgaaggaagacacttcccatgctgctaggactctttccaatctggactatatatatttttccttgtgtgaaactgtgaattagcatatgcatttatcctagtggaataccatgtttcaatcgaacagtactttaacttgattgatcaagctgttaaatgcatgtggaacatgctatggactgaaaaatgataagttccattaagcttaattaactatttggtttaacactctcttctttctttgattatttcgtttattagtacttctgagtactgaaaaagtcggtgccccataacaggaaagcatcggaaaattgcaaaatactacaagaagcaggaaaatctcctgaaggatttcagcgagatggaaaccatgaatgagattggttccttagatcagaatgctcctactgaggtaaaatcttgttaagagaacacatttcctcaatgcaatatgcaattgccagatttgtaactataaattggatgctgtatatttctttttttttttgtcttctatacacatagtgatatgaagtatatcttcatgttgttttgttaggaagagttgaggcaaatggcaaagggcgaacgattggccatcaacctgtcgaatatcatcaatctgattcttttcattgggaaagttcttgcatcagttgaaagtttatcgatggcagtaatagcatcgacactggactccctactggatcttttgtcaggtttcatactctggtttactgcacatgctatgaaaaagcccaacaagtatagctatccaattgggaagagacgaatgcagccagtggtaatgactcggttaattaaaatctgttctcttttatcagttttgcattactccgaacttaagctgtgcttttatgctagagatactaaaatgatctagacaaaattccagagttttcagatttcagattacctgcttcttattgcttcatgacaactattggagctaactgaataacctgttattttcagggcataatagtatttgcatctgtaatgggtacacttggcttccaagtgctaattgaatccgggcgtcagcttatcacaaatgtacccacgaacactcttcgtcaaattcataatccattatttatgtgatttatcagctgacactagcttaatctattatatgcaatggccttacaggagcaccaagtgttcgaccacaggaaggagctgtggatgatcggcagcatgtcctcagtcgcagtggtgaagttcttcctgatgctctactgccggtcgttcaagaacgagatcgtgagagcctacgcgcaggaccatttcttcgacgtgatcaccaactcggtcggcctcgtcagcgcgctcctcgccgtccggtacaaatggtggatggatccggtcggagccatactggtgagtgcccccattgctgcctgcctgccactctgctagctactccatgtgagaattaatggtggatatgcagatcgcggtgtacacgatcacgacgtgggctcggacggtggtggagaacgtggggacgctgatcggcaggtcggcgccggcggagtacctgacgaagctgacgtacctgatatggaaccaccacgaggagatccggcacatcgacacggtgagggcctacaccttcgggactcactacttcgtggaggtggacatcgtcctccccggcgacatgccgctcagccacgcgcacgacatcggggagtcgctccaggagaagctggagcaactccccgaagtcgagcgcgcctttgtgcacgtcgacttcgagttcacccatcgccccgagcacaaggccgaggtctgaattctcatttatgcaaattttctcttcacttcacttcacttctgtttctgtttggcttgtacaagtcatcgtttccctgtgaaacccacaaggatgtcagttttactaccactgtctctgtagtctttaagtagctgtgggtgaaactgaattcttgttgttcttgttttattgagaagagaaaactgatcgaattcttctagtggattatatacgctgtcttttgctggaaaatggccaaaatggctgggcatgtgtacatgttgtacccatctgaattgtcatatctgtgatcagaagtactactatatatatatttccatttccggtggtcatgtcactggggcagtagtgatgaaccggactagtttgtcattagccccaggcatgtccattcaagttagcttgggccctatccaactagggcagaaaaactcacaaaaatacaaagggcaaaccatgcatgaggacagtgcctgtgacttgttgttcttgctggttcgttttattgggcgagttgcagctgggtgttactatgtgggagccctaagtgacaggacaaattatcaatagcttcttcagctggaaggaaaagaaaggacatggccattgtagctgtgatcatcactaggatccaaacagccccacaccttgtgttgttgcttctcatcgatcagctgggattggaaagaatccagtaatttttttttcacgaatgcgcaaaatgattgcatgtcaatatattacaagaagacataatatatttttaaacaatgcaattggtcatacggtcattgcctggggacaagaaacaaagaaaaaaaaaagaaccaccaaagtaaaggaaaaaactactactggaaggctgttcacaactcagaaggtggaggcggagccatactgctcttccaacaagcctctaaagacaacggcgtgttcacaactcagaaggtggaggcggagccatactactcttccaataagcctctaaagacaacggtattagtacaagaccacaaacagccttcctgaaggatggactttcaaaccacagagacctaggagagagaaaaatcaagaattctagaatttcgctcctttcaatgctgccaaaagatgaggactagatagtcgaagcccactcgaagatgctcaagcaagtagaaagcgagcagccatgaggaggaacgaggacggccagcccgaaagaatccggtaattgtaacaaaataaaattaaattgctgggtgagatggatgcacacccttgtgcatcagcagtagcatggacttgtggtgggaagcattcatctgacagcattattggtaacaatggcaccccatgattgaattgccatatgctattaatttgttctctttacggctatactagacagtccacgcctaatgtttggcggttgttttgtttgatatccttttggacgttttctaatttctagtgcagaaaaatagcagcagcagcagcagcagcaaaacaggggacgtttgagcgaataatacggctataaacgactcacctaaatgctagaacaaatgccaaacattgttcatgacattttacaattaacaccggtttggaaaacaaaatgctgaacaaccaaagagaactgaacaccgaacattagatccaaactgcatacccctgccttgttttgtacttcctcagtttcgcaatgtaagtcattctagcattttctatattcatactaatgttaatgaatttagacatatatatctatctaaattcattaacatcactatgaatatgagaaatgttagaataatttacattgtgaaacggatgaagtggaacagtaaaaggcaatgaaaaaaaagctagctccatttttgagaagaaagtacagcaattggtgttcgtccaggcaagttcatcacgtgcaaaggagaaaggtagcaacaaggcaacctatacgatggatggattgagatggaggccggccgtggcgcatgtgagctatccgtcgtcgtcgtcgtcgtcgtcgtcgctgggtccgggcaaatggaccccgggcgaggcggggagccgtacaccagcgtcagccccaatcgcggcacggtgtaacgcgccgcggcacagtcgtcgtcaccctgcagcatctcttgcacttgctgttgtactacactagtagtactacctctcctcctctcgatcagtaactcattattataattactattattctactctgatgaaggtcctacgtcgtactgccagagattaaacaagttccctacttgcccgtgattctcagtttcaggactgctactactgttcttctatactgctcaggagtaggactactgtacttacttgtattagtattttttttaccaggcaatgaggcattcagtctctagatgtaattactctttccgtcccaaaatataataacttttagctctcaagatttatcctaaaacataacaacttcttcaccaacattctttttccaaccaatcacaatcctccaccatttactcctacatacttttttaataaccatgtcaaactgtaaaactttttatattatgggacggaggagtagctaggagtaacacagtaacttaattaatatcacatctgcacccatatgctcttaactaatgtaatttacctaggattttcaggtggtcaaccaagtaaattgttaatgtgttgcacctgtaaaatcttcttcttccagtagaaaacgaagtgtattatactactccaaacttatatacttggggcaactctccttgattcccgcttctcacacgcattatttgtttcagagcggaaacagccaacgctaacctaactagttaaaccaaaagcctagctttccaagcacaaacaccgaccatttcttcactctctaagctagctcgatgccgccaccgccggcgacgacgccgctgcctcgccgtcgcctcgcgctcatcctgtgcctggcgtgggcgctctggctccacggcggcggcggaggcatcagcctggcagacgcgttccaggcgccgacgccggcgagactctcgtcggggtcgtcgtacgccgtcggctcgcggccggtccccgcggcggcgccgaggtggagctcgtcgtcggcttctgaagctgccgcccggttcgccgacgacaagcggcggattccaagctgccccgatgccctccacaacaggtagaatataagatacatacatgcatcgatcgattcagctagctagacatgagtacgctcgatcagatcgatcgtagctagcaatttgtagtagcttgtacgagcagagaatgtgtgtgtgtcatactgcttggctgttcttccaaagccaactcgatctaaattgccggctatggtgtgttgcacggatcagtgattactgcaagcacggcggccatcgaattgggtgcctttgatgtgttctgtacaggttcctgcagggaagtgtgttcttactttcagtcatatactcatatatacaagaattcgtcattgcatattgtcgttgctcctgttcacaccagcttcatgcatgcggcggagatcagaaacttataatttgccatggttatttcagagagagagagagagagagagagagagagagagagagagtaattctctacttcaaattgctcactgcatcagttgagtgctaatgtactcactccgtttgaaattagttatcgttctaacaaatttcacacaaacctaagagatatggcagattacatagttaccctcgtttcaattcacacatcccattaattttctaaagaaatgagccaattaaagttgtgacagtataactatatcgatgaaggtttttttcatagcctattctttagccttggtttataaactgcaagcaaataacatataaaatatttagctataaattaattttagttaattcatttatttttttatatctcattagccctaactcaaccacaatcagagccgaatttaggggatggttattctcaccccgtaggtattggcaaagcttctgaaaatagataatgatccaataccatagggaaaaaaactgcatgaacttcataaaaactgcaacaatgctgtaatgttattctcaagtttaccacaatatatattattggcttgtagtcaaatcgtcaaatttattataaaactatttttttacatgttctacttctatctacagtttcatatacttcacaacgcattcgaaagatacggttttgcgataattttgcgaatcatttgtatttgatgaaatttacttaaaaagattttatgatcaatgattttggaaagcaatctgcacggtgtatgcacaaaatgaaatcagccttcctccataggggtagtacaatgtcaggatcgatgcctcatcaagctagctctccatcgatgcgatggttaatttccagatcgagcatcttttgtcccgctctcccactacgctaagctcacatgtagaggaacatgtaggatgactatttaatttcttaatgaatttgtacattaaattgagcgttaatcagctgagcgagtgcattattaattggagcaatcatcgacagagtctgcaatttcagacaccaatgggtcaagcttatattaattgcgttgccaatccccatacgtgatcttcatcagggcgtgacgcgtgcctctccagcatgcggtagacagcacgatcagatcactaggccaccatgtcgtcctcgactaattttggtttatggatgcgtttagatttaggttgaaaatttttgccatgtcacgtcggatatacagacacacattttaagtattaaatatagtctaataacaaaataaattacagattccgccgataaattacgagacgaatttattaagcctaatgtttattgtagtactacattgtcaattcattgagcaattaggcttaaaagattcgtttcgcaatttatacgtaatctgtgtaattagttttttctatatttaatactccatgcatgtgtctaaacattcgatttaactggattaaaaaacttgctagggcatctaaacaggtcctatatatatatgtatgtatgtatgtatgtatgtatgtatgtatgtgtacacacactacactagtgctgcctacacgtatatattggtgtaccatttcttcactgataaaaaataaagattaagttaatgtacgtacaacaagaaaagatattagcacgtgactaattaagttttaattattacaaacttgacaaataaatatatttgatattttaaagcaacttccacatatcttaataaggtaaaataattgacaaggatcaacaatggagatccaaacattgtcatggaatcctatttatttttgaacttttagcagtttaaatacttgaagttagtatagcatattaacaaagtatattagttccacatcaaatatttagaagttttcatggtcaaaatgtgaataacgcttgtggcaacttaaccctgaaaaatatttgaaaaatactttcttcgttctaacaagaattaacttattatggctatatgcaaattcatagccataagttattactcttatcatctactatattattaggataaccttaaaattatgcaccacattcgctatagagcctaaaaatttccacattaatcattaaaaaaagagtccaggtagaaatataatttaaaaataactgaaattcagaattgaaaataagcaataatatttgaagaagagcccagatagaacacaatacaagattaaataaaattgagaatacaaaaataaataaattctaaattagaaaaggaaatagagagttcaagacttcgagtagtaatataattttgaaattaaataataaggaatattgaaatgaccatccattagaacacaacacgagtttaactaaattcaaaataaaaataaaataaattctgaaattagaaaaagagagtttaagtatgaataaaatttataaataactgaaattcagaattaaaagtaacgaatatatcgaataacaatcatataaaacctaatacaagattaattaaaattcaaatgaagtaaattctaagattaaccaaaaggaaaatagggtttaagtaggaataaaatttaaaaaactgaaattcggaatataaaaagaaatattgcaaaaatattccatctagaacataacacgagattaattaaaatttagaagaaaaataaaattaagttccagatcagaaaaaaatttaagtaggaatacaatttaaaaataaacaaaatactaaaaggagacatcatccagaactcaataataaaaacaataaatgggtacagtagtagcgtttgatggtacttctaaaaacaataaaacgagaacctgacgaggcaataaattctaaaaactatatggtataattttaaaggtctcaatgaaaatgaaataataaatagaaaccgtgacatattggacaagtaaattaaggggtagcaaaaaaaaagtaagggggtgatgactggtatgacttactataaaactggaaacccgatatttgatttttttttaatatggtaatacaacgagacgactatttaacaaaatttgagaaaatcatgtataaaacaacttaaataattttatataggtgctagtcatgcaattatacgggccacctaactagctagttttgatggagagagagtatagtacctgatgaaaaatcccttctttcttggtctcggactgggccaggctacccctcgcgcttagtgggccgcttctgggtgaatcgagcccaactagacagtgggatggcccgtatgctcgcgttgttgctccgtgggccgtgggccgtggcccgtggatgcacaaaattcaagtgggttgccaagttgggctaagcttgtcaaaatctatgggccaccccaccgtcgctttctccaacttgttcaattgttcgctgcgaaagccccgtgtgtatgtatggataaagctcatactacttcgctttcacataaaaatggttcctcacattagcgaattaattaatgggggatatagtaattcatacgtaagtacgcacttcattatgggtcaaaatattaatttgtccgatcgagcagctagctaacagtacgcaggaaaaaaggtttgtacaggcagttactttatcggtagattatactattagctagctatagctaggagtataattccaaattaacccctttgatccactgatttggacgaaattaaattaatctaaatgtacatatatatataataaccttttcaaccctagccgtttcataccggccatgcatgcatgcatgcaaataaatgtgcatcaccacatatagctagcataagatatgtacagaacatataatcagggataagaaccaatgatgaagtcaattagtactaattcgctgatttggattaattcttatacaagaatactctgaacaaagctataatcgcaacctacgttccggggctccggccgtttcgttaaaagcattattaatttaaaatgttttgacgcgtctcgggcagagtcctccccattttcctgtgggatctgatatgtgtacaaattattgtggaaggattttattatcgagtcacttgttcaagttgcacgtaattaacaccgcctctcttgtagattattcactcacgggctacgacatcgtccgtacgtattgcctgctcttaatgggagaaatgcactgcaacattaacatatcgtctcaaagctaaaactacagttaatgctagctagtaaataatataagcaagtttacatcatttacatacttgcacaattttctctaattaactgtatattgtttggtcccattttctttttaaaacgagacacttctttattatataaaatgtcaataacgttccgatcattttaaaacaatatcatgtatctctactattataaaaattgaacatgtttttaccgatattttggtacgtcatccgtatttgagtcggtttttaagttcgttcgtttttggaaatatatatccgtgtttgagttggattttaagcttgttttcttttcgaagtataaaagagtcatataagaaatcttttgaaaatactcgcatgctaacttgagatgaaatacaggctcttaattgcagctcatgattttctgaaaaaaatatacaagcgaattcccacagtaaattttaccctggctaatccgtataacaataataaaattaaaatcacatttacccgttgcaacgcacgggcattttttctagtaaactaaaaaaaatatgcgtgtagatatgtatatgttgcaatttttttctttctaaactaaagtaaaatgtgcttgtgtataatatgcttatttgaccccgttttgaactctaactaccaatttgaccctactttttgaagtttgcttatttgaccctccttttcaaaaacgaagctacggtatgaccctattctgttaagggcatctaacggtgttgactgaagcacaaaatgtctcttctgcccttactcatttgaccgtattacatgtggaacccacccgtcagttctcttctcctctcctctcttctctcttctctacggattgaccacagggagaggtggccaaaggcgagacggcgagccgacgccggccttggtgatgacgtcgacgacgacgagtggcgacagcgtgttcttgtcctctcctccacgtatccaccacagggagaggcgacaaaaggcgagacggcgccggccctggtgacgacgatgacgaggagtggcggcggtgagtccgggcggtggagctcgagctgcggtcagcggatctggcgccgccaccgccgcctcctccctccttccgcgcgcctgcgccggaggttccaccaccgcctccctcatcccgcgccggtgccgcctcagccgccgccgcccctcagccggcatggatcttctccctccacgcccctcagccgccaccgccgctccctccctccgccccctcagcgccgcagccgccgcctccctcatcccatgccggcgccgcctcagccgccgccgctccctccctccctctctccctccgcgcccctcagctgccgcaccggcgccacctcaaccgccgccgctccctccctccacgcccctcagccgtcgccgccgctgctccctccctccgccccctcagtcgccgccgccgccccctagcaccgccgccacaagtcgagcgagcaggaaggaggaaggagaaagagagagaaatgtggataaggttgggtggatggatagggtttcctaagggtattctggatattatgaatattagttgcatttcttttttattttaaatcaaaacttaacggactagtggaaacagggttagacgggagcttcgttttagaaaaggagggtcaaacaagcaaacttcaaaaagtagggtcaaattggtagttagggtttaaaacggggtcaaataagcaattgcccatatatatatatatatatatatatcttttcaggttctcaaattaattggtcatcgtttcagctgagtcaaagttcagccaaagttttgtgacatgcatgccacagaaaccgtgagccattaaaccattgacatataaagtcaaaacatatgccatgccatccgagaaaacaaattcaagcatgactaaatgaaggaacaagcgaccagctgatcaccgcaccaattaggtccagagatttgtttaaacatatattagttctttaattattactaactacagctgcatcggccaaagaggaggctggctttggcgtatctatccagtgtgtgttgggaggtctcgaggagaggaggatgaaggcaaaccttcccacacccaagaaagccaaaactgcctccaattagatctatacttttaatatttgctttctttgttatgcaagcaatgcagagtcctctctgaccacatggaccaaacgattcccacaccgtggtcaccacgcgccaattgcttattttatgcaggggaatggttcaataaactttctatatagcacagtgacgtgtttgatgggcctgcaccagctgttattatatgatctaattaagtgcgtttgacaccgcttcagttcagctccatctctcctaaaactgaaatctaaccaaacggtttcatctccacctaaaaaaaagtagagctagttgaagtgctcccacaaaatgaactgaaagaagctgggcttaaacaactttacaactccactccatacctaaatgctggagttaaatttagaaattggagccctaccaaatgggccctaacttttcctatttatgaacgattaactaattgtaaaccaaaaacattctacatgatattaagagatatggcatgtaattttttttggtaattttggttgatttgttgatctttgtgacatgtataatttcttcgaatcacaacacaataaaatattgattggttgattttcactatggatctaacttttataaatacaatctttagcgaggatcttccagctttttacatgaactatacaatatgatgacggaatatattgttttgaggtggttgtaaacatattttcatatcatattcatggagtttatttatatatatcactataccacataatggttgtacactaatatgtcattctttcgtcctaccttttttctacatcttgccatattttgatcatcccatctttccactcaggcaccttgcgttcatacacaaaaacctcaatttcaactcaaaatcataggagagatttcaatcggttgctagattggtgggttgaatgattcaagcatcaattggccgtggtaacgaagatgccaacttagatttcagcgatttcactatcgtagctagggttcatggtctatttattgatgggtgatggatctccggtggtgatatggcatatagaggaggttgcgtcaacaaggagctttctttcccttggttgaacacggaattcatgcgtcatagctagagcgtaaaatgaatattgcaatttgatcacctaaagctagtactacacaccaatggagtcatattacttgcaaaataatatttggccggggcagtttagtgccgcgggtatgaaattatacatctaactgaaatagacacaaagtcgtccaatccttgtcttctgaggtccacccaacagtctcagctccaacgccgttcgactttggagctctttagacatgtgtatatgcacatcttcatgtgatgcaactggcagtgtctagctactacatgttaagtttagagaagttctagaagaggggttaaagaattgtggcaatgaaggttcttgcattatgccagttgtcaaaaagtgacggtaccagttctcctaaacaatgttggatgaatactcatattttaaatggcccaaccgattgatctgatctgcctagtatagtcgtcacattggttacttgactagtcttgcctatgtaaaaggagatccttagtgctagttattaattaatataccattacatgttgctcaatatttgttagagaaagcttttaacagtacatatattggactaaaacagcgatataacaatatgctatattaaaagtttaggtgatgtatattttgaaacattttattctaatagcggtatagctagttaaactcatgtgttaagcatgtcatgtaactttttttttctgaggttaatttgtgtgggtcgctgtgctatactgcatgtttattttggcgtgg

SEQ ID NO: 8380 - DNA, 29639 bp, Oryza sativa
tccttcatctatgcagacaaattttgatgtcggcctagtattttttacctaacttgttatggaagaccatatactactatgtataatcatctagctagttggatgagatacacttgatagtgcagtggtaatgtgtgtggtttcaaccgtaagctctcgtgctaaattccaacatgctcataatttcttaaaaaaatgtttggagagatgtttcttccttcaagtcttcttttttcttatccagctggaaacggagtagtacagtagtttttcatttatcatatgtgtgcatgccaaataatcttgcagtgcacaccgctttcgacgccgtccgagaaatgtccggttaaatccgcacaaatatacagtgtctgcatcaaatgtaaagtagcagctatagttggtgatgcagtaccattggcgatcgagatacttaattaattaactagttggcaaattgtctaaacaaatgctttatgcgcttcatttgtcagtcttgttctcctgcttggaggtgatcaaaccctagctaacttttccatttttattgtgcaatttggcctcccattccgcatacttttgccatatacactgaacctctccctgtgggggcgccgcatgcaccaagaaaatttaaagttgtccatctctctctctctctcaatttgtttctctctcttagcaagctactagacacacaccaatgctagaaaaaggcttgtctttctttctcagctgcttgtgcatctactgttaactgtacacacacattaacgtggacaaagaacaactagataaggtcatgtgcatcagagagagagagagagagagagagagagagctagctagggacagtcagatcgaaatcttttcaagttccaacttctatgtgaacccctttaccttggaggaaaattttctagtactggatttaattaatttctttgcctttttttttttggttctgagaaatatatccaatcaagctcaagtatttagtcaaaatcccatagagttatattttggtaatttatcagaaaatttgatatgtttgctatgtggaaacaaatattcatctacatatgaaaatttaagtgtgtgcatctgcatcatatatatatgaactcggaattatttctgttaacaaagaaattcgtctatatagttcctgtatcataaatagcatgcatgcacatatgcatgacgtacacgaatccctttcaggtgctatatatcggtatcatagtcacgcaagcatacatcaaactctctatacatggaaaatattgatctcaaactaaaaaggataagagatgaaaagagaaaaatgaatatgacagtgtatagaaaaaaaagaacaggtggatgattattacatcgatgtctccaatattggaagacatcaaatacacactagctagctcctatgaattaacacctaattaattgacacttatgaccgtcaaaatactcctcctgatccatatatatatatttctctatcagtatatgtccattggaaatttgatcacaaatatttaggtatatattgatcggtcattgagctgctactttagttgagatcgccaagccgagctccaccggcttctccttccgatgatcgtgttgctgctggctgccgccgtcgctgtccgccggctcggtcttttgcaccggcggcggcggcggcggtagacctaatgtgaggtctaggccggcgtcgtgcacctcggtcgccgccgacgtcgctctcggctccggctccgactggctgacgtgggagccgtccacggtgtcggccgtgtcgttgctgtggccctcgctctccggcggcgcggcgtcgtggctcgccgactcgtggctgagcgccccgggcgcccagttgagcggctgcgcctgccttatcacatcgacggccatggcggcggcgggcttggagaagacgagctcgaaggcggcatggtcggacctgtgggcggcggcggcgccgccgccgggcctcttgaacttggcgcgcgagctgatgtcaagccggtggaggtcggcaaccgggccggccgcggcgccatggacgtcgcctctcctggcgccgacgtggcggatgtcgcaggtggggagcgggggcacggcggtggcggacggcggcggctgcgcgatgggcatgccgcggaggacggactcgacggcggactggcaaagctgccagttccccgaccagaggaggccgacggatccgtacaccgggttcagcatccgcccgcaagcctcgtacagcagcgaccggaatatggctgcacacgtacgcaacccaagagtcagagaacgaactcaaacgccatggccatgtagctagctagcaacaagggctaagcacacgtaccaggacggacgtgctcggggccggcggtgatgaggttgatgaggccggcgcggccgtagaacttggcgaggaagacggtggcgttggcctgcgcatcggggctgcgaatccactgcaggcaggggcggatggcgcagttgtcgctgcaccccttgcgcagcacgcggcacccgttgcagctcatccgcatgatcctcgcaaactaacccgcgcggctcgccggagacgacgaccggtgagatcgagctagcaatgccgagctagaggtagaagaaggaggaggaaatggtggtgggtgtgtgggcggagaggttgggtgtatataaagcattgggaggtggagccgtgggttagctcggcagcggactggaaagcctccggtttccctgggagtggaaagctggttttctcccctacatgtgatgttaccctaatgcccctcacttttccatctcatgatctctctaagcttcttctaaaacttataactaaactttaattacttagataattatatatacatactaggtatgtgatggtgatcgatctggctgaccaagtggtcctaggttgaattaacttggttataattaatatatatatatgggagttgaatatatattgtgtacttgcctcaaaaagaaagggatctgacagaaggttctgactaattagaaacccggtattaggaggaaaaaaaagaagtcatatgtttactccattcaagctatagtagtagtactgctatagctgttgcaatatgctgacctagctcggaatgtatatatgacatgaaaaccacctcagtgtagcaaacagaaaactaaatagataagtgtaacgactctagaacgaagcttaatttacttgattagctgtggtcttgtcaaatcatcaccttacttctcaacatttagttggttttgacggtttctccgcgagggataacatgcgcgtttgctttttcttcttctaatataatatcccctatgttataattattcagttttataagaacaaatcaactaagtgtgttcttgaaaattccaacagtagtaatatagtagctacgactctcactagccttgagcaataattagggcttgatttctaggtttgtctctttaatatcttttacgatcctatctaaaaattttggaaatacacagtaattaagatgccctataagccctatatgcttggctcattatcttggcttaattcaccccctggtttgctccctgaaattaagagtgaacatacctcaattagtgtatagtgacatgtttctcttagataactccgcgaagatgaatgattcttcctcccgctcaacctttaccatagctctagttgacattgtttatggtcgagacaagtacggtatcagatctccaagttcataccatcctttaattattggacttaattgtgttgtgcttgatctatcttgttttcctttcctcaagactcaagagagataatttccttaggatcttgttagtctcttggatcacacttatttgaccattgcatttttctgattatttgttattggataaattccttattgattttgggcattaacatggactcatatatatacacctgtattaatttggccattaaccacttccctagttgtatgtttgtagctagaaaaatactaaatatttcccgcaaaaaagaaaaaaaactaaatatgatgataccaacatatatatttttaatgataaacctaaaaatcatttcttctatgacaaaagaaaaattttctgtctgtgctttgctgcagataaaatgtatttttcgtgaaatgttctacctgtcgttttgctatggaaaccatttatcttaatttgattctaggaatcactatccatttagattgattgtttttaatatagagttcaggaggtgatttaaaaatttacaataggagtagttggggtggtagattcactactaccaccactagagccttttaaaatagtatatatagatgagcggaagaagttcaaatattgatgttggataataaatatatagtcgcaatgctaattaagtaaaataatacgtatgagagcagagaaaatgtcaaaacatatatatatatatatatatatatatatatatatatatatatatatatatatatatatagagagagagagagagagagagagagagagagagatatagatagacacacacacacacacttcctgaaagttttacaagatcgatttcatgcatatatcctaatacatagtagaaacaaacaaaagtgcaccatacacgcacacacactggcaggcgcatcacattaatataatacacatgctcagagagacggtatgcaaaagaaattcactaaagtcactaaatgtaggaaatgttttcacccctcgagaggatgtcttatcgtttcttgcatgcatgccacctaaagagttatatttcttttaaaaaaacacaagatagattaatatgaaatatatcactacacaaacatgcaagctcaaattcgacttccaagttgttacaaaaataactgcaaagtgtacgttaactagttgcagtttaatttgttctttttacaacttgtgaaagtcgaatttaacctatgcatgtttgtagagtgatatatatcgtattaacctatattgtcaaaaaaaatatgttttttactatttaggtgacatgtaggaaaaaagctagcggatgtcgaaggatgaaaatccatatcactaaatttctactgaaaccacaacaacaattgtgtaatatctgttggtacttggcaccttgaatggagtcatatgaagaacttcagtcaatcggttttgtacaatgcgatgaatacatccaagcaaacaggaattgtggagaaaaggggattatgactgaaaaaaattcagacagttcgatggtgatgaaacctaactgtcatcagcatgcatgcatgcatggaagggcacaagctatatatcatcataaaatagttccagatggaaccacatggtatcatgcatgcatatgcattactagctagttacagcattaagcagcaggcaagaaggcaagggcaattaggtcaagcaatccgaggatagcatactaattataaatccggtgcgtgtgggggacacatgacagcgcgtggcggtggttgtcagcgtcgtcatcgccatccatcggcgggcgaatcgcaacgctcgtttccgggaggaagtgcacgcggcgagaggagggcggcccccagcgacctgggcgtggggcccccacggtatagtcgtacgagctatagctaggcttaagtgggccccacgcactggctggtgattggtggaggtggtcgtcgtacgtcgtcgtcttcctcctcgcgcacagccaccaacatctgtgggcgctcgagagagccgattcgatttccatgggcggttttgctaacccttttcttttccttttttttcgatccaacttggtaggaggcagcgagagtctctgccgtgcaaatcatatcatatgcttctgtgggggatagcagctgctaaccattcatgcatctgccctcctccgatcccaaatgctatagctgcgtgaatcatgatccagttttacgtgcgtttcagtttggcacgcttattttatgttgggaatcaagctagtacctagctttgatactccctccgtttcaaaatgtttgacaccgttgaatttttagcaaatatttgaccgtttgtcttattcaaaataattcgtgaaatatgtaaaactatatgtgtacataaaagtatatttaacaattaacgaatcaaatgatatgaaaagaataaataattacttaaatttttttaaataagacgaatagtcaaacacgtactaaaaagtcaacggtgtcaaaaattttgaaacggagggagtatatagatagatcataggcctacgacagtttaggttgagagctcacatcaccggcaagttgaacctccctaattagtaccgttttatatgtgtgtgtcctctctctgtgtttaattaattaactttgtgtagtactaagagaaattaagggggtccccgtacgccatgcatctccattggggaagctatatagttacaacttaaaatggagaatcctaggagcggtcgtacgttaatttctcttgtttaattgttgcccttcattaattaattaacaaaaccaaatgtttttcttatgctaatagcttgctcgatcacactgtacgtatatataccaacgatgtcattgtcgagttcttatagcttgctaactagcttcaagtggtgcttcccactcctagctagttgcatttctcaaaaatactaacaaagactacatgttcacagtgtaatttgtacgttgttttcacttacctcatcaagcttcaatttcgcgccgtcgtttatctaaaaaacgatatgaccatatgcggctgattaattgaagtttttaccgttctttacttaaaaaacaatattcaagacattaattactgatcaagattaaacaataggcttgaacaagcctatatatagaataaatccaaataattaatatattaattatagatgaaaaatcgtttgcccttccgcttatcagccacaaccaaaatttattttttttctaaacttatagagttgattttgatttttatcatattttatttttagtattagcttttaagttactaagaacacacatatacagaagttttatgcattaattaatttttttttgcgaatcgaatgtagcttaactgattagattcttttggtgaaaccagcccacccaaattcaaatcctagattatttgacatgggttctcacatttacgtctaattattattttttaatggtacttgcgtttgtaatgttaaaaaaattatttttaagtcgctgataatcaggccaaacgatatagcactactacaagcttgttcgagcctatttatagaataaattcatcgatatgtgtatccttaaaataacagacaacttctaaaaccaccagtagtacgcgccgcgggaggatgtgcttaactaccgagattgcatgtgattcgatccgtttaagattcccgagccctcattagttgggtattttaggtcatcacaccgtgaatccaaaccttgatgaaggctccatcagcaaagaaattgctagtttaattttgttgtacgacacaagaacaagtggtcgatcgattagattattagcacacatatcagagacaatgaaccaagagtgtagtacgtacgtagtacacctcatattgacccggcgatgtttttgtggtactagtactgcatcccattaaatttgccacttgctcatatacaaattaaagattaattaacaaggaagttgctgatttataaataagcctttgttatgaccagacaggtacggcgtacttagggaaaatgggaagagatgccaaaggggggttcagactaagaagaatatatatggcagacaggctttgcaaattaagtggaactgttgcttctccgcatcccccaccatgcaggcatggatgctttttgttaattattcggattttatttgttcgcatccgacgttctctgtccaattgcagcacacgtatagggccgtttcataactttgctctgcttgtccctccatcccgttaataaaacaatctaatatcgaatgagacacactctaatattacggatatgaacgaattatctttttatattcagaatgtaggatatgtcgtctatccagtactaaattgctatctttacagacaggggtagtaactttgaactatttattagctttatctgatgagaggtttatggttttgttacattcgagcctcttcattttatgggttttcctaactaaggcttctttatcgttttcagctagcacgcttttcgaactattaaatgatgtgtttttttttcaaaaaaagtctatatagaagttgtttgaaaaattcaaataaatttatttttcaagtttataattattaatactaaattaatgatgtggttatgagctttctagttttgcgtgccctgaaaaacataaaactcatcctaagccccaatgaggtatatatgtattcgtaatactatgatgtgtctcattgggtactagattactatctttgagacgaaggtagtagacactgaactattcactagctttatctcatgagagctttcataaggtttcgttacgtttgagacccttcattttaggagttttcctggttaagacgatcttggactaaaaaccgcctaaatcttaaaccatgtccaattagttaaatccatgggtagtgtcatttattcaagctacaatacgataaccggatagtaaaattcaggaaattagctattattatgtatttttgcgtggttgcaatttaattaccgtaatagagttcaatcctacaccaaaactgcgcaaacaataatttagggggtactatatgtatgtacaaacacatccaatattttaatcatttagtaaaacaatatatcatatcaaaagtggacataaaatatttagctgtacccacaatggttttggtttaaaaaaaagctttagctgaagtaacttgtcaatcaatcaatatatatatatatatagctcaaaattatcaacttacaaacacacaattgttaactacatataagcaaattaagagacatttgatcggaaactcaaccagagtaaagagctaaaataaaatggaaatgaaaatgaaaaaaacatatgcataaatactctgaatatttgagggctatttaaatgagaaaatagatttcaagagcttaccttatattgcttatatatgtaattaaatttcagatattttgagggttcatattacttatatttgccttattatcttacaaaaaaaatataatggattttcttttgttggaaactcggtgcacattgttttttttttgacaagtcaaattccaagttcaactttcataataccccgtacttctcaaattaagttcttgtaaccactgtttattatgtaaaaaaaacacatttatatcctgtagaaaacttatatgcaaacttagataaatgctgtgaacttttaatgttgcaaattaattaacaggcccttaattaggttgacctttgtaaaccatttcattatctaaacaaaatatatagttcgaccaccggtacgtacagtgacgcccgcacattatacgtacatggagtacatatatatgtacgttagaacatcactaccatgcatgttgcaattttctccattaaataaattaaaaggaaaatttcttcaaagcctctttcttgatttgatgtgagtagtttaagtttctgaagcgtgaggccttgcatttgggctaatggtactgaatggcttacatttattaggagaaaaacctagctactactacctccgttccaaaataagtgcagccatagaaatccgtgtccaacgtttgaccgtccgtcttatttgaaaaatttatgaaaaatttaaaaaaatttagtcacacataaagtactattcatgttttatcatctaataacaataaaaatagtaatcataaaaaatttcaaataaaacgaatggtcaaacgttggagatgaatagtgtaaaattacacttattttgggacggagggagtagtacggtaaaaaggcatagggacaataaacaaaataatctagcttggtttctccctaatatttgtgcctccacttgtccaatatgcatgagctgtgtaatataatgtgaatcgcatggtacatgcatgaatccatcatatcgaaaaaaattaaaaaaagaaagcgcccatggttttgggtaatcctgttcgtagcatcaaggtcaactaaacgtacgaggcatcaatcaatataattcaggataagcctaataccctcttccttgcattattccacgagtattgcctactgttttgcaaacatatttccatgacgagttcccactaagatttcgtgttgaatgagaataatatcataaaattcatgagaaacgaattaattatccatccagaacctcatttagatccgtaccactaactaaaactatttgaatagtatgctgttagtagccgcatttaaaataaggattaaacaaaatttcgatctctgcattccttgcaacatggaataaagaagaaaggtgcacaaagagaggagccattagataaatcaaagacttctagacctaggttaatttaaatctagccaggcacgcacagtgcaaacttgcaaccgctcaagaatctaagaaaaaaataattcgtatgactacgtcgtaccctcataaactttgtaggtatatagtttttgtacttacgtgtaatcgcacagctcatcaatgacataatcctcgaccaatgtgtcatttgatttgaggctctcccgacgaagctgtgtgcaaagttgcaatgcatctggaccctcctccggcctaatggtggtatatatgctaacctttatcaaccgcccacttgatggctactccactctaattacgttttatttactgctactagtcaatgtgatcaatgatatttttctcaatttagaattgttggattagattaacgagaaggcgtgtggtctccacgcaaaattgttccacgcgcgtcgtgtgccaggactactaaattggtcagcactacagtttaatttgggtaaatggtaggtagcttacatgatcaatctgatcgaccgatcgatcgagatcagcttttgacaaccaggttaatatttagcaattttgagccatagttatttcattgtttttttctaaaatttgacaaggaactaagttgccaaaatattttttggctagattgaggacttggagttactattaatagaaaagaagaatataggagggttgaattggtgggacttacagctttattactagtaatcatgctttgctggtttatcttaattatatttttttacatgtatcttaattaatcttggattagggagtattcactactagagaacaaaccttttgacgtagtacccaaaatcacaaatacctcggttagattaaaaaccagtactaaaaatgctttagtaccggttataaaagtccaaatccctagaaacatctttagtcctagttgatattaccaactggtatctttactatcggttggtaacaccaacatggactaaagaccagtagtaaagcctccagggttagttcaaaagtaaaacatctcttcaagctagatgtgtgtagtaggtgagttggttacgcgtgtgagggctgaggtgagagatcttgagttcgaatcccatatcccacatatttattttcacttgctatgtatcggtactaaagattttgaacttgagtcccgatttgctcgtctcggttgctacaattggtagtaaaggagttgtaaaccgggactaaaaatcgtttcccctatagtgattgaaagctttggcagagggagtttttaaacccgcaagcactatatatagagtaggtatccgacacacacatatatgtatactcataaaagaaaatattatacacggtacacctagctaggtgtatatactcatccttttcatatactccctccgtcccaaaatataatgagttttggttggatggggtatatcctagtactacgaatctagacaaactatctatccagattcatagtactaggatttgtctcatctaattaaaactacttatattttgggatagaggatgacggagcgtggggctcctcaccgggagaccgcgcaggcccccctttgccggttcggccgggggcgctgagtgaggttcttcgccctcgatctgaggaaagtcagcgggagaggaagtgcacaagacacgggcgacgtagacaggttcgggccgctgagaagcgtaacaccctactcctgtgttctggtggatctgtgcttgaaggaatacagagaaccggagagcgagagtgagttcaggctctcgcccctcttccccagagtcccaaccccctttctcctaggcttgggcctcctttttatctggtcaggggtcaccacatgggcctctagttgcctaagaagggaaacatgctttttacaatgagggctagtctacagccggaaatgacctctgacaagcagagcacacgcctcctgccccgctcgcccgctttcccggtggacgcccatttcaaccttcatttaatggccagcgacttccttgccatatttgcgctgaagcctggaatggatctgaccgggactgacataccaactccaggagttagcacgccggctccggctagggacgagagccaggaagctctcatcattccgacgggacggggcgaggcgtgtgacaggccgcctgttgccacctaacccgcgatctgaccggtctgtgaccggtcacacaccgcgaccggtcacggatcggataagcgtgcgctgcgccgcattaaatgcgacgtggcgcgctcgtccaacctgctataaatgcggttaggtgagccccgttgtgctcacctaacccacacacgtggcgccaaaaccacagggggtcggggcgccccagccctcggggccgaaacgggggcgccccagccctcggggccgaaacgggagcggcccgacccctcggggagacagagggaggggtggccacgtcaccctcgggcccgacccccccgagggggtcaggccacgtgggtgaccgcggctacccaagtctctagtcacgatacccccggccccatgtcaccgacagaggaagtacaaattatacatttacccatgtgagatatcaatttgaactttaatcggggattttactatttacgctagattcacattgagttggcttggtgcaaatcaacattgagagggacgagtttgcacaaatgaaattttaggactaaaccgacccaagaaacatggcatttgcatttctatccctgttttcaatagcaaattgtgtgactttatctttactcttttaaccttatgatttttttcccttgttgtatgtttgctagtctatctatactccttataaaagggagtagctagcggtgatgattgttctgtcaccacccgaccatcaattcccaactttcttttagagcgaaaatggcatgtcggttagaggacccacgtgtcaaccaactcccaacaatagccgattggaataagaacgtggagcactactacacatattttttttaaaaaacaaaaactcttacaaataataatttcaacaatttgattaacatagatgagtggatatctagtgatgtacccacagcatatataacacatcagtgttattaaaagttcagtaagaaagttttagtatgtatagcctttttcgtcaagaacatagagcatatttggtcaggtttaattcaattttaagttcggacttaactatatatgtacttaattatatatgctatgaacgtacgatgtctcatcagctaggacgcaaacatccaaaaattcagaaacagacacacaattatttcggggaaagtaaaagtatatatgctctgaaacagtaaacccatcttgttgaggacaaaatcgaactaaaaatacatagaacaaatcaagctgtccaacaaaatttggggccccctcgctcgagacagaatctcctggtgttcatggcgcattccccaatcagatggcccgatcgattggtagagatgcaatgcacctaataagcacttggattccgagtgtacagggccatcagcaactggataccaatttatttatatatggtttagctgcaaatgattctaggacacttgccataaaacactagttttattgctcaacttgtggcaaacttgtgtgctgctggggctgagtgcatatgcaagtgttcatcctagttggcatgatctcatcaagcttagctcgtggtggtgattaattatatctagtgcctaattacacttcaggctttcctagttgatcttgcaaagcagtagtatatactatatgtgggaaaattaaagttgttcccatggtttcgaccttcttttgaaccaagatagcgtgtaactttttgtttctcgttgcttgattgagaaattataatttgacgacgcatgatagagagcgtgaattacgttgtcacacggatcatcagtccactgacagcccagttaattaattacgtaccggtacggtccctgttttcaaccggccgtcgatcgctcgttcctgccctgttccaagtcaagtggccacaattgttgacgacttgagttaatttgataatgtgcattaaattatgtagatcaagtgcttaattatgcagggcttttgctcccattcttcgacagtaacaggccagttactgctggttttagagcacgtctaactctgttaattttatactgatgaaagcccaacctgcttattggttaatgattggttaatcgatatgttaattgaacgaggtaaaatgaagcactaaaaggagaagaaagacatgtttagatgtgaactaggaggaaaacagaggggaattcagaaggacaaaagaggacttgaggctcaataaagcttttcgcaagtgggctgagaatgtagggcccagtgaggcccaaatagactaattgcgcaacaatatagcccacttgaaaattagcccagatatatagcacaaaatgttgatggcccagaagtttattactctatgttgggcttattctgtaaccgggcctaataactccatattcggcctatttgactatttctctaaccgggggcccatttcgcaagcccattttctgattcatgttctgattctatgttctgattctattccgacattgttgctgcatgatagcgtgttctttgacctacttatgcaagtaaccaaaatcataatggtcagaagatgctctcgatctgctagatatgttacgtactaccactagctggatgatcatatatactgtcaaattaaagctagctatcggcggtgatgagatgatgagaaaatcgaagtaagagaattataccaaaaccccaggtgatgaaacgcatataggcttacctcgtaatgcaagtaacttgagacagggcatgcctcctttgcctcacaatcaaacaactaatttaaccactgtttaatgcttcttctgctaactctcctctcatcaacagaatcatctgaccatctttatatcacgttgggccccatgcttctctaatcactcgatctctcccagatgctttatgcaaagcctatataaactttgtgttgtcccaaaccattcgcccgatttgatccacatcaccactttggttcctcccatttttcatttcaaagtgatactaataagcaagtgcaaggatagctagcttgacagtgtggaagtagtagtaggagcaagaggcaaattaaggggaagctgcaggtggtagatgcgtaatgcgagcggcagcagctgctgctctcgggtggcggcgccgttgcatgcgcaagtgcttggctcgccgtctccttctcatggctacggcggcgccggcgacggctgtcttctgcaggcacctcccccggcagtcgtctgcggggagatgctggcactgacgacgccggcgccgccgtctcttctccatgcactggcctccctcaacgtcctcctcctcgtcgcctacctcctcctcttcctcctcgccaagctcgccgccggccttcaccgccggtgagtgagtgacagagctagcttcagttcagagagatctttgtgccattaattgcatggacgtgtcacatttttactgtgcgtatgtatgtagaggccatggtagctgtgacgagcaccaggtcacggagacctccgggagggaggagttcgccggcgccgacgacatcgccggagtgcagcagcagcaagcggagatgctgttctggttcgacgaggccgtgttcgaggacactgctctgcttggtggcgaaggaaaggatcagctcatgtacgacgctgccaccacaccacctacacctacacctgcacgttgcttgcaggtggagagcacctttcccatggtggaatccacccgacgaatctcgccgcaccatcgccagtgcagcttcagccatgaggagcccaaggccgccgccgccgccgccgccgccactgcgtcgagccagaaggatatcattccggccgccgtgccatcaccggagaacgttcccgtcgaaggtataaccattaattccactaacctctattacttcttgttaaccatgcatttcatcctggttctgacactcgtcgtacgtggttgcagccggggaagaggacggccatggcgaacacggagaagaagacgatgaggaggagaagaggtttaggggagatgacgtgaagctgttcgtgaacagccgggcgctcgccgacacgaagaagctgcttctggagggcgccatggccgggaaaggaggagtgcagcgcgagcgcgaggaggagagcaggttgggcgcgtcgacgctgacgagcgagtcgacgtcgaagagctcggtggagtggcggagctcgacggtgaccaaggactcggagacggagtaccccttctcgtcgtcgtctcgccggagctcgtcgcggtgggagtcgtacgctctcttccgcaagtacgacgaggacatggtctacttccatcgcgtcggcgcccagaagctcaccgagacaggtacatactaattattcttccaaaatcaagtcatcattaccactcattacccaagctagattaattaaacctttctcgagaaacataaacctcaatcaaacgacgcaattccagctccctgcaactctttctctacacacaatggggctcacacaacaaaaaatatttacagaaagtttactgatcagttgcgtttgctggaacggttaatttgcagagtcgtacaggtcgataaagtatcagccgcgatcggtgtcggagcggatcgtgcagaagctgacgccgaagccgcggccggcgatcgggctgagggacccgtacccggagctggagcgggtgtacgtggcgcagatctgcctcacctgggaggcgctcaactggaactacgccagcttccgccgccacgccggcgacatcgcggcgaggtgctgcccggcgcgcgtcgcgcaggagttccagcaattccaagttcttcttcaccggttcatcgagaacgagccctacgagtacggactccgcccggaggtgtacgcccggatgaagaactcatcccccaagcttctcctcgtcccagagttcagaggtaactaactaatttctctgatggaattgaccaaactttattgttttgttagctgatttagagtagctgagaattgagtagtgcgttgttaatttttgaaaatattgcagatgaggaggacgagaaggacgatctgatatcggcggtgcagttcttgtacatactggaggagtcgatcagaacgttcatggcgttcctgcgtgcagacaagaggagccactaccaaatgttcagagaaatggtgaagaggaggaccagctccatggatcagactctggtcatcaccctcaagaaggccaacaagaaagtgagccacataaataaacatcacacacaatgctgatcagattttctttcatcatcatcattaattccactttcttctcattgcctgaaaatgaaatcttcagaagaagagccggctcaaggacctgacgaggccaagacggtgtctgaggaggacgaagctgagggaagaagaggagatgtcaatactgctgggcttaatcgacctcaagatcgtggccagagtgctgcgaatgccggagatcaccgatcagcagctgcactggtgcgaggagaagatgaacagggtcaaagtcgacccggctcagggcaagatgcagagggacccgtctcctcttttcttccctgcacattgacagcagcatcagcagctgtaactagctagtccctgcttgtaatctactacttttttcttgcccatctcctcttcaaatcttcctttgttgatatagtgagaaaaagataaagttgcatagacgacatgagaatatgcatggcacgcagctagcctgatctagttctgtaaaaagagagtcagagatcgatgaagagatcgtgtaaaggcaatatatgtgtacttatgtatttatacatagtagataaataagagacccacatcaatcttgtagttgggtgcatgtgatgtggtgggggtgagatactataaatttgatcgttgcatgcatgatggattttggaatctagacgcttcatgtcattatgtatataaatccgtgtgagtgtatgtgacacaatctgtgtgtgcatggaatggaaagcaaaagaggtgaggtggtgaggatggagacaagcacagctttgacaatgctttatctttttcatgtgttcttctctctctgctttataggctctcctccttggatcacaagatgatgatagcaacaaatgtcacactagatttgcctcaacattttaggataaccacatcatcctccttttcctttttattttatcttttgttttttttcctttgtggatgttggcactcttatgttatgtcatcagggaaagcagcctctcctctgcataacaaaaggaaacagaagattaaagaggtgttctacaagttcctgacttctctgtatccaactaaataaaatcatccatgagctttgtgttgtgctgacctgcatttagatatgtttggtgctgcataaacaaaccaaagattacgccgaagtgatcatttatatcccttttttacattggataagctcttgacgtcgattgctacgtgcagagtcgagtacagagatggtccatggtgctcttgcttttggcaaagaaaagattagcagagtcagaaagtggctggccactgtaaacaggtcaaaaagagtgggggaaaagatttcccactgacaaaatttggttaccaagaacaaagtgaacaacctcaacaaaatcaaaacgaacacgttgatgatgcagttttattttggtttgggctgagttgtttcaaaataggcggggcctcttggctaatgtaagataatatatatagaagttgttggcctttggcaatcaaagcccacaaatttcacaagccagtaccgcaggccgaaataagttcacttcaactcccttaactgggggccaaatctaattcgtacctctgaaccacaataccagatatctcgatccccaacaattaaaaaaaattcaatttgactccctcaacaattttggagagcggttttgctagtgtaaccctttgacttggtcaactttgtgctgatgtggcaacctagtcacacaatacaagtgaggcccacttgtaagtgactaggaaaaaaattaaaaacatggggaccacttgtcaacccctttctcccctctatttctccgaacactccacgctcggcgatgtgctgcggcgttggcgcgacttctccccatccctcgcagcggcgagcggtagggaaatgtaacgctccgctttttgcgtgacgttaaaaactaattcggcaaaatcctatatgcaaaaatttcgttctttgagtgagagtctaagtcgtgccatggatctcaattcaatctccatcgttgttccctctcatcaccatcaaaatcctccacctcaagtttccaatcccgattcaagtttccgaaatcaaatcctgaaattcaatcgcctcctttgaatcctcgccaaatacttgtcccgattccacaaatatccgagtccaccttgaatccattccttgactcctccctgtttccctgagtccaagtaatcaaattcgaaattcaattccaaatccaaatcccttccaaatcatctctctgcaaaagtctattttgcctcccccttggtcgttgggccgattcttccttccttggccgatctcctccctcagcctcgcacgtgcgttgcacgcgccgagccgagccgagagagagctctctcgctctctcgttctctctctctctcgatgctttctctctctcacgcgccgacgtcgatttcccgccggcatcgctcaaacctccaccgccttcgctcgttcccgcgcgcgctcccgccgtggtggccgaccgccctcggtcaccgtccgccctggcccgcctgcgccgcgcagccgcccgtgcccactctgccgctgcccccacctctgcgccgcagcgcgcgtgtgtccaagacgcggaggcagcgcctctctctcccacgcgctctctcctccctcagctcgcccaaaatcggcaaggagccgagctcctttctccctccccctttttgctttttccccgaccggcgccaccgtcacctcctttgccacccgtgaccgcctctgtcacagcttgaccgcgaatccgccaccgcctctccttgatcgcccgtgctcggttccttcccctcgaagctccacatcccgcgcctataaaaccacagccgagcccctcccctccatctctctcgttttcgccccccaccgcgccattgcagccgaacaaccgtcgccgccctgttgccgctcgactcgatctcgtcgtcgccgtccgccgccgagcaccggaggaaccggtgcgtgcgtgggcgcgtgacgaggagctacgggcgccacctctcctctattcctccccggccgcgcccactcggtgccgcgccgtcccaccgtcgcgaccacctcgccacgactctctccgatccaccgacgccgcttcctcttgtcggtgagctccccgccgaaccctttcctcttaccgctcgctatgccgcgcccgccgctgcacgccatagcctgccgcacgatgcgccgcgcgcctcgccgttgctctgtttccgccgctgcgcgcagtcgcgcgccgtcgtcgggccccagctcgtcgaccaccctcgccaacaccgtccttgagctccctaggacctccccaaaccattccctagcaccgccgtcgcccggcatggcctcaccgccattaccgtccgctcccggaggccgctgctcgtcgccggccctcctcagtgcttctccgccccatccgacaccggaaacagattccttgaaccccggagatgctcccacccctttgaatcgaatcctcgtcgtctcgttgtgttttcccctttttgctcgccggtgattgccgccgccgcaatcgaccgccgtcggcacctctcgcgccgattcctctcgccgccacgctcccggagatccccttgagctccccctgactgtccctaggccgccggccttctcctttgcctccgcgccgtgtcgccccttccgccgccgcataacgccaccgcgcgtgcgtcgccggtgaccatcaggtcccgcgtcaccgcgtgcgcgtcgcaaccccataccggttcggctaagcccgagcccgcgtgcccttcgctcttctcgcgtgcggccacgtcggcgtgccggcgagattggccgccgccgccggccgtcgtcgcgcgtcgtcttcccgatctgagccgtggaatgagttccccttctcctcctcctgccgccagtgctagccgcccctctggcttgccgccgttcgccggatcccgccgtgagccgtccgatgagccgcccggcctcctctcccttccccatccgacgtgacgtccacgttggcgccacctcagccgtcggccccgcttgaccaagtcagccgacgcccagtcagcagccgccccctctctcttgctcttgggcttggcccagtagccaccctcctcctcggcctgataagtaagacaaacaaagtccatatacactcccttcgtccaagcccagtgtccatcacccaagagctaaaagtccacaattactccctccaattgctcctctctctctctcaccttcttgttggccccacgtgtcaatgagtcaaagatattcttgggaatatctttttcaatactccacacatatttctcttttctagaaattcaataaatcatttcctatattccaaattccataaacccatcctcttaatccggagattccaataattcgtcccctcgagcctgtatgtcagtggatgtcaataatattcttgagaatattatttctataaattccataaaccatttctcgtattccagaaaattccgacaaatcgtctccttgtccagaaaaattcatttaaacttccaaaattcatatccctcgatccgttcgtccgattgcctccgttccacttccagtaattccattgaattgtgatctatctaatggcactattaattagcctaaataggacattttatttggtctttgcttaggtttttgattgtttgcgcctagttgcggttatcggatatttttcttcaagcggatttctcgaagatttgtgaagcttcgtgaagaccctgagcaaggcaagccacctttgaacatattgagcctatatttgaacttaattatattgcttgcaaaatattatgcattgataggattgcacttaatctgtttgccccgtctgcaaggcagaccggtgggcctacctaacttgttgcatctgatccttctattgttaattgttatatcatgttcccttgtaaccatctagttgcgcctcgataattcgtgcactctatgcgagtatcgacggtcgccttcaaacttaaaatttgagtaacttcttgggtaacacttggtttacaaaatctttggaaaacccgacgcctgggtcggtgccttgtgaaagaaaatgagttttaaaaatgaaactcgcgacacaaggccattcctgggtggaatacttgtgcggtcgcatttaaggaccgattccttcggaattacatccgagaatacaacagtgcgaccacatgggtgtaatgggacgcccctggctgagtaattagctaattaggggaaccatgatgccaagagacatgtggattcaacggggtggtgtcggggagaaccctcgggcttcctggcacagtatggtctgggacctaacctgttgttggtctgggacccctctcattggcatatggcaaccctgtgtcggctttggaaacaccttatcgtgaaagcctcaaagtcgccagacgtggctgttctgcacgggctaggtgacccaggttagtaatgtcgtgtgggtaaagtgtaccccctctgcagaggttattaaactattcgaacagccgtgcccacggtcatgggcggatgtgaggtgattccttagcgtagtttttgttttaccctgttttatgaaaaggtgttaaggtttgggaaacctaatgcttgggaagcatttagctgtccgggggacagtgggaccgggagtccctggaagtgattggtcgtttggggaccactattatcgggaagtttggaaaattggtttggtttgggaaaactagatttgaagccaactcttggagttgtgcaaatcttgataaataaatttgttacttctcaccccgaccgagctgagactttgtctcgctctggttgtggaaagcacacacttagattgttgaaaaccttgaaaacaaaactgattgctaaataaacagccttcccttgaagcttgcattaaccacctaagttcccctggcttgctgagtacgtaagtactcacccttgctctctatataaatatagttctgccagctccgaagatgaagttgaagtgaagtgaagattagggtttcgtcctagttccttgccgttgcttgtggcgttgggtgttagtccgttggttggttcctctgctgctgctgttgttggtgtttgcctcgtccgtgtcgccagttgcattctcgggctgtctgagctgcaacctaagttaaggtaaataagtcctctattaattataaggatttgcaatgattcatgtttgtcaccgtgggtaccagcgctatgtcctgggactggtactgagatcgcggtttcgtaggacgcagttcatgccgttttcctacgacacgctcctgtcaggtgccgttgtacggcggtgccagattggggtgtgacaggaaaagaggccgcaggaaaggagagtggggagtaggggcggcatcctccttgcctaccactccgccccacttcgatcgatgggagaggagccggaggcggcggcaagggcaaacaatgacatcagtggagatttaggtggcggtggagcaatagggctgtccaaagtgaagctttggcaataaaacatggcccaaagtgcaactcactctaaactaattctggctatatatgaaactagatctagtatatatgtttagattcatagctagaaattacagtactactatatggggataaggagatttaccatgtatctacacacatactaagtgggctcgcattggggtgctcttgtactcttatgcatgccttgagcggggcggttatttgggctttggactgacatcaattaacatgtagatgagactatagatggccatatggcccgaggcccatggcccggcccaaagcccgcaattttggcccggcccaagcatggcacggcccgactggggtcgtgcccgtgctggcccgacaaccgggccgtgcctgggttgcacccttgtcacggtgggccggcccggcacggtccgagtagtattgggccgtgtatgccgcccgtgggctggcacggcatggctcggtgcgtcggtcgggccataccggcccgacaagcctcggcccaggcacggccggccgggcttgggccgtgccgtgccgggtggcccagatggccatctatagatgggacatgaagcttggcccaataattgaggctctcatagcggcaagctaccgtagtttagaactcatgtcctgatcagtaattgtgccttatggatctaacagggagggaggatcccaaaaatataaccttctccaacaatggtccaagttaacctatacgcatagttaaaatcgacaagtattcaggaaaaggagagagtacttgaaaaccgaagtcgatcgaccagcaagaaaacaaacgaacggacgttgcctaataggaaattatcctgagaaattcctaggttccaaccatccatagcatgaccattctctccgtgagtccgtggtcgatcaagtgtccatatttgagaactgtagcataggagtactagctatgctatagtcgagtaaattatggaggatagtgtactggtactaatgaacaacgacactggctagctgtgctggctaaagcgctagctagctcttggttgtatactactagtcgatcgtactagtctacactactcatacgcatactacgtacgtgtgtatagttgtaggttttcaccgtgcatagtcggctactatacctgactcagtacagcactccacaagtgctacggtctgatcgttttctgctgctgtactgcattgcattgcatggagatggacagcaactgcagcatggtatagtatttttctttcaagaccgagctcaagctggaccattcatctactccgatcctacatgagatgtgcccagaggtatctatcagaagctcatcagaatcaaatggggatcgatgggacccagtacatactctcagctagctgcatgtctctctctcaagagaagccatgccaaagggtcccactggcttaccaaagtaaataaatctcagctagttttgttgtttatcaattgcgcgacaaggccactagcgcagcttcggagagctatagcgacacagaaaagctaggttcgacttgtcatgagattatagcttagagtagaatctatcatttgctgtaatgtacaatattgtctttcattcacacgtacctactcttactccctctgttactaaatgtaaacatttgtaggttatttactataaagattaaggataagagaaaatattctctttcagggtgtgtttagggggtgtttgggagagcccctctctcaaaaacataagtccctcccctagggacttattgttttgtgagagtttagcccctctctcccaacacccccttagtttatgccaaaattggaagtttggttgaaattagaacgatatgatggaaaagttgaaagtttgtgtgtgtaggaaagttttgatgtgatggaaaagttggaagtttgcagatgtttttgacaatatgatccttataaaagaaatatttcaaacatgaactgtgccagtacttattttaaaatgaaccacgaactcaacgtcaagcccgatgacactatgatccaacgtctcagcaccagtcacgctagtgttaaccccctgctatcatggcaccgagttcaagctggatgatcaacgtggcaagtggtcaactctaagtgctctggcattgaacttccaacctcaacgccaataagcatgacgctgaggtaggaggctaagcttgtgctctggatctcaacgagctcgtagtggtgctagagtcgacgagactcgacaaggacaatggcgatgtggaagagcaagaaatcggtagcagcaccggagtcaattggtgttggaacatcaatcgaagcaatgacaccactgcatgatcgatctagaggtcaccaccgccattgagctcctggccacattcccctaccacggtgctatgtccattggcactgaggttccatggttagcaccatagcacttggaactcggtctgccatctcggacccagtgtcatagagacaattaggttgctgagatgttggactttagtgtcacaattcaattttgaaataagtttttagcagggtttattctcaaaataagcttttcaagagggttagttttttttccgtaatttcattggtcaaactttaaattgcttgcattctctcctaagcaactgattggttgaaaatgcttgccttcctgtgcatttgaaatgtgccagaaatgcttatattttgtataaaatttgaattatagaaacacttacacttggaaatggagagagtatgaacttgtcattgatattgtttatgttttcctgaatctttttttcttcgaaatagcatatttcctaataacttctattattaggaggaatcaaaatgttatttcagagtttagcacataagtctagcacctagcattacgttcaagtatctacgtacattgtttgctgcctctcacttaatccttgatttcttctctttcccttttctctcgatcggccaggcatatggccatgtcctgcaagtgcgatcctgaagatttatttccatgcccttggattgttcctcttgttaatttgtgtgccaaatgggggcgcagatacaggcatacagcagctaaagatcataaagaagaaagcggtgcgtgtacgtatagaagacagcagagagaggagaagctatgcatatgagcagagcttagggttgtgcttgtgcagcagggctacctattagcttcaagctgcagctatagcacccatccactctcttctctgattctctcttgtgttgcagtacaaattgtagctgcggttgtgcatgcatgcatcatatgtcctgtgctgtgctgcttcgccataaacacattgcaaaccgcctagtttctcgtctctgttataataattctcctgaagaaatgcaagtagatgtatagactgatcgatatgtgctcatcaatcttgtgatcatgcatgcaaacatcgctgattaaagttgagtgtgtagtaggactgagagctagctagagatcggaagcgaagagtgtagctttattatattaggaggcagcagccgcggccgtagcttttctgacaagtcgatttcgccgattcgacatgatatttgtacatgcaaacatgcgtgtgtttgtgtgtttgtatctcgagaagctcacggggccagtctcgtttggttggcctgcgagtacatgcatgcaatggctggtttgtgggcgataggcagctgcaaactgccctgcaacacagccaccggcctgccggccggcgccctttagattaattagtttaactttggattctactcctactccatatgtactatatgtctgtataaatctataaccctccatctcaaaaaaagaatcgatcaacttttatacacgaatctagaaataaatatatgtttagattcgtgcaaaaaagaaaaaaccggagtatacgtattgtattttgggatggagggagcatgtatatgtacatgtggtatcctatataaattagtacaaatgagagcaagttcaataaaattgccaactacaatatatagcaggctatatatagcacatagagttaggggtgaaaacagtacggaaactttccggatcctggacctattttcgaaaacggaatctgtcggtcggaatttttcggaaacggaaacgaattcggaaatattttctcggaaacggaatcggaaatgataagggcagtttccgtcagaactcgtaatcggtcagaaactttccagaaattttctcggaatttccaaaaattttctcagaattaccagaaattttgtgactgaaataccctggattctttttttaagcactaaatagtgaatactattgtgtttggctattattttttttaaaaaaatatttgttatgcaaatctaaaattacataagaatatttttttgtcctgcattaggatttatcaacaaccttactcttttaaacatagataatttattcaattggatttatcagtttgaggggttttttattccgataaattttcgttaccgtattcgcgccagttcgttttcgctccgttttcggtttcgataatattcgattccattttcgtaaccagggtttccaattccgattccgaaaaaaaaaatgaaaacgaaaacgataaagatggtttccgtccatttccgtaccgttttcaccccctacatagagtgaaggtcacggcagcagaaattcacacttctcaggcaggtgagtaaaaagttgaacatgtgatgaaatttaagaatcaatttgaatgatggaacaaatctagcatggattgatgcgaaaaagaattttcaggttattcattccttcaattaatatatttgaaatccaaatgcttatacgtatatggctctatatttaaggttgcttaaattttagaacaagcatgtactccctccatcgcaaaatataagggattttagatggatg

SEQ ID NO: 8381 - DNA, 64846 bp, Oryza sativa
  unsure (1)..(64846): unsure at all n locations
aaaggagtaggcaccagctagtgtgcctctaacatatgcctaagaggaagaaaagagaaccagcggcaaattactagcctcactaaattcgtttatattgaaaatacacttgtgtaattgtacgccgatttgaactttgctggatagggtcatgtagccacaacttcactgctataccatcaagaatactttagatttataaattattttgttcttctagctgatgtatatttttattctctttttgtacgtgtatgtgcggtcatatggaatgtcaattgcagttttgagagcaagtttaatagtatagcctactactaactccaattaatctatagccaattcatacaataattacttactatactattagtatatgatcccacctgtcatacacatattgcgtcttagagtccgtattgcagctggctacagatttatagcccgctgcttttctctctcatcttttatctcattaaaatatgtttataactggctaatagtctgccattgtactgctctcattgagcaacaaatttcagttgttaatttggtctattgctgttcttggttgaaagtcacaaggtcattgatgtgtgcttacggctgaacatgtctgattgatttggacggaactgtgatttttccccgcttttcaagcaattgggatttgtgacgaggaattcttttctcttgattttgctaatgaaagaccaagcttgtctgcagtgaaaagtaaaggagaaacgtacacaacggatgattttgatcttgcattctggtacagatgtacacagttttgacccaaaactggtctaagtcattagtggagagcttaattatcctttgattatagagggtgcaagaggactagaggagcaaaaccatgggcagagacaggaacagagcagctagggttgtgtaaccttactcccaaggcctgaaaacccaaatatattacactgtaaagtttcagaatagaaaatattggcaaaatgatgtaaattatagcatcttagtttttcttttacaaaacaagaaattgtatactacagtagcccagccatcatgtaaggtaagtcttgctccccgctatgcacaacaaaatttcgccacccgatcatactttcagaaggataactttataggtttttaatacgatggaaaatgttcctctttgatcatttgaaacatagttacggaccttataggccgctatgaaattcttaggattttcttcccacaattatacgacagatgcacacacactactataaacatagtatcacgctcacccacaccccaacaaatatgtttcctaacacacatttagacaaacagaaaccaacggcaaattactttgagtctctatttatcctcactttctttttgtgttttttatggtgtatccaattggtcattcgtgtattttttccatatgttttgcaatatagatattatcaaattgaaaatactagttttttttttgtttttgtgttttatcattcatatgcttttaaatgtccaaatgagctatatatatgtttgcctacgtacgtgcatgctatgtacttgtatgtgtatgatacacgctacgtggtagatcgcgctacttactccctccatttcataaaaaaacaatgattagatatgatatattctagtacaataaatatggatatagatattctctatcctctccagattaattgtactaaaatgtgtcacatcgaattctagattcgtttttttaatgatacggagggagtatatcaaatgcatgggaatgtgggaaaattttattcaatagttgatctaacgctctgtagctcattctctaacagaaggtagatggaatgacacacaggtaaacgaaagtttgtatcatgtataccatgatacatgtaactcaaaacttttttgtggcacacgcgtaacctccaactttcttaatggcataggggtaaaagactccctaaatcatgttttaatttctctgggatccaatgcataaacgtacgcttttttttaacataatacatacattctttgactttgaaatcggaatgaaagatggaaacgattgggttatctaggctgactggatggatattgttattatatatttcctccatccaaaagtttgaagcatattttttttgctttttttcaaattacatatttgtagtctttatttgataaataaaattgttgaccaaaaaccaaacaatcatcttaatatttattggttacatgttcttttgttttgtacatggtgaactagttaattttttttcttgatgtcagtgacaaaataaatatatcaaaggcttttggatggttggaatttgtctgggtacaactttatactagttttataagaaattcttgtcaaaatctagtcaaataatgtaataaatataagtgatctctccatcccaaaatataaggtctttatattttggaacagagggagtagtatcaattcaagactaggattggagtgcatagataaccaaccgttttaaaccatcgttcttaggcctggtttagtttcctaattttttttttctaaaaacatcacatcgaatctttgtagacatacgtggagtattaaatatagattaaaaaaactaattgcatagttaggggggaaatcacgaaacgaatcttttgagcctaattagttaatgattagccataagtgctacattatccaacatgtgctaatgataaattaattagactcaaaagattcgtctcgtggtttccaggtgagttatgaaattagtttttttattcgtgtccaaaaactcttttgccaatatccggtcaaacatatgatgtgacatccaaatttttttttctcaaactaaacatgcccttagcctcgtaagagaagagaagagaagaacatctctgcagtggattattatccatttgtcctcttgttgaatcaatgtttttaattttcaaatcataacgagtgaccctatctgcagacaagcaaaactggtgtgcatgcagctgcagcagtagtttctcccagatggccatatgtacctttcgtgtgcactaattgttggcttcgtgacaattgacgaacataatggcaaacgtactaattaagttagtagtactatactcaaacctccatttgctgctaacccaactaaccaaacatgcatccactgttgaatacgattgcttgatgtgcaatgttggctcgatcgatcgatcaattgctggggttcgattcgattggtcttggcacgcttgcgagagactttaaaaggttggtcgttttctaaacatgtacaagcaccggccataaattttagagagatattttacaactgcatatgcttgtacgacagaaggatccacatccattaatcccttgcaagccaagacaagaaaaacaaggagtgatgaattgaatcgagatcggtcgatggatcgtctccacgagttctacaggctctagcttaagctacgtgattaagtacagtacttacgtgttgttcgtgccaaaggaatataggccttagttgggaaaaaattttgagtttggttgtcacatcggacatacggacacatatttgaatactaaatgtaatctaataataaaacaaattacaaatttcaccagaaaactgtaaaacaaatttattaagcttaattaatctgtcagttgcaaatatttactgtagcaccacgttgtcaaatcatgacgcaattagaattaaaagatttgtctcgcaatttacacgcaaactttataattattttttaaaaaaattatccacatttaatactctatatatatatctctaaacattcgacgtgatagatgaaaagtttttgttttggaaactacacaaggccataattgacttacgtactgctagctggattcgctgttgatacgtccagtaggcacgtatatacacacttggacggtgacggttgagtcagcacttggcaattatagcaagttgcaatccgtacgtacgcagcgacgtgtaggatgagatcccgatccagtggtgcagagcttaatcaaatttacggcgacaataatacagctggtacgcgatgaacatgtcgtcaacatgaatgatttcgatcgacggagcggtagctgtgctagctgtgtgatcgatcggtggcggaagttcgttgcagatcagtagatgacgacgacgacgacgactagtagctacagcttcccagttgcatgcaaaaaagagagaaatccgtgcctactagttagctagcgagcgagctcctctggaagaataatcaccaccagtacgttgctggtgccagaaaataaccactacgccgcgtgacgacgaaggagatagataggatcggtggtgtaatctggcaggttgggcaacgtgaaggacgttccttcaccgacttgacatgcccaatttgtgtcgagatgcagctaagctagctagcatgttggcaagtgtaaccgccggtgcatacgctggtgtggtggataaaccatctttaatcggtcggccgaaattcacaatagtcccggtcccactaaaaatcgggattaaagatgatctttagtcccggttggtggctacagtgggcatatttgatctttagtcccggttggcaaccaaccgggactaaagatgatgtttagtcccggttttaaacctgccaggccttgttaggccccccgggatctttactcccggttggtgttatcaaccgggactaaagatcctaactttactcccggttggtgttatcaaccgggactaaagatctagaagatttagtaccggttggtattaccaaccgggactaaaattcaacgcttaatatataatccttcttccctatcctctcctccacaaccgcctcgcacttatcatctcagatcgatctccctctcctccctctcagatcgatctccctctcctccctctcagatcgatctccctctcctcctccccctcccattcctcctcccatccccggccctgtcctccccgtcctcccttcccatccgctcagatcgatctccctctcctcatcccctcctcccctcctccctctcagatcgatctccctcctcctccccctccacctcctccccttcccctcccatccccggccctcttctctccctttcccttcccacgcagcaggcggccggctgggccgcgcacgggcccagtggcgagcggcggtaggcggcagacgctgccggcatctttttttttttacaatttgtgattcactaagatgtataattttataatttgttgcatgatctgagatgtataatctgtgatgtatttggtttgtgtgtaatttttttaagatttgtgatgtatttgatttgtgtgtataagtaacttaagatttgtgatgtgaatgttttgggatgttactttgatttgaggtttgatttggggatatgtatcccacttgatttgggagaaaatacagggattaaactctagctaaaaaacaatgaaaaaaagagacctaatgggactgacgctaccctctctttagttccagttggtaacaccaaccgggagtaaaggggggttaccaaccgagagtataaatggtttcttcaccagtgatatgtgcgtggccggctgggccagctccgttaggcaaacgcatcttgggggtgtttagagtatgtttagttagtgaaatgaaattttattttagtgttatatcagaacgtttgatcggatgtcaaaaggagtttttggacacgaatgaaaaaactaatttcataactcgttatctggaaaccgcaagacgaatctttgagcctaattaatacatcattagtacatgtaggcacatgtaggttactgtaacacttatagctaatcatagactaattaggctcagaagattcgtgtcgcgatttacatgtgaactgtgcaattagtttctttttatctatatttaatactccatacatatgtttgaagattcaatgtgatgtttttgggaaaagatttttggaactaaacagcccattagatcccaccctaaaattttacaccctgtcacattgaatgtttaaacacctgcttgaagtattaaatataggctaaaaaaataattaactgcacatattgcgactaatttgcgtgacgaatcttttaaacttaattgctccatgatttgacaatatggtgctactgtaaacatttgttaatgacagattaattaagcttaataaattcatcctgcggtttactgacggattttataattagttttttattagtgccaaaacacctaatacgacacactatataatatccaatataaaacgtcaaaaatttaaacctgtgaatctaaacacccccttcgttttcgcagcctgcgtactctccggactccggccggctgcgcctgccgcctcgtggtggtggtggtgggcgcgtgctttgtagttgcgcgcgcgcgccggagagaaaaacgtacagcggcgaaggagacccccatcgatggagtcgcgccattaatttgtcctacaccgccaagttgcatggagtaatccaagataagatgggttgcttgctataggctaaagtcacaaggaacatccgcgaaacgaaaagaaacaaaagagagaaaaaaaagaagaagatcgatcaccttggcgtcggcgcttgcgttgcccacggacgctcctatactgacatgtgggtcccaactctaccgcgagcatctttggcttggttacatgtgttgacacggcgtgtgtaccacgtcgactgaaatgaccggaatgcccatccaagccacgtccggctcacgtggaccacgccccctggttacaccgaccagatttattaacgtggtagtctaccacgataaataagtaatttcatccttgtcgccgcgccttcatcatgtcccgtgtgctaccctaatctacgcgaaaaataaaccgtttaatatttccataacctgctcttttttccacaacgatccagtaagtttagaaacggactttttcgcccatctcgctgtgacaccaccaaacaaagtcgtcagtaccagtaacactattactccatggaatacaatacagtactccatagttctatggtactctctccgtcagtggcggatccagaaatcggtccgttagtatcatgatatatctatcggtgttatagtatactaattatacttagatcatgatattataatatatggataagcagttttgctataggttttaccgaaagtcgtcggtgtcgcctgacaccgattcttatactgtagctctgcccctgctctccgtcccataatataaagaattttgagtttttgtttgtattgtttgactacttgtcttattaaaaaaattgtgcaattataaaaaataaaaagttgtgtttaaagtactttggagaataaagtaagtaaaaaaataaataataattaaaaaaattgaataagagtaagacctcgaaatccattatgttataggacggagggagtacttctactttgccataattaccactacggacctggacccacgtcttgccgaggcaactgattaacgagaaagacagggggcaaagcgataaactccggtaccccacgccgtgccaaatccgtgcactcgtcgcatttgcacccgtaatgacggaaacaccctctctaacctgagacgtggcaccgtagtgacaggaggggcaaaacgggcattttcatccactcgaggtcaggcgccgcggaggcgcggaatttaacgcggcggggccccacctccggtcgtatacgcagccggtggggcccacaaggagtaggcctcgcgcagcgcgacgtctcggtcgcaacgagggcgacacgtgggctttggatgggccgcatcggctcggagtcgggctccgatgtccgatccggctcggggataggcatggacacctactactacgccgcatccgatctggatccgatcccgtgccgtgcctgccgcaccgctacccaagccacccgcatcgagaggtttttacccctgtgccactatcggtttcttcgtctcacctcacgtgctctggcccacaaaagtagtcccactatttgacacgtaaaactttttctatataaggggtgattagattcagaaagttttggtgtactatatctagtatgatgtcgtaagggtgttttgcaataaaaaactaattacataattagttagtaaatcgcgagataaatttattaagcctaattaatccgtcattagcaaatgtttactttaacaccacattatcaaatcatgaagcaattaggcttaaaaaatcgtctcgcaaattagtcgcaatttgtataattagttatttttagcctatatttaatatttcatgcaggtgttcaaacgtttgatatgacatggagtaaaatttttggttgggatcaaagcagggcctgactctacaactatgatactatcttcgtttttaatagatgacgccattaatttttaacaaacttttgatcatttgttttattcaatttcttttacaaatatagaatttaagttattcttgaataaaattgataataaatcaatttgtaataaaataaaatataattattttttctttaatatgataaatcaaatttatcggaaggaagtattattataaatctccttgctcagctagtatctggttggttctgttcaatccgttgagctgataattttactgttcttttagatgaggtgggatcgagttgtgatgagattcaaccgatagagggccttgcttgtgcaactcttttcgatcacgatcaagaatgagttggcagccattcttttctcaatggttggacgtctaacaacctctaaatttctccctaattttgtcaatctaagatatatcaacacggacgaacagtgttctgcacccgtaacttccaccgctagtccgctaaagtgtacatacctagctatagccttccaagaaagaatcctggtgctatgcatgcaatttagctagcctaattaaagttgcatgtacaagcaacgaagcaagggacaaatttagatgtggccaacaaaacggtgactaagccacgcgtgtctgctgtgagaattactacaggcacgcgctatttcattgtccaccagcagcttccaaacaatattctactacagtaccacgtaacgatccttgcgtttcacgtagcatctaataattggatgaaaaataaaaatatccaaaaaaaaaacagctcaattcacacacacacacacaagcgaccttcatgaaagcccccattattttcctagatgttgtacttctactgtctacgtatgaaaatattactgtttacatcagaatctagcaccttaatttccagaaaacagtatttctggaacttccgtcgttcatatcgaaacttcttattggatagttcgttaagagatcgcatctccccacgtcgcccttgtgcaggcgacacggggggcgaaacgcccagcgccgccgcctcccccctggccgccgccagagctcaccaccggaaagccagctggtgagcgaggagggcgacgacggggccttctccgacggcggcacatccttttaggcgcgggggaggcggcgagcgccgacggcgaggagtggcagcaacgtgccctcccggcaaggcggcggtagatccgccactgcagtcgccggatctggcccgccacaggctggatttggtcgaagcgggtggcgacgccatggcgtgtagccggcattggggcgctgcagtgtgtgtcggtgggcgaggccggcgcgcgcgggtggcggaggctggcacgcgtcgccctttcgatggtccggtgggacggtcgtcgtcagggcgcgttggtgactctgcgcctctctagactaccgtggcgactctggcgcctctccaggtgtccatcccctcccccaacccacctctgctgccacctcccttcctctcctcctcccaccccttccttttcctcccttcctctttttcccacctagttgtctagttgctctgctgctctactcgccccagctcttcgctgcgttggtggtaaagttggaggtggttgtcttagttgccagggacggtctcttgcaaagcccgatggttcttggtggagatgtggcctccgccacaaagctcttcttggatcttgtcggaaacatggaagactccgatgtctctgttgccctgtcttcaactttcagttcctcctccagcaggccagacctcctcgccttccttgatgctccacccttctgttggccggtctgcttccaaaccttggtcgtggagtctatcggtggatgaggagacgtgttcgtccgtgaagttggtccaacttgttcgtggtcagggctttttggtctcacccgtgcttcaagtgccttgtgtgctagtgaacatgtcatagggccgagtttggagcggtgtgctttgtcctctgtagtgctagagttttagtgcttaggcggagtcggagctactgcatcgggtctaaccgatgagctgggcaacgataactctcggcacttttgctctggtttcttggaggttctgcacctttcgagggagtctcaggcgaaagccctacctagtattccaggatcggcgacatcgacacctgtgggtgccgtgtcctccttggaggtgtcgctttgtttgactctcttccccttcaggttaaaacccaatccagttttggatgggcgatggcagcggcttctatcgttgcttccctccttggaggcttcgctttgaaggtctagctcttacctcggtctcttatgtggctcgtagttgttttatcacatgctttttcgctttgtcttctatgtgggtttttgccggtttccccgtagtaaacagtgcagttgtatggtttttgggcctggttttccttataaacagggtcaattctcttatgcttataaattccgatagatctcctaccgtcgtttcttaaaaaaaaacttcttattggaattatttgataaacaaaacaaccctaaccagaatttccgagttatggattggaattctttttcaggactggggtttttagaaagatttaggtcgattttgaaacagatttgaacccgattttaaaggaaaaggaagagaaataatatattagttttattgatgggctattgtttcaatcggcattggcttaattagaaggtgtggtcttgtcttaatagatcttatagttaaattaaaacatcgtccaattgacaaaatcaatttattagttttaccttttcttttttctccttggccctttaccctttgaatctcgttctctcttttatttctactacctaggtgtgaagatcagagatactgtatacgcgcatggatagcatatccaactaaagataggaggtgggctatatatgtatattatgtaaatatagactagacttgtttatccaggcatattccataagtcttagtagtgtacaattatgtaaatatatgaggaaaccgagtcatgtacgattgggatccttccccttataaggtgggcaaagagccccctcagggcataaacacattaagatcttcagatcaatacaacctcttttagatacaatacctgaaacaggagtagagcattacttctcgtcgagagagtctaaacatatctaaatctttatccttttactcatccactttaatctcgtgcgctaccctattttttcttgccggtttctagaattggcactaggtttcttttgtttctactacctaggtttcatcggccgatcgagagcacgtgccatgacgaggtccctttatactaacaccggaagttccgatttattgacgggatgttcagtatccccatagcggagcatcttcagaccgttgtgggttgcaaacagaatgatcggtgtgtgttgtagagggcagtggtgttcctacggtattgtagccggggtcacaagaccccggatattccattctttagctgtttaagcttataataattacagtatattattaattgcaaattagagtattatatgtattaggacatgtataggattctggtgatttttttatgggttcgccattggtagagggacacgtttttgtcaataattacattactgatgtaacattatttaagaagatagaaatgatgaaacagtgactcatacatcaccttgtagcctactctatcctttattagaagttgcggacgagaaactgacaagcacattatcacatccgggaatcgagaagatgggcattttcatattttattttagaacagagaagatgcatggacatgcatggcctttttctccttgcaccggatccgtggatgatgtttacatttacctgcagatcgaatagttttcgagaaaaaaaatacctgcagaacccaatcagttcttatctatcggaacggtatcgctggttcactcctgttcctggctaagaactgccaagcgaatccaagttgccagagacgcaacaagtagccgccggaaaccatgaatacacagatagcgattgtgtgaggccaaaccgaaataacgtgtcacccaaaaagaacaaaaagagaaagaaagagagaacaactaggagtactctttccatttagtaccccaatttgaacgggtgttattacgtttgcgcgtgtgatatgtcacatacagagacgcaccttttattctcattttaattaattaggttgggttcctttgagggttcaaaacccttccctctcgacacataaaacggaatggttcattaatataattttttaaaaaataatgtttatttttttaaaaaaacacacacctaatttgaaaaatgtgcacataaaaaacaagaaaatagaagttacgaaagaggagaaaaacacacccttaagatttatatacgaactgaccatgacccacctggttaggttcttcatacgaaattgaaatgatagtagggagtgttgtctttccctacgtttgatttataatacggtagagatattttctttccctatgttgttcatgtccctcgtggggaacaatttaaggcgtagggtacagtagtgttggatttaagttataggtttggcatggataattatgtttacgggttattatcattgatatgcaatgtgttgattgatagcgagatacttagagatgctcatcaggtaagagatgtatgtgtgtttccataaaggtgtgaaagaaataatttagattacgcgacgctcagccagtaaggtctctgttggtaaaacttatccgaaatcaagtttggtgacataggtgctcacatttactatagcttttttgactggaattaatctagtgacacgatgctcgaatttttgatgacaacgagacgcttatggtgaattcgacaaagttgatccagtctttaattgtagtagtaggaatatagtgtgccgatatgtgtatatgagcgactaatgtattttttttaaagaaaataatttagattatggcattcgaagttgcaaacacggcgaaccaacgtgccgggcaaactatacgtgaagcaaagcgagcgatcggtcgatgcgtgcgtccacgctcgcgactcggactcgatccaccggctgcctgcctgcctgccttccttgatgccttccaacctgtggatctcggcatatgcaggcgacttgacttgtactccgttagcttagctagcatatctctagacccatcgacggatcgcgatgagtgatggattgcacgcaccgcacagcacacgggaaagcgacctccaccgtgtacgcacccatttgcatcaatcgaatatatcgtcatgcgtgtagccgcagggtcactagggtgtacgtgttcatgtgtttgacctggcctagctatccagtttcccaccataacctggtacacaacccacggcaatacggcgtttcaggatcgtgcacacacgactttgttccataggtacgagggaaaacgctcaaagaattctatatgtgttaaggctattccaatcagatgagttatcgtcagaaaagttaactgacgagtttgtctactgattgttatttttacctaatactatgttgttattgtatatgcaaggactaataaataggatatagtagattgacagaggactagtgtctagatagcgaattaaagataacgaacgctaagttccaatagcgaaattaaaaaataaccatacatttagattgtgtatcaatattaacatcaagtttcacttaaaatatagaagaaggcacaagatgcaaagttttcatattatatgtgaataatatcatttaagcattatagcgatccaacaaagttaatagtggattgctatagcggtcacgaaatgctataacaggctactataatggttgcggagcgctgcagtacctgctaagtttcaacacgctatcttcagtccgctgccttctagcagtaacggtagatgtccgctacactgttacaacggtcgctactaatactatttattaccttgcatatatgaggtggttaatgatctacacagttgctttggatgaatttattcaacttatgcaaggacgaatttaacgtggttgtcaaaattctttcctcgatccgccgctggtgcaattcttggatggaacacgtaattgtccaacgaaatttcttaggtgcaaaagatcaaggtagtacaagtgcatcatgttcgtttgcaagggagcaaccaccagtcagggtgctttgttgttctctcgttctggcttgcggtcaatacaagtgatgctacaagtctctggttgtggttggatctgtgacaacgtgtttagaactaatcaatttgcaaatggcctgcgtttagttgcctgtctctattaacaagttaccacctgagcaactaatttaattaagtctacaaaaagttgttaacttcaacctttttctacacaatcgatacaatactaagtagctagggaacaaaccaaaatggcagaacttgatgacaaaagagttaaaatatactagtgtttggcacaaatatgtgctcggtcatgtttggcacaaattcaaaaattaacgaatgacacttctatctcaaaataaaaactaaaatcttttatattttaagacggtataatatctattgtatcgttatatcagttgattcctacatcttccaaacaaaccatatatgtacaaattggattatcgaggcataactcatcgataacacatcaccgtcgttattactttgagactactttacatatgaaaaatataattggaggtaccgattgtcttaactcatgttcatactttgaactgcaaatataatgaataccttttttcatagtgaaatttaattcgatctttactttaaaaaagttattacaactaactattatagagttcaaaaaaatacaaacaactattatagagtttgtaaaacgaatatctattaattacttcctccgtaccaaaatataagtatttttagctatgaatctggataacatcatagtagttgttcagatttatagccaaaagttattacattgggatgaaggtagtagattactaagaatacgatcttaaaagatatactagcttgctttttatgtacgatctttaagtatatgactggcagagtactggtagcatccatgactatataagcatggataattaaaaaaacacaaatacacaaaaaaaatgaaactaaaaaggggttatactatttttcaaactctagaggctataatatacaagacaagatcctggtgagaggctgctagctgcaaccctatttacgactaatcatcagacaaaccacaacttggtgatggttacgtgggtgtgcattttccataaaactagtgggcaaaatgcagtctcgcgcacagttggccttgccaatttgtaaaagcgccgagaacccaccgttgaaaaatccaagtcaaaaaatagaaaaaaagcaaaaccaccagccgtagttgagccggctccaagcgagccgtccactcgcgattggtcggaaaagaagatcgctatcggctcatcttgggtcggctcggctcgcggacgccaaacccgcggacttgaagcgcagcggatagcggacttaagaatcgaaatttaaatcgggaaattaaatagaaactggaaaaaggcgacgcgcccgtgacggatggccccagaatcccgatctccacgctcccgccactttttgcgctttagcccctgccaagatttcttatcttatcaatcctctgaataaaagtatttgaaaaagtacccactgttctggtgcttgaatgtgcggtgtatttgcgtttaagaccccaagattttcatgttttgagaattgatccgacagttggggtcacatgcttggcgctttggctggttgggttgggagcgtggtttttgcccggataaagggtagagtggttggttgggtacttgggttgggttgggtggtccattctgtacggtgcgccgggtcgtctccgtttttctgcctaagccattttggacaacaaagaaaccgtgcttgaatactgttttcttctttcttttttgtgagggatgctttttaagtttttgggtgttggtcagatcttcacactgttccatgatagctgccggcactaacccttcactgtcgattaatatatatggtcgattctatagttgtagtatccatttggaatcctaattttgtcattatcactccaaaacaattaattaagttttttttgttctaaaggtattcctttcaccatactgtactattgtaaaaccatataaatgtgcacagcagtgacacacacagaacaaaaagaagaaatatcaagatccgcgtgggtaaaatatagccattcttttttcccctcttaactaaaaagagacccgttaaaacagcaccgattagcaattacccctcccacgaggcagagacggatgactttacagcgaatcaaaatccaaaccggtggcagaaaaatatcactccctttggaaggcgtctccgttccaacccccgtctagaacgcacggcacgtcaaggcaaaggcacgaccacatccatagaaacctgacttgccggctgcttgctggtcttccacatgccacacgcacccctccccgaccaaaaccaaataaagaaaacgtctctccgctcacgagagccagccgtgccaaccaagccctcaccgcaccgcgccgcgccgctcccacgcacgcacgccacacatgtttttgcgcaaaaacccccccgcgagtgcgcacccggcacccgcgtccaacgctatatattacgcggcccccaactcggcgtcgcaccgcaaagcaacccccccttgctttttgtactcttccatctcacaatctctctatctctctctctcttccttacgcggcaaaacacaccgtcgtccatggacagttctaataacaacaacaacaacaagagggcgcgcgacgccgaggatgaggccgacgaggccaagaggctgcgggcggaggacctgctcgacatgctcgacgatgataccgacgccgggggcgccgccggcgacctggcgtccgtcatgcggagcttcgaggaggagattgttgctggggatgtcgccggggacgttgcccccacgacgcagcccgagctcgggttccttctcgaggcctccgacgacgagctcggcctgccgcccgccaccgcgtcctcgtcggaggaggaggccggggctggggagcccgaggatgccatcgggttcggcggacagatctgggggttcgaggacgagattggcggaggcggctacgctggcttcgccctcacctcgccggaggcggtcgccgccgccgccgccgcggcggagtgggacgacgacggcttcgacgccggcttgttcggcttcggcgacgaggtctcggcgcttcgccacgagaccatgccggccgtctgatgggcctgggccgaagtggattagtttttttttattttcctcgttttttttaaatttggctaaccttagctctacccttgtttaaccttggatgtaaagtttctagtagaaggttaaaaaaacagaggggaggaaacttggaaaaaagtttcatggatggagaggagaaaaaaaaaacagatgtaggcatggttaaaagaaaaaatctgatgacaatgcctcacgaacaaaaatgagaagaatggcttcatgccttcataccagtactacgaccttacaaatattttatttcaagcaaacgaaagatttaatttaatcagctgccacgataaattacatggagcagttcaaacttcaaaaggatattgtgaacggaagagaaaataatttcatggtggatgaactgtcgacgttgacctgcacacatgacaaaccgagatggaacaaaagatctgaaatgaactgtacagcactaaaatggacggaaaattcgaaatccgaagcttccagtcctccttggagtgcatgaaaaaggtgaagctgggaaattgtgaacgtttaattgaaaaggagcggataattgaggccggcatggttgacctagaaatgaaatctttatgcaatttcgtggagcgagataaagcccacaggaaaagatggtgagccaacgtctttcacgtcggtttcaggtttgccgtcggcttgaggtaaatgggaacgctggagaagagttcacgaaactcccgtggaatcatcctttctttactactcctaatctttaataaacaaaataaaaaacaatatcttgtgggtgcatatgatatcaaagtctaggtcgtatgtgcgcaaaccaaatcttgttctgaaaaactccctactagtactacttgacattgattaacacttgcgtttttaagttaggcggcaattcacatgacataacgaaaatcgagtgttcttctttttttttttttcgttccctctccatttgtgtcttccatgtttggttgaagatttccagtgcctgtctagtgctatcattgacgctaggggccaaaccacaaaaatacttttcctgcaactgcaagtataatatttacgggtcatcagtaacttattcgcaatcaaaccttctgtaattctctggcaatatttattttgggagcaggaaagttggattgggagatggaaagctgatagggccatttaccaggaaaatttaattgctgtgatcgcatcgcacacgtcgtgcttgccccggattgcaaagtagtcctaccacaaaaggttgtgttcaaaccacgcaagctaaagccacccacggcgttgtgcttgtttaggaataatcggtgcttgatttctctctctctctctcgggacgtcgttttctcgtatgagtaaggccggtttcagatgtgcgttgccggtgggttttctcatttcgtttgtagcgtgtgatatctcgcctgctctcatgtggttcgcggcgcgccgatcaaaaccattactccccggcaccaactgcacccgacccatccaaactcatcatgtacactgtatagatcgatggacaccaatcttggctgtttcctcgtcatcccccctcacgaaacacataaactcatcgatccggtacagtaccccatatctatagtagtccagaagcaacaaactgcaccgcgttttttctcggtcaagtgcggtacggtttttctcttggcgttttgcgtggtatgcaatagggagagggggtatagtacgtacgagtaatgcacggtcggttggggaggtggttggatcgcgagaggacggcatgcgagatcggttaccgcacacggccacatggtgggcagcggcggtggcgaccgaccgctgccacggcggtttgcaacgcaagcaaacagtacgtgacgggaggtcgagaggaggcggcaataatggcggaggaggaattgaaaaggtggaggtggagtggtggcagaggctgcatctgatggccattgcatgcgaatgtgtgtgtggatatctttattaccggtacagcgtctaaactggccgccggcccatgcagcgtgcgacgagctgcagatcacgcacatggactggtgccggtgccggtggttggatcggggatctcatctaaataaccgactttgtgttcaactcattgcaaccgctggtggtggtctggtctttgatgtgagctctccccctttctttctttacttgttcaaacgatcaaaggtgggtggtttatcagagagccatgaaccggttcaggatgtggtgagaaaacgatggtctgaagtgggtgattctgtggctgatgctgcccatattataataatatcgagctgtaactgcaaacggtgcgacctgttgcaatgcagtgacgttgaatagtttttcctttggttctgatgggctggtgcgtgacggtgaaatttcgggagcatatcactctcactgaactacccccggtctactctactgaaacatagtccagaaaagacatacgcttggtgggcctaaggcccaatgtatcaaggaataagttcatctgaggtcccttaacttgtcaacgagtccgattttcgtctttcaaccagaaaaccagatacaacaggtccctcaactatcaaaaccagtgcagatgagatccctcgacggttttgagagtggttttggctgacgtggcgcctacgtggcaaatttgacttggtcttcatctgatgtggcattaacgtggcgcatctgtggcaatttgatccgaaaaaataataaacttcgtgggacccacatgtcagcctcacacataaattaataaaaaaatggtgggggcccacgtgggccccacatgtcattctcagcatctccctctcttcacctagagcccctcttcttcttcctctctctcccttctcccatccccgaggtggcgggcggtgtccgggtgagggatgacagctcgcggcagccgggcgaggagggaggtggcacgtggcggccgggcgaggagaggcaacgcgcggcggaccggcgaggagggaggcggcgcggctaggaggggggcggcgcttggcggcctggagaggagaggcgacgcgcggcggccgggggaggagggaggcggcgctcggcggccgggcgacgaagggcagctccgacccggatgtgaccatcgaggacgtcggcggaggtggccgggcgaggagggaggtggcgcgtacggctactaagcgaggaggggcggcgccgtccggctgggcatcgcgggcggagcggccgacggagtgtagctgtcgcactcgccggcaacctccgctgcctgcggcctgtcgtcgctccgcccgcccctcagccccgccgccgctccgtccgccggcatgctcctgccgccgctcccgcgaggacgaggaagagcgaagaggaagagaaacgagagccgagaaggacttgtggggcccacgtgggccctaccattcttttattgatttatgtgagactgacatgtgggtcccacgaagtttattatttttccggatcaaattgccacgtatggcgccacgtcaatgccacatcaaaagaagactaagtcaaattttgccacgtaggggccacgtcagctaaaaccaccctcaaaaccgccgagggacttcatctgcactggttttgcactggttttgatagttgagggacccgttgtatctggtttccggttgaagcacgaaaatcgtattcgttgacaagttaagggacctcatatgtacttattccatgtatcaatgactggtaagggcagctcggttcccttagcccaacacggcgagcgaatatggtgaaatcatgcggcctgttagcccaccgtgcggatctggactgtgatgggccaaacaaatatccggccaacctttttctctcgaaacatgttcatgccattcgcatgaattgttcatagccatttacgagcacacgcaaaaacgagtagtacctcacaaaaagaagcagtgcgctaacaaactgacatttaccgcgactgcaaaggtaaaacagcacacgaacctttttgtaacggtaaatccccaccggcacgcatgcgcgctacgtataccctgcagttaacctttggcccgcaccgtccactgcattttttactcgtttcacccgcctttctactcctactcggcgtgcaacgcagcggtgcaactgctgcacgctgaccggtccgctgtttgtgttcgcttggtcaccgcaggggatctccactccacgcaccgcacgactccacgacaaagttgggaatccatttggctgcataaaatatttcgcaccttccttcacaaaaataaaatatttcgtactgtaccaccatatgagaaagcgagagtccgtccaagtgggtggcgactcggccgcgcgtcacgtggcgcgcatgccgccccgtacgtgcgactcatcggatccgctcgtggtcgtgccacgccgacgccgatgcttttcttcgccgccgaaacaaaaaccggcatggtctactctactatactgtctactactactcgaccatgcatactgctgcagctgatgatactgtatattatcccgtctgaaaagagagagaggaaaatgaaaaactaaaacggcgcacgcagctcgcacgtgctgggccatgagggaaggctgctgcgtgcacagtgcaaacagcttgcacgcctcgaaaagggagaaaagaaaagaggagaagaagagaaaaagggacactaccggtactagcgagaaagaaagaaagattagtcaaattgcgcacaccaaccgacaagggcttccatctgggacccacccacccaaccggaccggctcgcttcactccctgggcctcgtgagtgagcacctttgggtctgggtctgcgtggcggccgcctacgcgcaccacatcgagtccacacatgacacacctcacgcgggcgggcgtgccagctgcaaaggcgagccgaggcccatctcctgcgacaaatgtccacgttggtctcgccacgatgagaaattccttttgctttttcctgccgaactaattccttcccgaatattatctccctctttatttttttctcctccaacgtgtaaatatactcgctatattccaggtatagcatattagggtttaaatgtttgtacaagattagtgctcgtgctcctataaggagcgaatattttgttcgagtcactgcattttgagtaaagaattttttttccatcttatgcatattgagtaaaaaaaaatacctttacatagaataatttccaaggtttcctaattactccctccatctacttttgatagtcatatttctaaatctgaaaaaattatttttgatagacatatttcaatccaacaaattattatcttaatggctttcttgaatttaatgcgtgactctttattcttccacacaagattgactatatgggcatcgagaaatgtaaatattaataaatcgcttgtttatgaggaatgattagtagcatgtttagatggatgataagtagaatcacttatcgttggtctgtgtgccaaaataaaatatgactatcaaaagtagattgaggggtactacataacaagtgcagaagttactgttagtatacacttttttttacattggtaaccaaccttaaataatcaaaagaaactttttttttcggttttcaatatagatcgaatgtacaaatctttgactttttctgcgaagaatcctgtttacggcgcataataagatcgaagaatcacgcctaactgcatgcagatacagtgccgagaacagaatcagatctgcggattaacggaagacttgttttagcttccgtctttttatctggccatatgaaacagtctctcctaaaaatagaatcactgtatagtaaacaaatcttgggattgtcagcaagtgccaagtccacgtagaggaaaatcttccaaaatatatcgtgggtcatcagatgagagattctcgcacaaaacatgcttacgtgtcaaacgaggcacgctacgaaaaaagaggaagctgaccaatcgacggcccctccgtggccacatgtttttgcccgcttttccaaaaaaaattccgttccgttttacggtgcccgtttaccttggccctcaagttagctggaaacacaaaatccttccaattctgtcgtggggcctctcacgataatttcagcattaagtactttatttattctaaaaatatctatcgccatttccatgtgtcagaaattagttctgagttaaggacgtcttgattgggagattagccttggccgcgtggaatctcaaccatagaatcccaatccccttcttttccgttgccctatcactagatctggtcactatgcagaagtgtaaggggcccacatgtcatggagacgatgatgtacaggccaggcgtgtaggtgaagcatttatcatttgctagccgcctcatctcgcccattcgcttccccgtcataaagcccccccaaaaccctccccacctctgccatttggtgcttatccccatgagtggtggggacacatcgcccgggccccacatgtcagctaaaacccccgcatgcttccggacggtagcaccggtaccgagatttttactccgcgaggtgaccgctctgtcactgcgcgtgggcccggacgtagtagtggcccacccgtcactgtgttcgtagcaggcgactgtgcagaaatctggtgcgtgaagccgcagaatatcatccggaggcagagaggccactcccgcgtgacatgagggaccatatggtggggtgggcccacgcgtcagtgtgatggggtgggggataggcgcgtgagggagaggaatgggtggaggagtgggaggggattaaatatcggcggaggagacgagcccaaccccttttgctcctctcgccgttttggtcggggttttagcgagcgcgtgggaggccggaggcgacgacgacgaccgcgccgccgtcggagaagaaggccgcggaagcaccagtaccagcacccgtatatgtcttctagccccttctccgatctggtggtagtcgtgctcctcgtctgcgccgtcgtcgccgcagccgtcctcctccccctcgtctgcgcccgccgatctatgcaccagaggctccacggctggaacaagtccacgtcgatgctcaggtgcgtccgggtgccccttccccaccgtgaaatttttcatctttggcgaggtttacgccgatctggagtggatttgaccgggtttcgcggccggttcgtccagatctggagggttcttggtgggtttttgtggggtttttgattgatgggtttgtttctcgtctgtgattttgcagggacgggttcggggtcaagtattccgggttcctccacataaggccgtgtggtttctgtcgaggagattgacggattcgatcgattcgtgttcgtctccgtcaaatttttgcacaagagaaaaaaaaagtttcccccttttagagtttttccccttcagttttgtcagttttggtgaggaattttagagttcttttccggcaagagttagaagaagagagaaatggccccttccaagcagcagcagatgctcctcaagaaggtgatggcgaagaagcccaagacgaagaggctatccgggtttggccttaaaccctctgctgctttctccaggccccatgtgccgtcggcggcggcctccctgcagccaagccgtcgcgtccgcgtcgtgttcgaggaccctgacgcgacggactccgactctgacgacgacgaggacgccggcgccgcctcaaagaagcgctactttgagctcttcattggcaagccagcttcgtcgacgaagcaggcctctccggcgtccaccgtcgctgcctacgccaacatcggcaaggttgggagcacctgctaccgtggtgtgcgcctccggaagtggggcaagtgggcggcggagatccgcaaccccttcaccggccatagggagtggcttggcacctttgacactgctgatgcggcctccgccgcctaccagtctgcctcccgcaacttcgccgaagagaagcgccgccgtggtgtggcctcctctgcctcacctgctagttcggcgacccctactccgactgcgtcctcgtcgtcctcgacttctgccgcgccattcgcccacccttcgccgtcgtctgtgctcgaagccaccaagccagctccaaagccagagtcgccgccgctgccggagcaagctgcaactcccctcctggtggaggctaccaacgagaccgccgagctgccggatgacccagagttctacaaggatatactgcgcggtctacagctgccggacattgacccgatggatttccgagctgggctggatgctctggatatctccgatgtgccggcttacatgaatggcgaacaagacgtactcttcactgaggacatgctgcttggagacttcgctgaagaagatgacctcgacctcgacgacatcggtgatgacttctgcgaggatttcccagagatacccagcggctacgacttcggccgtggtgatatgttccggcaggtggatttctgcgtgtgaattaagagcttgctaaagttattcatgttggtgtgatgggcctgtgagtgtgggtgcttgggaggagatttcttgggttttttccccgagcaaaatcaatctgctcgtgcccttgagatttcagttccgcccataagaactccaacgcacatttagcattcggagagtaattttgttaggttaaaagtatggtaagttataggtggtatgttatgtttttctttttcttttctcaatgttatctggtacctaagtttgtcaagaaaatcatagtggacaagtcaagtatttggggctgtcgtctctgttatggaaagaaaaataagttttgattacattacatatcttttgctctcgagatctggtcatgtcgtcgcattgcaactcgtctcgtctgtatgcattttactctgctggtttaatgttgagattgtgtagttaatgagctgttaccctgagattcctgcactgaggatgtgcagctaattttatgagtttgactaatgaggctagatattttacctatgctgtgatcgtgcagctggttgttttggacgctggtgggcagatcgtgcggtttttttttacaggtgctggtatacaagatgcggctagatccgatacgcatgcgtacaagctgctagacaaagtccgggttcagtgttagctgtgagcagtgatgcgttttgtttatgtggagagagcttggtcgttgcacggtggtgcgtactaaaagtattttcagaggttgtgacctgttagagagggactgagcgagtatactagtattagtacagtagtagtgagctgagccgcctgagatttttattgcgagacttgagcatattggagaatggagagagtatcaagcaagttggccataggcatcgaccgagtgagtgagagagtgctcactcctttcttcgtttataggtgcacttttgtgaaggcggcgtgggggagagtaggccgcgacaggtggttcgctcgccctgtgccaaacaaaactgagccccacgtgacaaggtacagcaaatgcgtacccagctcacggctgggagcagtagcatttggtgtgagtcacggaggtgtgggcgtgagtcacctcgcagtcgcaggccagccgctgcttgtctcgttttggcgcggcgcgcggcgacgcgagacggctggccggctggggccatggtttttcccccgcgggggcgtgtggtgctgtgtggtgtggcgccgcgcgcgcgggtggtgataaggttcccgatgagaccgcggctcaccagggcaaatcccgcgcgtggtcacgccccgcgcgcgtccgcgcgtcctatccccggccgcgaaacggcgtcgtgtagtcgtgtacgtagacatgacgcggcgcgggataacccgacggggaggcgatatacgggcgataccgatacggatggcgtggctatcctattctaggaccggccgcgctggtacgccacgacgtcgacgcctttggcatggcaccccgcgttttgttcgcttcctccctctctcgctcacatgccgtccatgccgtttctgttgtgattttcccacaagcttaacctttttccgaaagaccatttcccagagcttaacttgttttaatttgcgaaaggactcgcacgcatcggcacacttgggacggggtacggcacagctggaagccacgctgcgaaggtggagtgaggtgagtgaatgcgttagctggtaggggacggggacgtggctgggttgggtcaggtgggtggaggatgaatcgaagtcggatgtcagcttggcgtggccgtgcaaggtcgagatatcgcgcgcttgttgctccacggttgttgacatgtggcgcggcgccgatcgaattgccggctcgcgcacggctttgttgcctctgctttttccaccttttgccgcgcacgtcatagcgtgtggctgtgttgtctcgttcgacgtcatggcggctgctgctgctcatctcttgcgcccggtgcacgcatcgaatcattgcgctaagttggtttaggctacctgtggcagtactaggtttggctaataatccacgtgtgtaggtaggttagttacggacttacggtggtgcaaaagtaaaactgttggcagtcacacttgatatgatcgctaaccatagtcttttcggagaaaaatggttcagataggtggttcgatttctgccatagactactcgtcaacaaagtccacgcaacaagaagaatggccacgagccaggtgaaggcaataatgatgattattaagaccgcacctaatagtactaggatttttggcacctaacagcactaggatatttggaaaggaacagtcctaaccccaaaagaattggaacccccaacttcacttccatgttgacatcttcactccctccgggaatacgagtgaccgagtgacgtgtcatttttctttctggaacgttctgtgcggaatccagcagacatccaagcttaagaacttggcgtgttcctacttcgtctttacggagatacagtgtatccatgcgatttttgccgaatcttgttacgaagtactaacagttttcgtcttctcgtttgtacgctatctggccgtcgagtgactcgccaccactcgacgatgtgtgtggatcgaaacggtcgtctttgccgcatgccgaaacagttggtggcggcatgcggcgcatcgcctatcaaatcgcaatgttgcgtgttggaagaggagttattgccggctccatcgtccgtatcgttcgttcgttcgttgaatcttccttcaatcccccggtgcggcgctgctatttgccgatcgcgacgcgggcgccgcgccgcacggccgaactcgacggagacgacacggtggcgcgcttgatggcgcgtgcagctgccacgcagatcgctcgcgcttcacgttagctcatcacaggcatcgcacgatgggcgcttgttaatgcggccttgaattggccctagccctgtttggtctgcatcagatccggatctacactaatcctgctcgagttttgacaggatctatgcttcgtgttgccgatcaggtagacagtccccatcgcgagcgacatcccgagtcaaatcggtgatggaaccagggggagaaaatcgcacaaagtcgtggcttagtccaacttcttccaattatccactcttttcctggaacatatcgcttgcgtcgatggaaaaatataatccatttgattagtcggccgaaacctgtgatataggagtatactactgctactatccctctggctattgccgcttacggcgaagacaaaacatcaaaatcgcaaacgtgtccatatactactactgctggtgacaagtccgtcctcctgcgagaagatccaaagctgccggtaaaaggaatcgcggtacatcgcacagttgtagtactgctcgttgctacagctccaagcaagttgagacaagattcagttttaatttttattttttttctccttcaacgacagcgtctgaccgaccagctgccggtcgacatggtgagctccgcccccgatttctcaacgttttcctgacgagatttgccgtgtggtaccgtggtgcccgcaagcagggccagtggtgtggtcgctgtcacgtggtgttgtgcgcgagatgaggtgagtgtgagggctcgagggagacacagagcaccagcctctgaccctgctgatgatctggggtcaaaacgactccggaggctgcagccaagttggacgaacgagggagtgtattattggcgtattttactgtcgtggaatcaatcattcgtgacctggtgtggagcactctcactcgatcccttggcttggctatcacctggctcatctttgccgttgatatttttgacctgtgcaactcatggattgtcagtcgtagtaggtagtagccggttgctttgctttcactctagagagctgagcagtgcgtggatcactgtactgaatcgcttttagtagaaagatccaagcactaatgctgtcactaaagtgttgtttacaatttcctgcggcttcgagagatgtcaagccagctcgctactttggtagtatcgcttggagcaatgttcctctttctgtcactctaatcaaactccactgttgcgcatatcttcttgtacggagcctgtttaggatatgcagaaaattgaatgtttcatcataaatagcattcactccgttctagtaactttttttcctctcacgtttgttcccaaacaaattcatttttaccaattattgtatcgagtttgtgaaagtacaaataaatgtatcagaaatagataaattaatggataattgtatcgggatttaactgaagcgggatattatggtcctttcgattttatatcgatatgtagggtgagtggaatataacttgttttaggacgaaggcattactagtaataaaatagagtcgagtttatttcaatatattgaggaaaaaataatcatatgtactaaagtgaaaatcctaaaaagagaaaaggggacagcctcaatgtttttttccccgaacatgttgaactaattttgagtaaattataccgttggcggagctacaaggtaggtgtagcctgttacatgaacatgtaaaaacctcagaccaatacaccaaaacggcaaaccgcatcaattcttgctgcgtcgagtacattgagtaggatatcacgtagtcgtaggcacacacatgaggaggatgttatgcggatatgtatgtgatcagtccactagagactaaggtacacttgattatttaggttgtgtttttaagtcaatgttcctaatttcacttgtttctttttcacgtgtatgttttccaaaccgttaaatgatatttttttagaaaattattataggaaaattgcttttaaaaagttatatcaaactatttttaagcttttatacttaattaaccgcacactaatgtgattgttataaaagtacgtcgatataatggaacgacaattaactttttcgatcgcttcagtcattggtcacctaagacacgctaaatgacgacataagaacacatgatatttgttaaagagatttagcctaagcctacatgcatcccagggctctaattatgggcaacaccaagacgctacgagtctatggcctcaccgccatagtcttcctgcgtgtctatgatacattatagtcgccatcttttatattgtggtgccctcctctctttaagagaataccgggttataaagtccgactttaacttcacccctaccaaatattacaactccaagtccaactttaactaaatagtactagtatatttgacatttattctaacaattctcaaccccttctcccgaacacaactagagtgactttcgtcccaccttaaatgaagcttactcgcattatatggtactcataaactgaaaatagaatctccctgtataaatcacattgggaaatcaccctcatcttattgccatattatgcgctagtcgagatgaggacgctcttggcgtcgttgacatccattgctaagtcccacgctataacctctatcacttgaacactaaaaactccactcctcgtctcctcctaactcgaatgacttccatcttataaaccgttattgaaatttaaaatttaaaattatttttttcagcattttttgtttttaaaattacatttgaaattgttaatgacacacatataaaaaattcaaccatccgtgtattaagaaaacacatactctattcgtttttcatattataagtcgtttgacgtttttcctagtcaaacctttttaagtttggccaagtttatagaaatatagtactagtattttcaacataaaacaaacatattatcaaaatatattcaatgttaaattcaatgaaaataatttaatattttaaatgttgcataaaatttctataatcttgatcaaaattaataaaaaaatcgactaaaaaaattcagatgacttataataagtacaatattgcagtataggcccatactggcctggccggagaacacagcagtatttagcccaaaacgaagatgcattggtccacctggcccaagctcagtctaatccacgagcaaacatagacacaatttcaccatttctaatcggacggcgcgcaagtccgtgcactcgtggcagttgcaagatcgccgtccgttgattcacatatagaaaaggcgaggaaaaaactcgagaggaaaaagaaaaagaaagagcccgaaaagaaaaaaaaagggaaaaaaaaactcggagcgatgcactcttgggtgcagcggctgttgacgacggcgacgacggcggcgctcctcctcctcgccgcctgctgcgccgcctccgcgctcgacgccttccacgtcccctccgtccaggcgcaagcccatgtacgaatccgtctgttcttcttcttctttttgctccctttgcactatcacgcctggaatcatccgcgactcggaaccctcgaaattggggatcttctctgcattgcgcagcatgttgatatggctgagatagttctgaaatgtttaggtatttgttctagccggttatcgtagtctatctagcaacgcgaaattgtacagttcactggaagatctttatagggttagggtttagggttctgtgatgtctgggaggtcattggtgtggcaaaataggtggtattttgggggttataggatctttgatgattcttgtttacaaatggagatgctattactggtaggttgttgtcattttcggctagatcatgtacatatagaatgtagacactgatttgtctggctgaaatgtagaattttggaaggttgggtgccaaattctgattctttcaacaatggtaaaattgtgaatctatcagagtatcagttatctctgcaagcagtgctcggttatcatctctttgttggtcttgttgcctattgatattagcatcaatgtgcttatgtaatttttttttcttgtaggttacaaagataaaccgattccacaagcagctcaatggcaacgacaaggtctgtgccttaaggcccttaacctttcgtgcttgcgtgtgtgtgctgccagaggcctaaacgtatttagtttcattatgcgataatttcaaattatccaaatcacagtttcagagtagtgtcttctaaatagagcaagatttcaatatgtgctattctgttataatcttctacgctgtataattatgtcatagtacgtttttttaccttttctcatcaagtagcctgggttctgccattgtgtattttcgccttttcagtttagattcaatacatttcattatgtgctatggagagtttgcttggtctgaagttccgatgttatgaattaacagtcaaaggcttgccttcgctttcttttaatgcaaatctgctttgatatctgtaatcaagaaatacattttagtaaaaaacctttcttgtgcaaaggcttcaaatgttactatcttatactgaatgcaaaatagagtagacatgttccaacttccaaccacctgcagaacaaaatctgtcaacttccaatagcatgatattcataaatatacaacaatgatttttccaaagtaatattatctcactttcatatctagaacagagtcttgtaaatccgcttatgatataatatgtttctctcctcaactactaatatgcacatctgtttgaattacttgatgatttgctgttgcaatatttcctttgtgaaattctgcgaatatatcgatctcataaatatactgtgttacttcctttgcaactacaatgaaaactttgtaaatttgtgtgacaggtgacactgaccttcaacttgtccgcaaatttggagtcactattcacttggagcacaaaacaggtgatattttgatttcactagaatatgcagctcatgtttcaaatgtggtatatcagaaaactgcgctcacgtttatccctgccagtccggcgaacaatattagctgaacatcgcaagtaacatgctcgggtagggattgagcaattcacataatgttactgagaaactggactgctgtcctcaatatagaagcattgaaaaacttgagcaatgagtgaccatcactatttgatactttaacattgtcatggttcatgattgcttatcctgtgaaaccagtaataaaaagatggtcaccgacgatctactgaatgttattgacttgctacatacatatttaatttggcagtccatacttcagttgtaggatttcccaatttttatcacatgattttgtaaagttttggtttacttcaatgttttcgtagccagttactaagttgttcctttgatacaggtgttcgtttttctgactgctgagtatgagaactcgaagaattcgcttaaccaggtaactagttcacattttaccttggccagcagattcttcctgccagtatctgtactattacgaacaagtagctggtcttcaatcagtgattacatgaaatctgtaatcatgcatggaatgtttagactactgtacatacctacccctttctttttagctttttcactggattatttgctccacgcttctacaaatacaattgcttagacctcttgttctaagctatctgttaaggttatttctcaaaatatttaatttccctataaccaagtagataatctgcggcaataattctgtgaataatttgttttgaacgctaccttatagaaactggctgaaatctgtagtaatgttctggtacatgtattcattgtgctggtatagtgcagtctttcctttaaccagcaagtaaacttttgatcaagttgttccaacaagttgctcattgctttgatactatgtagtcagatatacaattaagctggtcaatttatattctatattctagtggttgcggttgatcaatccatgctcatgttgaaattgtgatatttgacaggtttcattgtgggaccacatcatacccgacaaggacaaagcgaatttgcaagtggaggtgaagagcaagtatcctctgattgaccaggtaaagcgtcaatcgtgcttcaaaatcgagtgttagtttgcatgcattcttggaatttctcttgactagaatcatctgctctgctctcatcagggaagcagtttgcgcgggaagaaagttcagcttgttctacactggcatgtcatgcccaaggccggtgtaatgatccgggatcgaatggctctctcagagttcaacctgccagactcctatacatcttgagcagctctgctctatctgatcagttctgtagtagactcacacatgtagatctggtaacaatcctctaatgaacatgacgattaagcattgtgcatcctaggcaaaatgctctttccaatttggcatctgccatacgttaggataattgatggaaaaccgaagcagcatatgaaaagcacagaaacagcggctgcgtttattcttgccccagctcgattgagcacatagagatgcattacatgtgctggcagagtgactgtcagtgaagtactgacatcaaccagctacatcttcactcactgcgtagtacatatatctaagaaacaacggcttatttgttggcatgtaacttgggacggcatgcgtatgcacgaactcaagcaccatggccatgctctcacagcacattggagtttggattgagaggatttcagtgcttgcagggagggccgcacatgccgaggaaggtgtcggtgcacttgaacttcttcacagggtgagtcttgacgacggcgcagctcttgcagacggggtcgcacttcttgacgacgtcctcgcaggtgtagagccccgagaaggagaagttgcagttgctgcagcacttgagcttgccaccgttggtctcagtgttgcccttgctctctcccacagctgcaaccaattatccgtgcaaccattcagtgattaatcagacatttttttacactaatttggatagttaaaacggtgaaagttggttacgcagcagtagaaacttgggttgaattgttgggttctttccggctttgagcctatatccatttatgtggatgaatgatgcttgtgtatacaggctgttaggttggttggcatgatggagcccagccaatgcatgctttggatgtttttgtgcatgtcgagtgccagtgacagtgagcccagtgaatgagagtggccgaccccaagatggcaagatctacgagcctatcctctcgacggcgaccttgtagtttcattcattcggtatgccttagaaaaatctctaaagtatacgatgcataatcatcaatcaccgcaattccgaatcctgataacaacaacacagtacgggaatggaaaggcacactccatggttgttctttctaaaactgtaaagtagttgactggcttttgttggatccagttattagaaatctcgtgagagtgtaaatccagtttacagagcaggttaactagcattttcccgggccaaaacttaatttgacaattaagaaacacacgtaaccattctccttagccacagctgcaaaaatccccatgaccaggacggcctggagaaccaggatcaccatgagcgtgctgctcttcatggccacctgtaaattgttatcgtgctatagctatgcacaaagctttgcccttgctcggtctacttgcagagtgctttgagcggttgtggttgctgctggctaagcgcatctgaccagctctatttataggtgtccagatcggatttttttttctcttggaaattaacttcgtcaggtgcgtctttttttgaccctggtctgcgatctggaatgcacatgtcagcttggtgtttctcccaagcttactttctaaagtacaagaactgtagctattaggagacatcagtgcttaattaacctcacttaatttggcaattgcaaaacctatacctccttacaatgtataacccaacgtcacttctcagtatcagtaacatggagagaagcatcattccacagcataatctgatggtacacacagcacagtacagtcgagtgatctaccacggctaattaagcaactcttcctacatatcacgtggacgatgctcgccatttgcaacaacttgcaaacctgacggtgacctctcataattacaggaatggattcgatctattccccgagaacatgccccagcctcaacaaacaaatcacaccctccgtcctataaaattagtagagtcagattgataccaaaataaatctttccaaaatttagtaatatcaaaattttagtaaagtgacggtttgtcaaaattttggtagaatagactcaatgtaatattgccaaaattctatagatattatcaaatatttggcactaaaaactaaatgtagccacacgattatcatcttaatacaaataatttagatataaccgaaagaccaaacacttagttaagaagtgctaattacatgaaactataatattaatgagctaaaagcttagcttggctagactcattagactacgactttgagcttattttccaccccatcgttgagtgcacctcttatcacactcaaagaaataaatccaatcaacaaatctatggttttactatcctattaaaaagagcaattttaccatccaatatttggtatttcgaggtaccacattttacacataaaagtttggtatcttgagataccaaactttacactagaggtaccaaaatttacactagaaaatatgccgatgtaccaaatatttgtggtacactatgatttgtggcacctcttatgcactcaagcatacataatatttgtgcacactatgattcaaatctggtgggtctgtgggtggaattatgggatgcttccccgttcaaaggaatatttttgttatgaaaggtttaatcattaattgattacatgaaaaagattctctatgttatatagtactaggagtatatgtaatatgttcttctgacatgatgatgtgctaatcagtaaagtgtaataaaagaagttgatctttttaaacttgatggttattaaggtagacagattttccttgctgacagataatatagacaatatatatctattatcacaagataatattaacattgttctcatgtccctctcaagtccaggggaaacacaagtctcccaagtaacatgcaaacaccttctagcttcattatttttatttggtccttcactcagacaacggcttattgttcgagtatacagtatactagcatcgagatatgatatataatgcacactgtatatcacacagatcacagatatatgacagcaatggctcgcgttcatgcattattcaggtcatcatcgatcgatcgatcgatcagtgcttgcagggagggccgcacatgccgaggaaggtgtcggtgcacttgaacatcttcacagggtaggtcttgacgacggcgcatttcttgcagacagggtcgcatttcttgacgatgtcgtcgcaggtgtagagccccgagaaggagaagttgcagttgctgcagcacttgagctgccccgggttgatgtcgatcgccttgctctcacccacggctgcacacatgaaaattcgatcattcagatcaatcatagggactacattgtactgcatgacattatcatcagtaaacatctgagaagacagaaatggtcagtgtgagaacgcagttaagcagcctagctaagataggcgaatcatatatatccatcagcggcaagagattaatgtatacagtagtacagtaccattttcttttgcaacagcagcaaagattcccatgataagagcggcctggacagccaggatcaccaagagagtgctgctcttcatggtgatgttcttgcgttccaaagccttgagctatttcctctacttggtactagtagatggctttacgctttgtgtttgtggttatggccaaagcccaggagagcatctgtatatataggcgttcagatctgaacaacatattagcatgttgccaaatgccattctttcatgcttgatatcgaatatattttttggggatgcatgttaggcgtgcctttgactgacgcggctgctagagtgtgaggcgttgaacacattttgtattcttccatgtcacactcacgctcctatcgtcctcgtcagcggtccaaaatggacgaaattgacaccaccagcaccaacaaaaatcgttcagttgtacagtggtaagctttgcaaatctttaagggaattaataatgatttccccatctcatcacacaaacgaattacctgttttatattattatgtataaatagaactcatgggggttcaaaacactattttatcaactagtagtcctattttttttccttggactcgtctaggatgtaccctctccgtttttttaatagataacgccattgacttcttatcagactattcatcttattcaaaaattttatataaatacataagatttgaatcacgaataaaatactttaagtgataaaacaactcacaataaaatagattataattacgtaaattttttaaataagatgaatgattaaacgtgtgataaaatgtcaattgcgttatctattaaaaaacgaaggtaatatatagaaaagcagtatgctgcggcttaactagaaatggtaatactgattactagagtccctgcgtgtcagcatcccctgcttatcaggactaactgtactgtgtatcgaaatggacccagttttattacaggtatatcatgatcttctcatcacacttggatgacaaaatgattgtacgtgcaaacttggataaccgagcaagctgagctgtccgttgggagattaatcacgagctcattctcgaaaagcaattttttttcaaacgcgtaaaaaaattgtacgttaatatattagagaaaaatagtttttgttacacggtacaatcagttaaactggcgatagaggaaggaagaaaaagaaaaaaactgtagctatagaaaagaaaagctaccgcggcgactaaacacaactctgatcaacgggagagaaggtactctgtgcccttaaaaaacccaaaaacaataatgctagctgaagaccgcacatgatcctctgagataatagactccaaaaccaataatcggtattaggcaacacgacacctttcttgcatatcatgacattccgcccaagtctataagaaacgcagattaatttggctaatccgccatgcgcatgatcaattgatcagctctagcatctcaaagccaaacaagaggcgaggataagatcacaggtcgctatcgagcgttactctcactggcccagcgttaaaccaaaccctcttttgatgtttctggctccacgtaaatacgtcctggctgccaaacctcactaccaacctgtcattagcgaaatcagagcatctgatggtctgtttggtacaatttcaactcctaaatttagctctaggagttaggtctgaagtggagttgtggagctggcagcttcacaactctagtttattttgtgagagagctcttcccaacttcgcttccagttttagtggagctgaaactgtttggctgaactccagctccagaaggggtggaggtggaggtggagctgtgtcaaacaggaggttgtcagtatggcatcgtgtggattggatgttgaaggcggcaggcggctaattaagaagcattgaccattctgatgttgcgtggttcaacacaattctgcttctcaattagtaccatctggaaaacctgataaatgggcctccatggctttttaaggaataagtttacattgcgtccctcaactcatgtacctggttaaatcgtatccctcaaccgctctcgccgtcccaccgcttccaacgtcttgctgctctcaccgctctgccaagctcccgccgtctgccccgccgctctctccatctcgctcgccgtcgagtgaggagacgagtaactgacacgtgtgcccaaaatttctttttatttttatttaggtttgttttttactgccacgtaagcgccacgtcgatgtcacatgggatgaagaccagataaacccgccacgtaagtgccacgtgggaaaaaccgcctccgaaaccatcgagggagtcgatttgcaacggtttttgaagttaagggacaagttatatccggttttgcggttgaggggtgtgattcacccagacgcatgagtggagggaggtgaagtagacttattcctttccgctttttaatctctgtatctatctgggcctaattcttcaaatcttcatgatgatgggccaaaaatctatataggcccttcttttcggggccttttctccgtttcttttggacatccataattatcctgacgtacaaaatggtcctgtgttgactgacgattgggctagcaagagtcagtcacagtagcgtgtaacccgttacagaggtaactgttcaggactggtcatcggctcttttaaggtgatggtgccacctacagcaatgtatggtggttgatttattggtactcaaatctagtttctcttggacattgattccgcgaaccaaattcagtccacgttcgcacaatcgcactatagttaattactccctccattctaaaatataaccactctaacctaaacgctaagaaatactccctccatctatttttgatagacatatttccaaatctgaaaaaattatttttgataggcatagtttaatccaacaacatatcatcttaatgaccttctcggatttaatgcatgactcttcattcttacacacaagattggctacatagacattgagaaatgtaaatattaatgaatcgcttgtttacgaggaatgactagtagcatatttaaatggatgataaatataattacttatctttggtctgtgtgccaagatgaaatatgactatcaaaagtagatggagggagtaattattatcaccttatagtttgaattatcttaataaatactccatccgtcccacaatataagggattttgaatttctgtttgcaacgtttgaccactcgtcttatttaatttttttttgcaaatataaaaaatgaaaagttgtgcttaaagtactgtagataataaagtaaatcacaaataaaataaataataatttaaaaaaatttaaataagacgagtggtcaaacgttgcaaacagaaactcaaaatcccttatattatgggacagagggagtagaatacatgcaccctacaattatagatcttgatggtcaaggatttgaataataatattttagtgaaaaatatgtgctaggtaatgacatgcatgcatgtccgtcttatattattaaataactttaaaaaatagttactccctccggtttcattttaattgacgttttgaacaatgacacggtctacaaaatatacctttgaccttattttttattataatatacacaataaataaatgcatgtttacttttattatagtgttttgaaagacaaatatatatatgttgttatagtttctttaaactaaatatttttgaagttattgatggtcaaagttattaaagtttgacctcaaatttgtccaaaacgtcaattattatagaaccggaggagtatacgttattaaataactttaaaaaatattatggaatggaggaagcaacattgattacgagatgctttctaatggaaaattatgtaagagctgagttacaatcgtgaaacccatctaacacgttacacctagtcttccgtcacaagagctatccttggtttttctgatccactgcatgcgctagttttgcagctgctctcctttatatattcgtgtcatttagataccataccacatcctgctactcataatccatcttgttaagtgcttgtgttcagatcaatggctttcatagtttgggcactactactcttccttttacatcttcccacaatagcgaccggatccagtgcccactttggcggtaacaacactgttaggtgccatccaaaccaggctgcagcgctcctccagctaaagcaatctttcttctgggttaattctccggtcatccttccgacatggcaagatggaaccgattgttgtacctgggagggagttggctgcgatgcttcttctcatcttgtcacggtacttgatctcagtgggcggggcatgtacagtgatagttttgaacctgcactcttcagtctcacatccctacaacgcctagaccttagcatgaattccttgggtaccagcagtaccaccaaagatgctgaattcgataggctcacttcgctcacccacctcaacctctccaattcgggcttggatggtcagatacctatgggcatcaacaaactcattaaccttgtgtccttggacctttccaagcgctatgttaacgataacagtgatatctcttttaatgagagtgatgatgagattatctttacaggtgacagttataatcatctgcaggaatccaggttaatgtccctagtagaaaacctaagcaatttgaaagagctctacctcgaccatgtggatatgtctacaaatgtagatgactggtgcaaaacccttgctcaatcagttcctcgtcttcaggtacttagtttagatggttgctctctcaacactcctattcatcactcccttttgaggctccattctctcacagtgataaatcttcagtccaaccctggtatagctgtcaatctatttccagatttcttcatgggtttcgccaatttaactgtgctccgactttctcataataatctcgaagggtggtttcctgacaaattcttccaactgaaaaatctaagaatcctcgatttgtcctttaatatgaatctgttagggcatttgccaaaagttccaacctctttggagacattgagactagaggggaccaacttttcctatgctaaacgaatttcttctagcaatttcaatatgctgaaggagttgggtcttgaagggaaattaatttctaaggattttctcacgtcgtttggtttgatctggtctttatgccatctagaactccttaattcggaattgttaggagattcaggatccaatttgttgtcatggataggggcccacaagaacttgacatgcttgatactatctgagtttgacttctctagcacaaagccttcatccattagtaacttcaagaatttgagaagcttgtggttgtttggctgtaacctcactaggccaataatgtctgcaattggtgatctcgtggacttgcaaagcttggatatgtcaaactgcaatacatacagttcaatgccatcttcaataggcaatctcacaaatttaaaaagcttgtatatcaacagccctgggtttttagggccaatgccggctgcaattggcaacctcaaaagcttgaagagcatggtattctcaaattgtgaatttactgggccaatgccatccacaattggcaatctcactaagttgcagaccttggaaattgcagcttgtcggttttctggaccaataccttattcaattggacaacttaaggaattgagggcgttatttattgaagggtgcaatatgtctggtagaataccaaattcaattgtcaacatgagcaaactgatatatttggggcttccagcaaattatctgagcggcaaaattccagcacggcttttcactcttccagcactactcttcttggatctttttggtaatcatttttctggtcctatacaagagtttgatgctgtgccttcatatctgatgagtttgcagttgaccagcaacgaattgacaggagagtttcccaagtcattctttgaactcactagtttaattgctctagaaatcgacttgaacaacttggcaggctctgtggatctttcatcttttaaaaggttaaaaaagctccgtgatttgaatctttcacacaataacttgtctgtcattatggatgacgaaggcgataactcttcatctacgtatctctctgaacttaaagagctaggacttgcatgttgcaatataactaaatttccaagtattttgactcgtctgagtgacatgtcttatttggacctttcttgcaataaaatcagtgggaacataccaaagtggatatgggagaaatggagcagtagcgtcgtgcatttaaatctctcccacaacatgctcaccagtatggaagttgcttcatatcttctcccttttaataggcactttgaaactttggatcttagttccaatatgcttcaaggacagattcctataccaaacttatcagctgaattcttggattattcacataatgcattctcttctattctgccaaacttcactttatatcttagtaaaacctggtatctcagcatgtccaagaataatataagtggaaatataccacattctatttgcaattcaagcctgctggtacttaacctggcgcataacaactttagtgggccatttccgtcctgcctaatggaacaaacgtacttcagaaacatattaaatttgaggggaaatcactttgaagggatgttacctaccaatgttacaagatgtgctttccagacaatagatttaaatgggaataagattgaaggtcggcttccaagggcactaggtaactgcacatatttggaagtccttgacttgggaaataataaaattgccgacacttttccatcttggctaggaagtctttccaatcttcgtgtccttgtcttgagatcaaaccggttgtacggttctataggttatacgtttgaggacaaatctggagatcacttcccaaacttgcaaatcattgatttggcctcaaacaacttcactggcagtttgcatccgcaatggtttgaaaagtttatatctatgaagaagtacaataatacaggagaaactatcagccatcgtcatagcatatcagatggattttaccaagatactgtcacaatctcatgcaaagggttctctatgacttttgaaaggatcttaactaccttgacagcaatcgacttatctgataatgcattggaaggaagcattcctgagtcggtcggaaaacttgtttcactacatgtgctaaacctgtcacataatgccttcagtggaagaattccaccccagattggcggcataactgctctggagtcactggacctgtcttcgaattggatttcaggggagattcctcaagagcttactaacctgacatttctaaccgtcttgaacctgagcaataaccaattggagggaaagataccagagtcacgtcaatttgcaacatttgaaaacagttcatatgaaggcaacgcaggactttgtggagacccattgcctaaatgtgccagttggagtcctccaagtgctgaaccacatgtagagagctcctctgagcatgtcgatattgtgatgtttctctttgttggcgtgggctttggagttggatttgcagtaggtattctgatgaaaacgagttggattaacaggtggtttcactcggcggtcagccgccaacgaacttgacctgaatatatatgaggtgtagcagacggtttcactctctggtcaaacaacgacgaacctgacctgcatatacataaggtgcaatgcataaatgtgtagcttgatatctgtattttcattagttactacttataacacatggattcagttcttagtactaattacaccacctttagtagttggtatgcgtagtatgtctactcaggatgatacactctgctgtaagcttggaatcatttactggttttctctctttttcctcagctgtccagtgaaagaacgcctggcgcctgccaaattttatcaagtgcttactgactttctggactactaatatttacacagctagccagctagaggttgggtagtgagaatttttagaatataacactcaatacgcactgcttctaggatttatcacctaattcgtactactttcaaaatacaccactagaggcgaatttttttcgttccgtaacactccgtccacccaaagacgcctgtctgtttgcccgcacgaatctggccgctggcgagctcatcctcccccacgccggcgagctcgacctccccacgctagcgagctcctcctcccgcacgcatctggcgagctagctcgtgtcgtccccgagctcagccgccgccgccgccgcaccaggctgccgccaccgcgcccagagccggcgccggtccaacctccgccgccggagctcgacgccctccgccctccaccgctgctcccctctcctccggccctccaccgcgtgcgccgatggtggcgacggacgggcgacggcggggctgacgcgggcggcgacggaccggcgacgacggggctgacgcgggcgcgagcggtggcggattgacgacggcggcgccgggaggacggaggacgacgggccaactgacgctaggggacggagtgttacggaacgaagaaaattcgcactccagtggtgtattctgaaagtagtacgaattagatgacaaatcctgaaagcagtacgtattgggtgttatgttctgaaaattctcgttgggtagttggtcatcagatcaactgtgcttcaaaccacaggttgccaattctttacaatgacggcaattaacccatttgcaattggtgaagcttgagacattcggatcaattatatgaccaactaggattttgggcttctattcgttaacatgatgaacagacaagtcagtgaactaaccgattcaaccactgccgaccgtcactcatcaaagaataaattgatggcacttgcggcagccgatggccatggcgcgtgccgccgagctccgcgcggcgccgcacgggtggctcgcgcaacgcctggcttcagtagtagctgcgcatggaggcgtgcggcgcggccaggcaaggccgtggagctcgatgccacaagctatcgacgcatcagccgtccggccatcgtcggcgcagccaagatgctggctgcgcatggaaatctgcagggaatcaagctgcgggctgcctggttcccgagcagcgagctccgccattcggatgtgcagccggcggcgggttccccacaccgagatagcggcggcgtgatctgagcacgaccgcggcggcgattccatcggagcccattaagctcacttgggccggttcttcgcagcgaggcctggtactgtgggccctcaccaccaagtgggcctagctggtggaaattggtacgagagaatcgggccacctggtacctgggccgtaaataacttaatatgggccgaaccttactagaagggctttttaggcccattctgcctaaaattcctgttgctgcttgtaggcccacccacgaagactaacggaaacaggagagctaccaataatagcgacccgatctggatcgtccaagtccgatcaaaaatcagggttcggaggcccaggcacgttagatcggtggcatgtgaatatgtgatctgtgtgggtctcagaaatgcctcgctttgatcgcttcctctccggcactccacgagatcatagttattgctacgcgttatgacattaccatttaccaattgttgttgttattagtagtacactgtagtacacttggccaaaattggttacagttgacctaaaaaatgtaaaatctgcaatcgaactatccgtgcttagctacggtgtgtttggcacagctcttccatcttttctagagctgaagcctagacaactgtgcttaattaaacatgttcgtttagtatggtctgtccaataggtagaggtagggcatccggtgcgacatacaggatgcaaacaacaggatgaagaagaagagacagggaacagggagaaacacaggtgcaaatcgatctacaccacagtatcaaactgtggcaaatggacgtactatatatgccgtgaagaatgcgaaagtttttttttttacaaattcaacgaactatgcggtaaattaatgaaagtatgcccgtcgatttcgtggcaattttgctgtaggagaagaatgctgcgaagccaagcaagcgcaggcggaaagacggggacccttactcccccatgcaccccatcaaccccgcaaaatgatccatccttccatggctcctccaacgcacgtcccccacacacaattacacatgcatgcacttcccccctttcctctcctcgtcgctcacccatgccttgccaaacacaaaaccaatcatcaatgcaccaatagctagctagctagctaaattaaagggatcttttcaagaaagatcacttcattaaattgattgccatctgttcccctcacacaagctagatcgaggagcatcatcatcagcgtcaaactagcgaaaatttatcacaattcatagcccaattgactagtagtagtgaatttagaatcttagcaagcatgatgagtacatttgcttaatcgtttaattacttctatctaagctactaccacctaagctagcaattaagtccgaaacccctgttcttggtggtcttgttgccacagtcgcagagcaagtagctcagcatgttcaccatgctggtgccaatggatggcacgttgatcaccgggctaaccctaacgccatggccggagctgccatttctgctgcccccatagtagtaagctgctgctgtagcaccggctttcttgtgctgcggcggccggtggtgaccgccgcccgagacgacgccgccgaggccgccgccctgcgccgcggccgccgagccagccgatcggctccgcatgagcgggaacgacgggcagctgaagctccccgaccccgaccgcggcgccgccgtcgtggcggaattcacgctgcagctgcgcgtgaacggcgacgtccaagaacccggccgcctctggtaactcgtcggcttcacgccgccgccgcttgttgcctgctgctgcttgcacgggcttggcttgggatgaaccggcggcaacggcggcacgggcagcagcttcccgccggcgaagagtcgatcggccggcgcgacgtcggcggcggccgcattggcgaagtcgaactccggctcggggagccgccgccacgacgacatgacgacgacgagcgacgtgtccgaccgcgccgccggtgtcgccgctccggcggtcgccacgacgccgtcgtgagagaaggagatcctcgggccgatcagctccggtgctaattcctccattggcgccactgccacagctagtagtagtgtgagaccacaagcgagcgagagatcgagatcgaggcgaagcgggtttggagagaagaaatggataaatagagcggaggcctggaagggcaggggacccatgcatgtgtgtgtgcaaatttcgcagcggaattgtgggtgcggacgggaaaccgttttgatcctctatgtcagtcagatggttaagaaaaaatttaaaaagattaattagtatatgatataacactccataaacatgtaagtacagattcaacttctacatctcgtaaaaaaacaaattaaactgcacctaattaacatatattcacattcacagtcaaatttatctttttcgttgcgatacgtagaagttgaatttgaacttgtatgtttgctgagtgatatattacatgttaatatattttcttaaatttttttataatcatctaagtgacatggaaagagatatctcccgagagataaaaatccacttctggtgcggaccgcgattgattcgatcggtgtaacgcgcgcgggacgggtcccctggtcggtcacctacctacgtgaatgacatatgcctttgccgttttctcgtttatttggatgtgaaattttggcaatccagcttggcatttttggtggcgtgcagccttcatcctgcttagcctacgtacataggccgctgctctgctttctacccaaaaccgtcatgttaatcatttcgtatgttgtactgctgctcgtactactcagtttgcagcattgtccattttctaaaatccatgctagtcccatgcattcaaccatcattgaatcatgaggcgcaatgtacagaggcgacatcgatatatactgggatttagttaaatttagcatcggtgagaatgagatattcacaattagttagtacaacttacaacgaaggctagaaaatgcatgatcactgtgtcactgttgatgctgtaatgtaatgcatggcgagacatcgacagcaagacattgttaagctctttgttggaacagaatatgatgggggtggcctaactagtccctatctctcaatcagtgaaaccagcgcaaacacggggggatgggcaacccatgttggctccatttcatgcatatttcgatcaaatatcccaaaatcatgctctctagacagtaagacagaaacaaatatcagaaaaggtagcctctcgccctcctctctttccttttttctttctccattcaggcgccgcactgaagaaagaaacaagaaaaagcgaaaagatctttgaattcttctccattttgaccacacaggtgaatctagtctgggtctctggtaaaaagtcatgaactctatctatgacaaggtaactgtctccattctccaaccgtgtacacgtctgcatgatcgatcaggaaacagcgtgttggacaatacatcatatatagttgtataaaagtattaaagcaactgaacagtcaccttccttctgaacacacgcccaattattcttccgtgccttcgcttttgagagatgctggaccagagtagatcagaaatcattgtgcagtgccatgcatgcaaacgatttatttaacataattgccaaagagtttttttaattagcaaccatatgatcatatctcactgacacatctagttcaagtgacctgttaatcagtcacagctaacacaactctgacgcagtaatgcaacctctcttcacttctacttctaacaccagctccaaatgttgcttcaatatgagaaagaagtaaaaagtactactagtagggccatctttgtttgttagctggcattgctaattttggggttttattaggagagtagtgggctatgcccccttcccgctgtttggagtcgtagtatccgagtcttttttttttccttagtcttttgtttctctcctctattggcataagtcggtctggcttaatgtgttgtgtaacaaatattcttttcttctaatatattgacgtgcaatccttctgtgcgtgcgagaaaaaaaagtactactaataacaaaaacctgagctttagattaagctgatgttgaagaaactgaaacctaaggatggaggcggcaatggtcaaagtataggggagcatctgaaacagggtcgcccttgtattcagggaagccatatgaacgaatgtttggctgtgctgtgtatagtaacagttctttctgttcgtcctcagtgatcactgttcactcggctggcatcttctactggcttcaggctggtgttacagttgccctcgtgtttgcttgctctctgattagattagggggccaaccccctggatctatggtgtttcttgacgttttatagctcactacactgttgttacggcgagcttggcgctgtccagccgcctgtacctgttttttttagatgaagacggcactttattgattactgagcatcagacaggagcatctcacggatacagtccggagtctcattacggtaaacattacagacagagggctcagagcaacgagctaatgtgtgtgccgctacattagaacaacgactaacatggataaaggaaacactgataaactcaacaccaaacttcttgacgtcctcaaccaggcaaccgatcttggagcgatcctgcccagttgagtttagcttttggataacataaagacagtcggaagcaacaatcacgttatggaagccttcttctttggccagccacagcgcatgccggatagcacaagcctccgcctgtacctgttggtgtctcctctctactggaaaagaaaattggaaggaaaatggaagcagtgattctgggattctagtgcttgggccagctttgttggatactaacttcaatggatgcatccaatccggcctctacgggacactgcactttcacaaagttcagagtcttgggccgtctgcagtcgatggattcaggggttggattcaagagcagaacaaataaagaagaaatgttgtgaatgtttcaaattaacacattggtaaatgcaagagatgagtattatgatttaccagtgtaagttgttgctctggtcatgttgtactaatgcagtttagtaagaacaaagctaacataacaagtgccgttttgcgagctaacannnnnnnnnnnnnnnnnnnnnnnnnnnnnnnncgtttagtaagcgggaggtcttgagttcgactctcaacgaaagcatatttttattatgaaaagaatccataattctattcattttattttctgtttcttccagtttttttccattacgcaaatgttgtaaccctacttattttctagagtactatatttaatgcactgcagagctcctgctttccttaagaaagaccaagaataaggaggttcagaacagtagtattccatttccttatttttcaggccaaagcaaagaatccacgattcagatgaacatacaaggtctgaaacagtgtacagatgtccaccgcaattaagaggggagaatacatctccgacataacattcacacttcacataacaagaattcattaatctgtaagctgatattttcatcctgtggaactgaaaaatggcagctccatatcgtttagattctttacgaaaaaaaaggaaactgcatattgcaaccattctgaacacagaaaggctgaagttcatgaaactaatgctatcttgcagtgattctttctttcacttatatacaggcaccagagcgaccgtgtaacaacacacgatcgaaactgtacaagacagacagtaatcagtaattctgctacatttacaaccatctaatagcaacgcgtcgaacagaactcagcaaatcttctcccttacaagcagtgaagcagataacaccagcgcgtcaccgaagaggaaaaagtaattacagataaggaattgtgtcagctatcctttcctgaatcttgaatcattcagatcgctccctgtcactgaagaacacagacaacaagaacagcacatttcacatcagaactcacaaaaaccaacagattaaaccatgcatcagaaattcagaatcagtactgtttgaagattacctcctggttcgggtcgctgggcggagatggagactcggatccaaagatgtagaacagcgcgagcacggccatactgacggccagtgaaacgccaagaacggccagaacgctgtagattcttcgcctgtcgtcaggtagcggctcttcaggtggccccgaatcagagatggctatcgagcaagaaggctgatcgctcgtggtgcattcctctccctggccgccgccgacgacgtcagccgccgtgacttccctctcccactccgtgctcggtcccgacgggttgttgagctgagaggtgatgaacctgtcgagagcaatgccactccggcaagccttggcgcgggcggccgcctcgccttcctccgggatgaagcgctcagggcggggctgcttcttgctccgagaaggctcgcggtgcgaggactccgccgccgccgccgccgccgccgccgcgtccggagctggcgatcgaagtcgattgatcagaggaatcgaatggaaaccaagccaagaacagaagccgtttggaaaattggaattgtcatcttaccaggcagaggcggatcggcttccctgaggatggagcgcgtcgggctggattgcttcctgcttcgagacggccggatgcggaaggtggaggggggcatcgcgttcgccgccgtgtggccggacactggcaatctcgtcgtcagacgaatcgatcaagaagaaaaccaagaacaagaactcgtcggggttagtgatcttaccgaagcgagcctcgctctgcttctcggccgcctcaagatcctgctcgtttcctctgcctggcgaggcgccatggtcagcatcgggcactgcagaggcattctccggtgagcttttcacgagctctgacgacgacgtgctcagagcaggagtctcgggatcagccgacgggggagctcccgcggagacgaagcgcgtcgggccggcattcttcctgcttcgtgacaacatgccgcgataggtggagaccggcgtcgcgtttgcatccgtggctcggaacgctgaaaaagaatcatcgtcagacgaatcaagaagatagccaagaacaggggaacattcatccgggaagaagatggccaagaacaggggaacattcattcgggaagaagatgaccaagaacaggggagcggttcgggaatactcaccgaagcgagtcgccatcgggttcttgggcacctcatggagttcgttctcgccgccgtccgacgcggtcccatctccgccgccgcttcccaccgccgtgactccctccggctcgagcaacggttcctgcaccgacgaaccgccaagaaacagagaagttagagtcggtcgagcacccagcacccaatgcggctcatccctcatccactcacctcgagatcgtcgttcttggcaacctccgccgcgaccccatggccggcatcgtcaaccgccgatgagccctccggctccgtcgactcggcccctcgccccaggcccacggcatcgccgacctcgtcggagctaccctcccccggagcccctcctcctctgcgctcctcctcctcggagagatcaacaaccgcgtgcttgccttcctccatgaggatcgagttcttggcgcgggcgatcggatgaagccgcggcggaacccggaagcgaggagaggagaggagggagggaagaagagggggtttgaactttgcgagaaggggaaaaaaaaaacaagggtgaagtggcgtggcggtggtggattggtggagatgggcgcgacgcgagcggttataaacttgatggagaccagtaaacagttggttacctcgttagtcggttggttccgtagattcagcgtagacccagtccacaggatcgaccgcttcgagaatcttagaggcccagaatggacggctactgatcgcgtcggtccatggactgcgtctacaacaaaaacctcgaaaccggcgtggtagtcgtgttgcccaaatcgttgcgcgttgcgccaaccgcacacgacgtccgggcccacctggcagtgagacgggagtacaatgtatcttcgtcgtcggcggtcgagcgagacaagcaggagaatcaaccgtcccatcgcgaaagctgttctctttcctttcttttgcatggagagagagagagagagagagagtcactacggttttcggtggtgggtcccacatggcagccgtactacccctaccgctgaaaaaagactcgtccgccggaaacacgtgacagccgtacgcccaagaacattcaaaccatagagaaaagacggagacaccccccaaaaaaactgacatgtggggcctccatcctgtggggcccacatgccagttgctggatacggagttttttgtgcacgccgcactttccgttgcgatccgtgctctcctccctggacgcgatacgtaaacggacactggagtgtggggctcaacggctgtggcccacatgtcggttggttagttggtgggtggctcggacgttatggcgtcagtaacgtacgtgtgggctgttcgcgaggtcgggctcggagatggagatggatgctctttggtctcgggctacgccgcgcagccagtttccagtgtggtttccccattttgcccctcgtcatctcgcgcttccttgcgtacatggtcggcagtggtactttgcaacaatcatcacgaaatccataccacttttcgtaatcatatcacaatcctatttgtgttgtatccagcatgtttcatcaagcatgtattgctcggattgggatcctctgcattagagtatgaaatggagaggtgctacagtaaattaaattaggagaaatctgcaccttctattcataattctagggctataaccaacctctacggtattaacgtgatagtacaagctaaaaaataaaatattgatgctacaatacttgctgatctgaaccgtttcgtttttaatctaagtgctcaagtgctaccgagaaagactgtagcattagcaattcaaactgcaggggattcggatcatgctcggagagatattgccattgcacgtgtcaacaattgttcagtttttcatctcataataccaatcgactgtagtgacaattcagttagaccatgttcagttaatccccgtaaaggagggattggaagcaatttatttacacttattattgtgttaaattattttccatcaattccctccaatcctttttaatcttctccaaaccaataaggtcttatgtgattttgtaattaatctattggattgttttttatgattatttgctttatgtttctaaaaataggatttgtcaaaaaaaatcttaaattgcttagacaactgtcctaagttgtttgtaaagtttgtttcttttaagatattaatgtatcactacactcaagtagatattttatatcccgtgaataaaatatgttcgctgttttgtgaagcacaaaacaaacatggaaatacaccaagcatatacaaaggtatgtttaatcaaattctaaggctttgttattttgaagaggttaggatatcatcctcgtcgtacgtaaaacgaaacgatgaattaacacatgattaatgaagtgttaacttaaaaattgaaaacatgaattaatatgattttttacagtaacttttgcatattaacttttaaaaaactcgcatagtctagtattttggaaagcgtgtgtatggataacatgagaggtgaggctaggaatcttgaggaaagaacatataaataggagtagaggttaagggcagtcccaactcataatgtccataagtagtgtctatgatgttatgccaataagacatcacaatagaaactacacttcacaacccatggtttcataaagtgggccattaataaatacatcatctatcttctctaccaatcatatttattcttcatctattatgaagacattattctctcccaatgcaaaacttgatagtgtctattgcataggttctcgtgttaaagctgtgtcttgcatgagacccaatttcttcctctcttcactctctcttaattaatatagtgccacataagataaaagttctacatagcaatgtaattaatgccataaacaccatcctaggtagagggttgggactgcctaaaggccatgttattttctcctctttcccaactcaatttcctcgatttttacgcacacgctttttacactattaaatggtatatttttttaaaaaagttttctatatgaaaatttactttttttaaaaatatattaatatatttttcaagttttttactaatattcaattaatcttgctataactgccgtgtcgggagacaacgttgggaaaaaccatcattcgatcctactaatatcatcctaaaatagtgcttatccgtgctgtgcttaaccgcgaaatttagtcaattgttaaagaatggacctagaagacggcaggaaggtgttgcatgaaaatagaaaaccacacccccatgcagttccataattatccaaatttaccacccatcaacatcaagagaaaacacacttctctccttaaaaaaatcatccaacaacaaaaaagaaaagaaaaaaaaacttggcctcaacgcacacgcccccaatatttattcacaagcaacaccaactattccatctatttttcctttcccccacacttccattccatcgccccacccaagccccaaagccaaagccgccctcctctccacgtcccacgctcttcccctccccctcccccgctgtcgccgccaccggagtcggagtcggaggaggtctgggtgacggcggcctccacgcgcgcgttcgtcgtcgcggctttgcccgcggccgcggccatggtgatctccgccgagccgcacccgcctcctcccccggatcccgtcgcggatggcgccgcggcggtggaggcggcggcgtcgagcgctcgccaccaggccgcggtcctctcgtcgttcccgtcgctgaagacgtgggggagccaccgcgtcctgcggtgcgcccacgtcaaccgcgccggggacgccatcgcggccgccaggcgttccccggagcagctcgacggggtcaaggagcggctcctgctccacctccgcgaggtggatgggagcgacgtggtggccgacgcggaagttgcggcggcggtagccgccccggccccggcggcggctgcttcgcgcccgtggaagctgcgcagtcgacgtcgcccggcggtcgccccggcgtcgagcgcgtctccgccgccggagcggagggccgcgagggcccgcgcggaggccctcgacagggcgcggttctcggtgacgctgacgagcgaggagatcgaggaggacgtctacgctgtcaccggcgcgcgccctcgccgccggcctcggcggcgacctcgccccgtgcagaagcaactcgatgtgagttcatcctcctccatctcttcccttttccttacgcttcggcccccaccgttcatcctccagggacccatccgtaatttcgtaaaaattcacgtccccagctgctatttcccggtgcatggctgtccgagatcaccgtcgagtcctaccgggtgcccgacgatcggtgagctgagcagagcagatcagagcactgtgacatctactatcaggcaagaaatcccagaagctagtaattcatcgatcatcacaatcacaacaatctcctgttattaatcgatccttattaaccccatgttaaattcctcccttgttatggtgttgttgttacgagctagtagtagtaaatcgattggttgattgaacagagtgggagtagcggcaatattagcagtggtaattaattaaggagtagctgttcttgttagcagaaggacctcctaattatgaagtggtagcagtagtggtattgtcctccttgatggtacatttgttaacaacatctcaattgcaatgttaatgctaccttccttccatgcatccatcgttaaattcccttttgttttttttttcgattgcactgcttcatgctcaaggtggcaacgatattatgcaagttatttgactatgtagtactccaatcagtaagttttatagtatttaattaccaatgttatccttaatcatggtcgcataccggtaactgctgggtttgcggctgggccaacagcatcgcttgccgcaagcagagggagtgaggctgacgggtgggcccggcccgcactggagccgaacagttttgcaaaccctggcgcctgcttgccagtgagcacagggagagccttttcgtcgcctgtttttactttggctttttagtgcctcgtgggacccacctgtcagaggaactgaggatggttgacacgtatctaatcacgggtgggcccggtcgtggacgtggaccgggccaggtttgctcggccagtcggaccatggtgggcttggtccacgcacgttgctggaattagccggaagagggtttgctgctgctgcgccggttgttttcatgtgttaaacgagagctattgatacggaattacgggttgctagtgggagtggtattaaatttttggactgctaccttaccattttaggtcaattttggacggctcgatttgtggtgatgagtgagtaaataacagtgatgagactgtggacaagtagattattagatggatagatggcacggcacgccaatggtcctctcctctgcaggtcgagttgcagggcgatccttgtacagtagaggccatctgattggtagcggatggtccagatcgatcatacgtgcgaccttgacattgcacctaacattcatatgggattaacataatatcaacagggcgacatgcatggatgcaattgttgctcaaacatgtagcagcagtagttccttctttctgggatactttcaactctgacaaagtatggcaggtagtagtaatgatcgttcaactgacgatgaaatgatgagtcatcgagtccccatgtcgacagtcgacaaaaggaactgttttgctgaaagcatttttactgtaattgagagagtcctacaggtgtagtgctgttcttgttcaagaaatgggttgtgcttggcaaagcttcaggaactttcccaaacccagtgcattatgattcgggatagcagttgctgacttgcagtgcagctgttgcagttgcagccgtacttgggcagaagtctaccctgttccgtggttgctgagcaatgggggtgaggacaaaagcgagcttgtactactccagtactgaacagtgccaacgtagtccaaccgtaatgatctgcaaatgcacacctgcatctgagaccaaaacattcttaggttttgcgagtagaaaacggaggttatccacttcaattactattctgtaagaagttgtaattaaagtttttaatttaaacgtgcatgagaaagttgccgttatgtgtgctttgggtgagattctgaccaagacatcccgcgttgtaataaaattttgtaaagagaaacctagccttcagctggcacgtgctaaactccgtcgaattcgttcagtggcggtgcactgtcaacgcgttgacacaaaactaaattagtcttctcgtatttgattccagaaaggaaaaatacacaatgtcaacgagcatcatagctttctctcgccttggaactgtacgtatgtattcactccgtttctaaatattcaacgccgttgacttttttaaatatgtttgagtgttcgttttatttaaagaatttaagtaattattaatttttttctattatttgattcattgttaaatatacttatatgtatacatgtagttttatatattttacaaaagtttttgaataagacgaacggttaaacatgtgcttaaaaaatcaacaatgtcaaatatttagtaacggagggagagtatatgtgtatggcgcacaagaactcacgcaactgaatgtgcggatgtgtttgatgcttctgccttttctatggaatcatgcaacacacaacgtgctacacgaacgtacttattacatgctctttgtttcaaatgaaatcaacttttatgtgtctaactagcgcacgattatatgattaagtatgagttattagcacatgattaattaagtttttaattctactaaatttgaaagatataattatttgatattttgaagcttctatatataaaaaatatttttcatgaaatgcatcaattagaaaagaatgagaccatatgacatggatggagggttcgacttaccgtcgataaccgcgcttaccgcggggtacggtaatataaatacaacggtaaccttcttaaatttaaataaatttaaaaaataatttaaatttttgatagatttcatacggtttttcacggttaccgcaattaccgcgcagtaaccgtgcttaccgccggggtgctgtaaccccggccctggcggttttggaaagtagcttttcccgtgtataaatggtcacaactgacagtgttaagtaatactaacattacacgggaagttaattaagcaacatgaagctagagatgaatgttatcgcgaggaaagttgagtgaccattttgtgctgggcaatgcatgcgtccacagatctcgagccaggggaggtcgagctggacgctctgcggtgtcggcagctctcgtgctcctcggattgtgcaccgaggccacgctcgtcctcttcaagatcgatctactacaattatcaacacctgcaagctcagatgttttttcttcatggccaagatagacttggcggtaccgggatatgcaaggactgaagtcaatactactccctctccgtccctaatcagagagcgtgaagaaaaatcaccgaggcctggtttagtttttaactttttctttaaacctttaacttttctattacattaaaattttcctacacaaaaacttccaatttttcgtcacatcattaaaattttaatcaaacttctaattttgccgtgaactatacacaggccaataccaaaaagatcacgtcctaattaaccttattcattgtcctcaattataatggttgtactccctccattttataatataaggtataactttttttttagtattgtactatctccatctatttttgatagacatatttccaaatctgaaaaaattatttttagtaggcatatttcaatccaacaacatatccttttaatgactttatcagatttaatgcgtgactcttcattcttccacacaagattgactacttcggcatcaagaaatataaatattaatgaatcgcttatttacgaggaataactagtagcatatttaaatggatgataagtagaattacttatccttgatctgtgtgccaagataaaatatgattatcaaaaatagatagagggagtataatataaggcatgcgttcatatgcaattgactatgattttttctgcattcatgtagtatgcaattgactagaacttcatctccattaaattattattttttaaaatcttctactcttaaaatatatttattggtgatccaaattaggatatgttaataattatttcttggtttttgattaagggtggttatatgttaaattttggaatgcagagagcggttctctaaacgttactacctagcaattctccaagcgtcgttccgcatgcatgcaaatagccgagggacagacaacatcaacaaaatttcacatcctcagccctctaattagggggtgtttagttctatgggtataaagttttagcgtgtcattgggtattatatatgatgtcgcatagggtgttcaggcactaataaaaaaactaattacagaatcagtcagtaaaccgcgagacgaatttattaagcctaattaatccgtcattatcaaatactctctctatctacttttgatag

SEQ ID NO: 8382 - DNA, 66599 bp, Oryza sativa
atccatccaaaatcccttatatctggggacggagggagtactaagatcatatctcaaaacttttatctgataactaaattcctggtttgacaaatttaatctggctaaaatacattaaagattaattcaatacataaaattcttaatttcttgctttagttttcatgtgtttctattttgtattaattgttcaattagtatatgcatgcgtggggtgcacatgaataaacattcagtgtgataccaatagtaggtgcatgactgatcaaatctatccacaattgtttaaatcttggtgctcatatcatttatgtgtttaatttcagtaggatattcgttatgttaactgatttattcctaactccgtttattgtacatttgttaattaaggactgtatttagggcatgtacaatggtctttattagcggtctctctttattgtcatgcaagcatttttggtgatgtgaaagagagaggaagaagaaaatagaaagatggttgctacgcatgacaactgcatagagtcgactcgtagcatttattagaaatttttttgttgcattgagtctgataaaggaaaagtgactagtaaaaaagtattttggtatattaatggttagagactgtattgtcttaactattataacatgataacctttaattaacgtagagaccatacctttgtattttgtgggatacgtgtgtaccgtgatatgtgtgttatgtatgtcctccatgcatgtaatcagggaaaaaaaataggtgcaggcctagttgtcatggtgcagagtgacgacacatatatggcatgcgcacttgcatgataagccatgtctatccacagtgtctggcctaacatacaaatatgaggggccaaatccaagttgcattcgaaatttccgaatgtaatttgatttgatttcaaagagataggcaaacaacaatctgttgataaccggatagtgcacaattaatgaccagaggagaagcgatgctgcgattgccaggttcaaatcgtattgattggaagacacaaatcgtgtgtgtcaaagtatccgtcgaatcgagagttattaatacctatcagaagattgagagctagttcctttttttttttgaggtacgagagctagttcctcatcaacaaccagctagaactctaatttgtagagatggatactaattaaattcattatatctactgtccaaatccatgataatggagaagtactatatacactggttgagttaaatacaacttatgctgtcagatgtcaaccatggtactatacccaaccccccaggagtagcacagtacaattagaattaatacactggtacacatacgccagctatgtgaagactttcctgactacctgtaacagtagtgtgtgtattgtggtgtgtgggggatattgtacgtcttaaactcttaattatagtagcatttttcattgaaatgtatacaggtgatcaggtcgataagtatacttgttacttatattaatgggcatatgatttttattaagcatgcatttggggttcttttggaacataggatttccaatatgcggaaaaagaaaaaaaaacataggaacagagattgtcaatgttaagcaatgtatacaagatttcaaaacatagaaacactaaaggtaatgtcttcggatggttttttttttcgcgaacacgtctttggatggcatttttggagaaaatcacgtacacgagagagagagagagagagagaggagaagagattgtggattggacttaattagcaatggggaaaaaaggtgtaagctcgagttaaaattcctatgcaatagtgggtatagaaaagcaattaatccatacaaatttttactacaatcatattgttctgaagggtgttactagtataatataggaaaaaatcctataaatttcctccatccaaagaagccataatcatcagcatcattgtttgccttttgacttaattatcacctgcaactaataattaaattttgaaactaaattttagagttgattttgatgggtttttattgtattttattttcaacattagcttttatatcactaagaatgcatagataaaaggtttattttttttcagctataggccaaacgattaaactgtatatgtagtgtttttttttttgaaaattgtatacgtagtaaagggaaattgattgacaaaccggggcttatacatccgatggatttcgctgttgggctttttattatactggtcattttagaaatgatagtgcgggccaaatcagaaataaggcctggtttagtttcccaaatttttttctcaaaaacatcacatcgaatctttggacacatgtatggagcattaaatatagattaaaaaactaattgcgcagttagggaggaaatcgagagacgaatcatttgagcctaattagtccatgattatccataagtgctacagtaacccacatgtactaataacggattaattaggctcaaaagattcgtctcgcggtttctatacgagttatgaaattagttttttttattcgtgtccgaaaatcacttccgatatccggtcaaacatctgatgtgacaccctaaaagttttttttcgtgaattaaacaggccctaagcccagcagcaaccaagaaaaaagtttgctgttccatcaagaacattggtcaaagctagtggcactgcattcaaaatcctgatcaggatctatagctaggagtagcttccccgagagtcagcactcacctgcaggcacttgttcatatcgatcaccttttaaacacttgaatgagctataattatgccatcgttagcctgggttgacttgcggcgcctatgtcaaatcaagttcaatgtgatgtgatgtgtgttctgatgagttcgtgtattgactgctcgtattttatttgtactagtacggcacctatagggaaggccagagagtgaagagagcacaaaactgcagaataattcagtacccacagtaccatgtagatagatgtagctcaaattaaacggctgcgtttagttccatccaaagtttagattttagttgaaattagagatgatgtgattgaaaagttgtgtgtgtatgacaggttgatgtaatggaattttgcaaactttggatccaaagtttggatctaaacacaaccgtagagtagttttaatgagactttcacattggttcaaaatatactctaccagtacatatttaacccatttaacttttgtaagtactccagtttgtactactagtaatatatatgttcataaaatcataagaaaaacacctggtcatcagccttatacattttaaagaatcatatgcgttcaaaaacatcaatgcatctctccactactacacagttgattaaattaattccatatctgaactaaaaacacccccaaaaactcacacaccaaaaaatcaacattaccatacatgaatccaataagtgcagacatgtacctcacttagcagtagattttaaaggtaaaactgaacatcatgaacaactacccatcgatctcgatctctcttgccccccaaattaacacatcgcctatcgatcacgaacacttctaatttcttggctcttagtaatttacatgaacaataacttaactgcaatcacatcaaacgcagtaaatactacgcgtcagctcaggaggcggcgttcacgttcctgttgctgtggccgcacccgaagctgcagttgcagttgccgttgtcgggctgcacgttcgccggcggcgcggcgagcggcgccccgaagcaggagaagctggcgcggtgcggcggcggcggcggggccaccagcgcgtcgccggcggagacggcgtggccgatgacgtagtcgccgaccgccgccggctgctggtggcgcggcggggccgggtacgtcgccgggtagctcatcgggtgcaaggcggacggcggcgccgtcgtcgtgtagaggtagtggtggtacggcggcggctgcggcggcgacagccgtggctgcaccggccggagcgggatgcacgggtcgccgccgacaccgcctccccggaagcctcctcctcccatctgcatcgtcggtggaggagcagcggcgccgcctcctcccatgttcacatccctgaaactgtagcaagaaagctttcataagaaaccctagtcgatgatgagaaaggaaggatcgggcgagacgacacaacttgcaaattaatggagatttaattcacgcttagatcgatcgatgtgatatgcatacttgagctgtgcgccgacggcggcgaggctgtcgttgccgaagacgagctgcctggcgcggttgagggtttcggtctccctctctgaaagatcaaatcccaatatcccacaagttagaggcaaagggaatgcgagattagatgcatggaagatcaaaaaattgaatctttttcttaaggatataaatggttactgttggattagaatatattagatgcgtggaagataaaaaaaacgaacttcttcatatatttgtgatcgatcaaattggttctttgataaaaaaaatatcgattatatagctaggtaggttgttgtgtgatattgccttggcggtggcgattcatgtggccacccagcgcttgagatttgcagaacttgagggagcagaacctacactcgtacaccttgccagcttcatccttccctccattactcttcttcttagtaacccctgtaaacaattagctaatcattcagttatcccattctgaagctatgtaactgtacttcctttatctaaaatgcaacaattaaggttttcttttttccatgtaatgatcgagacggttcaggagaaaattttaagtagatgaccacattcagacacacacacaaaacaaaaatctatcttttttactctacattaaagctatatatgtactagcatttgctggttatgaatgttgcagtgatatccttactggatgcttcggcgctggatgcggcggtggtcgttgagctctccaccgtttgcttgccgaactcatccggcaggttgttcaggtccagggggctcccttcttgtctccttgatgagttcatagcgaagaagaagaagaagaggaaaccatttagtacgtatatatacaacttgttgaagatacagattcacagatggatcaacaagttcctgtttgcacaatgatgagcacacaggaactcaagagcgaggtagcccaacaagatgccgatagaacacaagtagtagtgcactgtgccgacaacaagaatgaatctatgcatagtagttttatatagtactagaatgacatagtagaaaacaagctgttcatggagatccatagtaggctagatagttgtgataagtaacaggagctagtagtaaaaatgcaggtatatatgatgtatgcatagaaaagattacaggtaatatcggatttacacacacaaacagacacatccaagagtgactgtttggaaaaaaaaattgctgaaaaaacaagacaagatatgtgcacatataaacaagacacacaaagacagcagtgtttcagagggaagatgtacataacatggagatgaacaatagaagaagacacaaaaaagtcatgaggggtagttgtgcttgtaggctccttcttacatggtggagcagagagcagcagggagagaaacagctgaacactatgatgcaaatgaggcttttggaaggagaggccggaagaaaaagaaaagaggggatcgagatatatatcggatgctgtgtgtgtggggtttgagatcgacttgagacgcgttgagtagagctctcatcagctcagtgatgtgcctgactgtgtagagagaaaagagtacaagtattattgatttagtacatgacacaaaagcaaaaagacactgcagtttgggaacagcaaatgcattggggaacggctgtcttaaaagtgttggtttggggtgtagatagagtgagagaagcagtagtagagcttggtagctgggggagagagaagcctgaaagttctctatcagttcacctctgcacagccgtccctttctctctcctgtcacacattcacatacactggtacacctacgtacactactaccactactacccctctctctctctccatctgattaagagtgagagagtaagatgctgcctgtgcatatatgattcttggagtatgtgatggctgtaatccaagtgcgaggaatgcagtatttgttgcgttgttattattatctatccaaagagagatcgatcgatcgagatcgaggaggatcagagaagaggacgtatggtatggcgatgactgtatgtcaatatgtgtaggtgagtgtccacactattagctgtagggcagctgagctgagctgaaagaaagccccacagccacagcaccactactctcttaacactgcactgtagtatcactttgtaagcagcaatgcagcagcagatatgcatgctgctgagagtgagacctctcttctctcctgcatatattgaatcattaaatagagtaagctacgccctctttttctttagatcttgtgcaaagggatcaaacacacaaacatcacacatgcatgcgcacacacatctgtacccatatccatcatctagtgtaggttataggcctatgtgtgtcctttgtttgcatctttctccttcaacctgtggttgcattgtgtaggccatatgcatgcatgcattgcagagagctcttgagaagaagagagagagagagagagagagagatactagagggtaaggtaataaagacaagggcacctcttacaaagccctggttctgaatttagttgagaaagagtatgcacaagctaggggcccctataggcgcatgcatatggcttagcctttgaggtctagtaggatgcatgcatgctaggaagagctgttgtcaagtactgggagtttagggtagaggaggccagggaggatacatgggcagtaaaaagtgcctttggagggatgtgtgtatggaaaatgtgagacaccgagaccttcaccagtacaagtgataggacctgtgttggatagtgctaatgacattgacatacatggttttcatgtgagatctctctccctctccctctctctctctcccactctttctctctcacatacacagtcacacacactacaatgggttgcaacattcaagcaggtttgtagcactggcttggcctggccatgtaagcccagacaaattaatgtaggcattggtaggggatgagatatgatcaaacaagaaaacatggacaaagacaagactagggtttaccttttccttttgaaaatataaacctctcctcactagtttaccaaaaaactggtgaaaaccgacaacttaatttctgtaaatgtcgtacgaaaataagaaagaactagtcggttttgtgaaacctgctttaacattcatataaacaccggttgatttactcctagccaatcttcgatacgttccttccatgcttgggagacatataataccctaagagtaaggacaataagaaaataaaaaatatatataagcatttctgcctatgtatttaaacactggttagatacatagccagcaatgcttatattttaggatgaagggaaaatatcattaatatctaacccacctccgctcattctcttacaaaatttgttagagctcgtgctatagctaactatagattttttctcgatcccatgttgtattcgcttcctttcaagtaaaagaacaaaaatggttcctcactaaattaaggcccctagcaaaagttcacatgatctttaatttgtagaactttcagagtaattaggagtagttaaatttcagcatgaatatataatcgggcaaaatctcacatccacaacatactccaatttgtgttgagttgaagagaatggaggccctatacttactcgagggagcaaattaaagatgaaaaaccttttcaggcatatgcttaaatttgtcaaagattatttcatgtttaatgtgaaatggtatatatgtgtatggacaactgatcattttccatttggatcttccatcagttggatgctagctgatgtacctggcctactatatgtcttttttttagataatggaatataacatactggcttttgctcaaagagctatagccaattattataatctcacacttaaaataaatgaagttcaaagaaacttaaaagatgaaaccaaccatcaagaagaaacaacctaaaaactgccaacccaagataaagagtacacaattactatatgtcttttaaaaggataattttgacattcttaagaaggtaccagaaggtatcatttttttttaaaaaaaaatagtacctccaaatactatatatgtatctcgaggtactaaaatttttagtgcaaaatttacctcgagatattttctcaagaaacgtaaaatttctccttttaaaaacatgtgtatatgttttctaaaatatgtgtgacactgtactaagataactaacagaggcagtatatattcaaggatgttgggtcctaaaagcatgcatatatcaggactcaggttgaagtgtgtgtccctagctagacgatatgcatgcatgggtcacatattcatgttatgcttgctaaaagccacccatcgaatcttggttaacaatacacatatatatgggtgaatagctaatttagtccctcaagtctcatcgaaggctcaatttgatccttcaggtttcgttttgtccacataggtcctctaaatatttgttttggcttaaactcatccttttacccacttaatatgttatatggctatttctagttaacatttctattagaaaatgtcccttttgcccttaatttgtaacaactatataatagaaaagagaaaaccaagatgaataaacaatgttgcatatgtaattcccattctttcaacatgtgcacatgaaacttaacctaatggctatcgtatacacttgcaagtacataatttattttcgttgtacataacttactatgcattatctataaaaaaaattcattgcatgcaattttttctcttatataagtgtatgatggggtataagtgtcatttatcgagagagttgttggttatgtttagccatgtggcttttaagtgggttcaaggataagtttgaactaaaattaaaacttgaagtactaatatggacaaattgacacattaaggactaaactaagcctcagatgaaacttggaggaccactttggctattcaccccatatatatcattcaaacgatacataaatcgacttgttgtaattgtgcacaactaactaacatttgaccaaattaattaaggggatgtaactcaagttagagccaggagatggatgcatatagaggagcaggcatggatggcagggcaagaggacagaaagaaaggacagggagaggaggagtagtgaaagatttgcacagtgggcagcagggcaggcaggcaggccaggtttgcagctctcaggggtcgtcgtcgtctctctcatctcatgtgagggaggccagaggtagaagacaacaagcaggagcctcctgatcgatagagatacctctagtgttgcattgcattggcgcccccctggccctgcatactcctgccatttcatgcagcattagctacacagatatatacactgctactgccactgcatgcacctctctcgctggctgcctcttgctgcagctagctgcatgccattgccatgcccttttaatttctttctttctctctttctcatcgatccatcgatcacctgtatgaatgccgtgcataatgcatcgatctgatgatgtgtgggggtgtcactggcatctgcatctgcattgccaaagtttttatatatatattcagagaactgatagatcgatctcctgggccccgtatacgcgcgtctccctcaccatgatccaagtatccaaccctctcgatctatcgctttatgcatcgtgtgtgtatatgtatgtatgatcgatcttgatcggaccacaaactaaactatagcatgcatagcagctgatagctgcagtcatctgcagcagggcaacgatgcaaaaagctcatgtgcatctcgatcatatggtcaatcagtacgcatgcatatgcaattatggtgtgtatgaatgcatgcataaccgagtgaaaaaaacaagtcaatgctcaccgttaagttgatcatatcaactgcattcaaaaacttgaaaaacgtgtgtctctcacatgtaacgaacgcgtatagacgttatagtcgaatgatacatatataaacgatgttcttgattcgtgcatggatatatacaagaacttaacatcgtgtgtcttctttatattgcattcatttatgttaatttgtaattcttatgctattatgtgaaacccgatgttagtattgatatataatctaaacttatggtgatatttttttcgttcttctgttgaaatttgtgcccataataatatacctgctatctatgattctaccagcttgctatttgctatttattaccttggttaatgggttaatacaatgagaccaattttcctcacttagggcaaaatcttcatcagcaaccttataaactaatattcctcagtgctaagtgctataaggttgtctgtgattctttgttatgtgttgtgattctttatactacgtgtgtgtgtatatatgcacttgttttcctggtgatgctaaccgaataggacttggtataattcaaaccaagtcctattcggcccaaaaggatatggccagcggttctatttttttccttggaaacagacgggagtttgtttctttttttaaaatcgaaaagattcgtttttttcgcccttttttttaccgcgtcgacggaatcggatttaattttttttaccgtgtcacattttttttaccatgtcgcatataatcggattcgattttttccgctcttttttcatgaacggacgacggaaacacttctaatttcttagtagagattatccggctagctgcctaaatccgaaaaaaaaacaaaactagttaaagtagctatagttggatcatcaaaatccgaactcgatcgtgtcaatattggttaatcgacacatcaataaacaagttttattatgcaagtatacctcataaatgtagtcgtcggcggcaaagaactaaaaaaagaaacactaaaagatcttagggatggaagacctacatgagtaaaacgaaagataggttcccttctccctcatcgttgtcatgagatgataatgtgtttgttggtactctgaccttagatgaatagatgagataacatgataattcattaagggtatgtatagtgtggcttgtgtaagctcttttagtgaaagctctgctgatattatgtagtttcaatgtaacttttaaccaattggaactataattgcatacaagctagttttagaattacattgttgttgttcacctcctcggaggcttcgccttagggttttgctcttcccgcggccttctgcggttcgtaatcttttttgcctcaggctttctgtgtcttttgtgtaaggtttttgccggtttcactttagcaaaccgtgcagttgtatggtttttgggcccgttccttataaacagggtcaactctatcattctaatatattcggcaatactcttgccgcttccacttaaaaaaaagaattacattcaactcagaaatggaggtgctcatatttggactaattaatttcacattagtttgtgccttttgatctggcaaccaatatttataattagatttaagtgcgagggtaccggaggacgtaagtagggagtaccggcgtcccttagagacactgtatatctctgtgatctgtccaaactatatatacatggggcttgcaatatctttgtgcaaaaaaacaacactacctcaaaaagcaaattaacgtacccctgccaatcagtggtcctcaatcataggctagctgaacacctacttcttacacatctgatcatcttaagtgtcaagcacatacactagtactagcactgctagctttgtaagaggtgtcccttgtcctcatgcagcactagctagcaagcaaagtcattcttgctatacccaaacccaacccaagctagggatgagatgagagggcttcactgactcaagcttgtcaaaaaggacggcgttcattctcaaaatgtcaacccacaggcctctcccattcattgacatcaatcttcatacatagtactatcatagtaaaatgatgtatatgtatatatatgtgtagtttacaaacgaggtaataaatagcttttgtagcggtcattataacgatagtggatttttacactggagtatatagcaacctctattgcaaccactacaagtagcacaacaaatatagcattttagaacttaatggccgttattgctcttaacgaccattattggctttgttgggctattattacacttaaacaatgttcttcacatatggataggagaaacttgaaagacaaagaacagctatagagggggggggtgaatatagcaattcaaatcttgcccccgaaaatactcatcaagccggatttctcaaaatccttactagaaccgcggctattagagaagccggatctagaaaagaagagagcaaaagaagagagaaggaattcccgaaactagaggaggaagagaaaaggaattcccgaaactagaagagaggtgaggaagagagagcaaaactcatcatcgcaaagttcaaattgcaagcggaatttaaattgcggaatttaaatggacaaggcaaaaatgaaatccttcaaatcatttcatttataggtgatgcaaaataaccgctcaactaggagcaagcatacaccttcagaggaacattaacacaaacttaaaatctctcagacaaacacactccaaactaatcctaatacaaaagcctctcgggcaaacacactccaaactcacaccgaaactctctcaccgagcatctcaaaaggattgccaaaggagcaacatccacccttgcatccatctctctatttataggctaagacccctaagacattgtctcaaatacccctagggcgaaaccctaactcagaatggatctggtccacccattcttccttagaaccgaaggaagcctcctggatgcttgccacgtcgttgatccaaactctccacgccgcactgatccgcgtgctccctctccaaaccagtgacgagccgccacgtcacgcctcagcacgcgagagcgcgcgctccaccgcgtggatcccacgctcacctgcgcgcatccagtccaaagcctccacgtgtcccgccgagctgctcccacgcatgctcgcgaaatcgcgcgtgggtcccagtacaactcccgcctccgagccacttgaaacagcgtggaccccacgcccgcacgcgccgaattccttgccgccgcgtgtccactgcgcgcgcgtgcctcgcgcgatctcccgcgcttgcccgcgcatggtgccaatgccgtgggccgtcgtcttgtcttgggcctgctcggcctggcctccctgcctgctgatccatccatcatcttgagccatgaggaagggctggattggcttggcctccctgccaaccaatcacagctcacatgcacccatgggctagcaagctcctcatgcacacatgcatgtcttgcgcccgtgcatgacattcggccatgtgcacgcatgcacaaccgaagcaccactgtccatgcttgcatatgcacatgccagtgcatgtatacaagctcctcttccattctccattctgttcgcgaacccggcacttgcacttgaccttgcgaagtccgttgcgaagaccctcacacggtgttcgtccaccgtgtgcaaccttatgtccaatcttgtcacccggcatccttgatcgctttggacctcaactcctccctgagtctagtcccgatccgccgttgaccaagatcgaccccgatcacctgcacacacatgaaccaaacaaccgttgtcttggcacagatgtcgcaatctgaccaatgttagtccacgcacacacttcttgcacttccggtacttgtcaatttcccatcacaaaagaactataaccacacatggtttcacaatctcccccttgatgggaacattgacaatcccaagcaaaaattttgaaaatttgatttttgattcacaaagcaaaccattttgcaaacgtcgaactttggtcattttgaaatcgcgaaaaatcaagaccaagtgaagtgacaagaagaaaagggatgcgaatgcaaatgcaagaatgctccccctatgtgccaaactccccctttcaccaagatctaaagcaagttttttaattttcaataagtgcaaatttctctccccctttgtcaatgatgccatcaagatcaaaagagacaaaaatgcaagataaaaatgagatgaaacttacaaattttagtgttttgagagctttgagagttatctaaaggcatcaaaaggtagacatggatcacacagatacaagcatgtgctcaagcctagctaagcatgtgcataagaagtatgaaacaggtcatggatatcaagttagtatcgccagcaagcaaaaagttttcaagtgaattagtgatttagtgtgcaaagctatttctagaagaagcttaaaaggaagcaaaccagctcataatcatgcaagatttacataatcaaagcaatgaacccatgctaatgtgctaatgcccagttcataaagagtatcaacatgataacaaagcatagaacatgagcttttaatcttttctcatgacttttatttttaagattgttttttaatttctttaaagacaatagcacaatcacgacggtccacctgatcttatcagtcagcaagtgatggttgtgccaaacactgccgtctgacctcaatcaagtgttccagctagagttcccattacaggctgtctcagtgctatcttcggcactactcatgcgtaaacgcactcagtagcccggacaaaaacagagataaagcttgtaaagcatgattgatacaaagtatggacgcataagcatgagcattcataagcatgtactgacagttattgcaaaaagaatgtaaacatggcatgagtatgagagggatacttcaatttaaacaaacttctagagcaagcattgcacattgattaagttcaaatgaatagtcaatttaagcaggtttcaacaagcttgaacagcataacatgatcacacaagctacttaagcaaatgaaagctagacaagagatcaaactagcaaaagagtgatacatgcatagcatagtgatgaccaagagataacaagcaaagctcaattgaagagtgtataatacaatgcataaagtaaacatgatgcaatatgttacaaatgcatgcaaaagaaaaacaactccccctcaaatcaagccataggggtggatcacccctaactcactccgcaagaactcaaaacgagagcgatcaagtggttttgtaaaaatgtctgccaattgtttttcagattcaacaaattctagcacaatggtacctttctcaacattgtctcggagaaagtggtaccgtatctcaatgtgcttggtcctggagtgttgaactggattttttgcaatattgattgcacttgtattatcacaaagcagaggaacaccagagaaagacagaccataatctttcagagttgaaatcatccaaagaacttgactacatgcactagcagcagctacgtactcagcctcagctgttgattgagcaacagaagactgcttacgagaggaccaagagaccaaagacgtgccaagaaaatgacaagtgccagaagtacttttgcgatcaatcttacacccagcaaaatcagcatctgaaaaagctcgaactgaaagggcagaagagcaggagtaccaaataccgtactcaagtgtagacttgatgtagcgaaagatgcgcttgactgcttggcgatgtgatgttcttggagaagcctgaaacctcgcgcacaggcacacggagaagtggatgtccggccttgacgcagtcaagtagaggagggagccgatcatgcttctgtactcgcgctggtcaacttcttcaccgtcctcatcaggaccaagcgatgaagtagttgccatgggagtggcgattggcttgcagtcggccatgtcgaacttcttcaggagctctttggagtacttggtctgatgtacaaagattccttccttggtttgcttaatttgaagtccaaggaagaaagtcagctctcccatcatgctcatttcgaattccctgctcatcacatcagaaaactgggcaacaagtgcatgagaggagccaccaaatatgatgtcatcaacatatatctggacaagaagaaaatcaatgccactatgaagagtaaagagagttttatcaactgcccccatttcaaaaccattttgaagcaaaaaggttttcaatctttcataccaggctctgggagcttgttttaaaccataaagagctttatcaagtttgaacacatgatttggaaattttggattttcaaaaccaggaggttgtttgacatagacctcttcctcaataactccattcagaaaagcacttttcacatccatttgaaaaagcttgaaaccttttgaagcagcaaaagccaaaagaattcgaatagcttctaatctagcaactggtgcaaaggtttcttcaaaatccaagccctcaacttgggtgaaaccctgtgcaaccagtctggctttgtttcgaacaattgaaccatcttcacctagtttgtttttgaaaacccattttgttccaatcacattaaaacccaagggtggttctaccaaagaccaaactttgtttctttcaaaattttctaactcttcatgcatggcattaacccaattctcatcagataaagcatgacaaacatttttgggctcaaaagaggcaacaaacgctgaattgacaagatcataagaccgatttctagttaccctttcacccaggcctccgatcatcgagtcaggcggatgtcggttctggatgtgtcggggagctgtcggtcctgatgtgccaccatcaatctcctcagctgctgaagatgatgtagttggtgcatctcctgaaggtgatgtagtcgaaggagaaccggtttcttgcactggtggtgtactgtctagaggtggaggaatggaatcatcgtcatcatcatctgaatcctcatccacaaagatgctttcatctagaacacctgaaatttctggtctagctcctgggctagcctcatcaaaagtgacttcacaagtctccacaattttgttagttgaaagaacataaactcgataagcccgagaatgagtagcatagccaaggaaaatgccatccaatgatcgagattcaaacttgtccaaatttccagatttaagaacaaagcatttgcaaccgaagaccctgagatgtgaaacttttggtcgacgaccaaatctgagctcatatggcgtcttgtgcaagatagttctcaaaaacacacgattggagataaaacaagcagcagaaatagcttcagtccagaactttcttggagtcgtaaactcatcaagcatagttcgtgccatctccacaagggtgcggttcttcctctcaaccaccccattctgttgtgggacatatggcgaagaaaactggtgttcgactccagaagaatcacagaaagattcaaatgcagaatttttgaattcagagccattatcactgcgaatggctcgaagagcaccaggaaactccaaagccaaactacgagcaagagactgaaagaagccaaacgtttcctcctttgattcaagaaaatagacccaagagtagcgagagaaatcatccacaacaaccaagacataccacttccccccaactgactggacccgagcaggaccaaccgtattcatgtgaagcagttgtcccggtccatctgtcataaccattgtaacaggcttgtgggaggaagatgtcattttcccatgacgacatggtgcacacacaagatctttcggagctttcaacttaggcaaaccccgaatcaaatccataccactaatgcgagacaagtggtcaaagccaatatgaccaagacgtcgatgccagaaaaacaaatccctattctctgaggcaacgagacaacgagaaggaccgggagcagaagagtcgaagttagcaaagaaaactcgaccaactcgagaaatgtcaaaaacaggagattcagaagcatcaagaactcgagacctgtcctttttgaaacgaacttccagattttcatcacagagttgtgaaacagagagcaaattgtacttaagcttacttactagtgccacatctttcagcatgaatttgtcattgaccttgattgttcctttagccatcacgcgtccactgctcgcatccccaaaagtgatggtctcatcaccggatgcacgagtgagagaagtaaaccacttggcttcaccggtcatgtggcgtgagcaaccggagtccacaagccaagaattacttctccccactccaaaatcctcaggatgctccgatgagtcatccttatcctcaagtgccatgagacacaggttgatgaagtcctcgttgttggcgagacagcacatcccggagaagtccttgtcccccttttcttgatcatcgtcgtcggagtcgatgtcgctaagctgcacctcctcaagagccgccaagaccttgtggatcgccttcttcatcaaatcattcttcccctttcgcccttgtccctcgggcttcttggtcgtcttgtcactcttcttcttcaacttgggacaattcactcttatgtggttaggctctccacactcaaaacacacaaatggttcattggtttttcctctctttttatttctcacatttttgtaagctcttgagaattttctagcaaaaagagcaagatcatcttcagggatcttctctaattgctcctcagtgactgagtgtaaagcggcaagagagaagccaccacacacaaaagctgagtcattagaagaagtactaccagagggatcagctaccaaagccatggagtgtttgaggcctttccgatggaaaacatccatctcatgggtttttagctttgagtaaagcttgtccatggtaaggtcactcagaggtgcactctctgtgatggaagtaactttcatttcccaaacaccataatcaagacaattcaaaagatgacgagcattatcattatcagaaaactcttttccaacagatcttaacttcgaaacaatttctccaaaacgcttgaaataagaatcaatggactctcctgggtgcatctcaaatctttgatattctttatgaaattgattctgacgaaccaattgaatatcattgtttccctcatggaaattgcacagagcagtccacatgtcatgagcagacttgtggtgttgaacacgattaaattcaccagaagaaattccaccaatgattgcatttcttgcacgataattaaaatcaacctgagccatatttgcaggcgtgatgtcagcatcatcgggcacagtgtaaggtgatttaaccttattccacacattatgcccttgcgactggaggtaggcctccattcgtgccttccaaatgacaaaattgtgtccatcgaaaacaaatggtttcgcagagtatttttcctccatagctgcgttcgttgccacggttaggttacaacgaacttaaccgggctctgataccaattgaaagacaaagaacagctatagaggggggggtgaatatagcaattcaaatcttgcccccgaaaatactcatcaagccggatttctcaaaatccttactagaaccgcggctattagagaagccggatctagaaaagaagagagcaaaagaagagagaaggaattcccgaaactagaggaggaagagaaaaggaattcccgaaactagaagagaggtgaggaagagagagcaaaactcatcatcgcaaagttcaaattgcaagcggaatttaaatggacaaggcaaaaatgaaatccttcaaatcatttcatttataggtgatgcaaaataaccgctcaactaggagcaagcatacaccttcagaggaacattaacacaaacttaaaatctctcagacaaacacactccaaactaatcctaatacaaaagcctctcgggcaaacacactccaaactcacaccgaaactctctcaccgagcatctcaaaaggattgccaaaggagcaacatccacccttgcatccatctctctatttataggctaagacccctaagacattgtctcaaatacccctagggcgaaaccctaactcagaatggatctggtccacccattcttccttagaaccgaaggaagcctcctggatgcttgccacgtcgttgatccaaactctccacgccgcactgatccgcgtgctccctctccaaaccagtgacgagctgccacgtcacgcctcagcacgcgagagcgcgcgctccaccgcgtggatcccacgctcacctgcgcgcatccagtccaaagcctccacgcgtcccgccgagctgctcccacgcatgctcgcgaaatcgcgcgtgggtcccagtacaactcccgcctccgagccacttgaaacagcgtggaccccacgcccgcacgcgccgaattccttgccgccgcgtgtccactgcgcgcgcgtgcctcgcgcgatctcccgcgcttgcccgcgcatggtgccaatgccgtgggccgtcgtcttgtcttgggcctgctcggcctggcctccctgcctgctgatccatccatcatcttgagccatgaggaagggctggattggcttggcctccctgccaaccaatcacagctcacatgcacccatgggctagcaagctcctcatgcacacatgcatgtcttgcgcccgtgcatgacattcggccatgtgcacgcatgcacaaccgaagcaccactgtccatgcttgcatatgcacatgccagtgcatgtatacaagctcctcttccattctccattctgttcgcgaacccggcacttgcacttgaccttgcgaagtccgttgcgaagacctcctcacacggtgttcgtccaccgtgtgcaaccttatgtccaatcttgtcacccggcatccttgatcgctttggacctcaactcctccctgagtctagtcccgatccgccgttgaccaagatcgaccccgatcacctgcacacacatgaaccaaacaaccgttgtcttggcacagatgtcgcaatctgaccaatgttagtccacgcacacacttcttgcacttccggtacttgtcaatttcccatcacaaaagaactataaccacacatggtttcacaaaactaaggtcgtgttgagtctgaactatcgcaaaagctcgatttacctccctctagatacttaaataccggaagttcatgactcttcaacttttcaaaccaaacaagtcaccccaataacccaatccaaagtggttttagttctatgtggcatatacattgtctgcctcggagcacactttgtgacaacggcatgacatggtagctgtcaagaagagcgaaggaggtccctacatcttctccatggtgccaacggagaggagtgcaggcggcaacatagtcgacgctaagaggggacattgaagtacgtggtctccttctagatctgaccgatgacggtcctcattgggtgtgcagctaacctccctccatcgtcactgagccaagcaccacattcccctcgaggacaatgatgagctcgaacattgtcttgcctcacctcctatctccctctgctctcccaccctccttgttgccaccaaaacccactcccctccttgctcggtcttgtgggccctgggccctgcttccctcattcctaacgatggtggcgatggttcctcgatgcgcggtcaagagaactggggcaacaacggttctccttgttggtgttgaggtagtggtcgtgtcctcttgcttggatcaagatttggttagagggaggggggaggaagaagaagatagtgataagactgacatgtggggtcttatatactttttaaaatatatcgatggccttttcattggttggacagccgcatagcaaaactatcgccatatgtaggattaaaaccactttagattgggctaaggggaactttgtccagttttgataagttgaagggtgtaaaatgtctggtattggtgttgagggtgtaaatcaaacttttgcgacacttgaaggggcatgtaggacttaccccttatatcttattgatgttattttataattcttatgctatgaaatgtatctaaactttatgtgaaacttgatgttactattgataaataacctatatttattttttttataacttagcatctgtaattgcactcgctatccacaattcgttacctatacactactccctccgtcccataatataagagatttaggagggatgtagcgcatctagtactacgaatctagacagatagtgcatcctagtactacgaatctgggcaggctcatgtctagattcttagtactaggatgcatcacatcccttcaaaatctactccttatattatggaacggagggattagtccaatgtcagcccactatttgctatttaattattactaggagtactttgtttacaaggttaatatatatatgcaatgtggattgattgatcttaagcaattttagagatataagatgaaaactaatcttcctatcctatcataataactttggggctcgcaagaaaaagttgttgccttagcttattagcagcacccgtatcgagataggtcactaatgcgtgtttaattaagaattccgtagttttaggatgtgtcgtcccatccatctaagatcctttatattttgtgacggatggactacctatcataaacataaaatctagatttgttttatttttaaagaaacttttatatagtgattttttttaaaaaaaaacatttaacaatttagaaagtcctcacgataaaatagaaagtagccaagcgaatcccagatcagcctataaccatatatactttaacaaataaaataagtattccctatacatatatgtcatttagtgattattctaagctagttttgggctagagttcaccaaagttacaccacacttacacaccggctgagaataatcacaaaatgatctggtgccaaaggttgatgttcttttttccttcttgcaaggaaaataaactctataaccctccatatatatatggctgaactagtaccaatcatctcgaccaacagcagcagcattgcgctgtcgtcctcctacatctacggtggatcaatgccccagtacctaccactactgtcttctttattttctttgagaagaacttcacttcacctctagtggatggatggtgcaattaaatgatgctaatcaaacacccgtagctatagctagtaaatgcaaaaaacagttatccaccatgaaaaaaggctctcatcttctgtctcctgaagaagaaaaggaagaagacgaagatggaatcgatcgaattcacaccaaaattggaagtttgattgaaattggaataatgtgatggaaaagttagaaatttatgtgtgtaggaaagttttgatgtgatagaaaagttgaaagttggaagaaaaattttgtaaatcgaccaaatgtcaaaccaaggtctctgatgcctggctgctactccatcagttgactttgcaacgggtagccggccggtaagccatggcagtagctaagataggaggcggcagcaaagcaaagtcactgcaaaaaatgctttgatcggtgtgcatgtccactgcaaaaatgctttccaatttaggcgccacataaactggtagcctttcgccgtcctaggctctgcatggtccgtgcctttcatgtccagggacaccaacgcctgaaaatgtggattgcagtaataatggaggaaaagataggacggcaatgtactactccctcattgtaacgtttgaccatttgttttattcaattttttttgtaaatataaaaaacgaaaagttgtgcttaaagtattgtagataataaaataagtcacaaataaaataaataataatttcaaaaaaaattgaataagacgagtggtcaaacgttgcaagcaaaaactcaaaatcccttatattatgggacggagggagtatactattgcaggacattaaccatcaggcataaaccaaccacaagaaacatgtagtacattcatttgattaggaatttgtgattggagtatatctcttctcttctctcctgtccagttcttcagaatacattgcaggttggatgcaagaacacaaggatttcaggattcacctaaattgtctgtatgtattgatgtgtacatatatatagattatagagtaagttacatggactgattggtctttcagcactacaaaatatactgcactgagtcttgagtttgtggtttgcttgctgtgtatctacttacatggtaacatatctgcactatgctatattcaatgaaattggcacactctgtgccggttcgttcaaaaacatatctgcactagagtatagttctatgtaaataattcaggtctttgccaatgaatacaactgtgaaggctattctttgttcctgtgtattggttgttaactagtagggcatccttgccggaccagaggatgttctgacgatttcagaaccaagctcttgtattttacgcaacaaagccgctttctcccgctcaagctgctgtatgtacatgtcttgctcatcctggatgctttcaatctctgtcaaggccagtgacatggcctctgtgtcgccaccctcatcaactaaacctgtgaatttcttcaggctatctctcatctgttgaaaaaaaacacatgatgttcatcacaaaattgtcatgcataccaaagaggatactgagaggaatgtggcaatattgttatgcagagacatcgttcaaacaaaccaacgaagcctctcacctgcgatgatatcttgtgccctttgccaagggaagatgcatcagtctgaaagcttgttttcttctccaagtgtggtacttttcgcgtgatctttacatggacttctccgctttttactccttggagtggtatccattttacggcgggctgatttggaggaagcatgctgtattcgacagtgcattggcctatactagcagttggaaggactgcattatggtccttgacatgtaaaatcaggggttctcctgtttctggaaactcaaatgtctggttccaatctggagagagtgttttgtaaacaacctgcatggaatgagttactcagaatttctgatcaaatggattgttttttatagggtgattcatagtatctgtagaacagaatgaccatatataattctccagtctccaattagcgccaaaaaaggttttgttttttccttttataataacatactaaaactaacgagctattgctctataggtttcctctagtatgtgaggaggtaccacattttcaagagttaattcgtagcacctcgtagaggacctttgaaaagcccattttcctattgaagttcttatgttattctaaaccaagcacggactgctacaggctgaaagatttggactaatctgaattgatcatatgcacaccatctgaagatgccaagtgctgtactgtgtcagcatatttgttcatttctattacttcaaaacgccaacaaattcacatttcgcatgtcagaaaagcaatgcatgctgcatttcctaataaaggcatagtaaataactaaatacagaaaggttcaccaccaaaccttagttcgcttcttcttgctcccataatgcaccctgacataaggatcactagtgcctctgagatcagcagcaataagatccctagcttcaattatcactagctcaatccaggtagcttcaactctaccacttgaagtctgcttaagaagaacaatacagaatccagagaaacatcagtagacaaaatggtacaacagagcaaacggtataaaactaatgtttggtacagaatcaaggatatagaacatgttgctggaggtttcatgtgtagaaaaatagttgtactcaacatcccaaatttaaaatttttactgcgcatcctcttaagaaaaaatgtttctgacgctgatttcgcaaatgtatatatttttctgaattaagaatcctcgcaatattaaaattcaatgcttaaggaaggcaaataccttcaggataccgttgaaatcactctttattggctctatttgaagcctgatctctcctgaatccaccttttcaagtggaacccatacttcacggctatcaccatctaaaagtccttctagatttactcttgcgctgccaatgctttcgtctccaaatgtatctgcactatagcatttgatcttgagatattcaccaccagtgatctcatcaaactcgaatttatcattccaaaccggtcgagttgtatgagatagtgtttttgttttgtatagagcctataaaaagaatatgggattagaataccaacttgtataatagtaagtgaagctaaactttgggcaaggtaacaacaaacctttccatactgcactttcacatatggatcacactttccagatttaccgttaactgcaagggctttaccctcaactactgcaactctgagtttccgtcctgttctggactgaagcttgggcgatacatcaaatgaagagtgggatccgttgctcagagaattgctcaacgtaactgagccatcagagaattgccattcttttagcacaagagtgacagttaactgcaagggaaagagtttggaacagtattacacaactatccagaccaaataaactagaaaaggagaaatggcacagttaaccagttcgcagttgaataggtaggtgaaaaatgggcacattattgttggaaccttcatgaatgtcacggtagaaatgataaaaggaagttctccactaaaattgttaacttgggaacagaaacatcataattcatcatcaaaaccccacatttctggtcactctatcagtagtctatcctttatgtattatatctccagagctctcaagcccaactgaatgaaaccattgttacttccacaggttgtttctaaaaaaaaagggctgaacattttcctgatcctctctcttccgatcttgattccaaaagcgctaccaattcaacaggtcgaacttactcttttgtaatttataaaacaacccaactgtaaataaagttcaacagaaaatcaaatgtaggactatgggtcattagaactttaggctatacaagtagctgaggacctgaggtcctaaactcctaaaatctgttacttcacagtttgtatcgagtatatcaaatatggcataatttcaaacctgataggctagtgaaaatttgcttcggtggcttgataaaactaattagcacttcaatcaattgggaatccatttttctaaatgttacagcatatccaaaacaggttttggatgcaagagaaacagtgacaacacatcagtagttactatagagatgtacctcgcccctgatgtcctcaaatggaacaaccattccaacttcttgtccacaaagctcagtacgttttgcaacagcaccagaattatgtcctatagcccaaaatattgttgaatcatctagaacatacttgacctgtttacattactttcatcagcatcctttagatgtgttggaagaaccacaactgcatcatgtgcaatggaaactgactaaaataataagtttaactgtcatacctttatctcgcagcttgtcaagtaggtgaccttaacaccaccagagtccaattcatacagattgaacttgacaacacctgtctctccatgcaataccaggttaaatgtgctattccatgcagggtttggacccttgcttgtacttgtttttctcactaaactaccaacttctacctcaataaatgtctgtgataccttgttatcagcaattccagatgtagaacctccacttgagctttggcggatccctatttcattagttgtgtttctcccaacgttactagctgaaacaactgtgactgaaagaacacctccaactgctcgtttccttaaatctactggtggcaaagaaaaacacaatctgcgaggctcaaccattgtcttcactatggtttcggtcaaaagcttaacctgcatggctcatgaagcatcacatttagcattcaaatttcaatacgcaatggccgtaattgcactaaaagaattgcaaagataccaaggactaactaaatggcacacacaaacccaccagccatgttgagacaccgggtagctccataccaggaactgcttggcttccaccacttccaaatgccactcctatcctgacttctggagtggattcaaaagaataaagaatagcttcaccatcaaggatgggtaacagtagaagctgcaaagatatagtttaaatcgaagaaaataagagcttaatctgatgagccaactagaaaatgcgcttagacaagaaaataatcgtcaaatacagatataatactcaggacaagaaagcaaataaaagattttaacgtaagtggtgatccaagttcttatccacacaaaatttattgtgtttcaacaaaacgctaaagtgaaatagctcaaaataaggttgccactttatcctatgtgagaggcaggttaactacatcataatatcctatgtcaaccattaaggacaggaatgactccgaaaagccaaaaccatttttgttcatcatgattgttcattatcagctttgcgatctcagtgagcaaagctggcgacaattcttgcttaccaattcaaaagaagtctctctcaaatcaagataaatgagaaataacaataacaataacaataacaatgtaacagaatcaattgaaagagcaaaggacatacatctcccttgatgtgaatgctgtttataacaattcgagcagcgccaatcagtggttttgctaattttgccaaaaacattacactcatctcattgctgtcccaatcaaaacccaagcgcatgactttctgcatgttcaaaaaacgagagttgaagtgtgcaactgtacaaccaacagaagtatttcatctgcctctcctacttacaacataatattgttcaagatggaacaactaatgactaaggctatgcaggatcaggaagagctgcagaacatgttatatattcctaacagataatggaagaacacatgggttagttacagataatggaagaacacatgggttagttatacagatgcatagttataatcagaaaaggtgaataaaccattgatgacactgcattcgttagtgttttcaatgatgtaaggataagttaaccaaactagtacccaaaacagcacaactcggaatttatgaagcagagcaaataagctaaatcaccgctgttataattctgtagaactaaaaacagcataagcagttctttcaataatgatcagtgcctgaggcaatgatttcctccctctctaagtttaccacaggtgagtatcccatacacagtacagaatattaatatctgacctggtcacctgaagtcatccagcgcatcccatgctcccccaaggtaggtggacaacaaccaagtgagaattcctgtaactctattttatcctggagagatataaaagcaaatcattagtactacagtcagaatagcagcaggagaggataaacaactttaagagaacttactattagttttggttttcgatgctttaaacgtttctgcaaattcagagaacactcactggtcagctggttataaaaaaagcagaatagaagccagtgtgcaccatatcttgcaatgcatattgactatttgactacaacaaataaataggagcaatggagctgagaaaaaaaaatggccaggccggcagcgaagaagtgccccagccaattttattaagattggagaaggttaaaacaattgggcaacaaacatggttgttgttttacaacaagctgagaaattttctaatgaattttattttgagataatcatcaccaaagaaactcaaaaggtatatttccaaaagcttttaaaaccaataattattacatccaagcaaaaactattagacgtaatagaaactttcacaaatgatagcaccttcattttctagcatcctagtgctcaaaagattcataaaattatctagcaaatgtgcagaagctgacctcaacagtagattgaaacttctttgacagttttggttccatataattgggccaaacttctaccaaaagtttgttcaaccactcgcaaggctctattggcgtcgtaggctacaagagatacaaaaggggtattgctaaaagttcatgtataaagagcaaaacaaaaaaaaataagtgaaggaatatactgttgtattcagtataagatgcttccatcgtttgttcaaatcttctatggctgacctccttttaaacctcccatactgcattcatcattaaaataaaaatagtaagaagacaaaataaactctagaaagtggggcgaggtgtttctctgtgttattcttttcagaattatgaacactctgcaactcaaaagaatagatcagcacttccaaaccaagcaacaagcaatacttgcagtaaattagtactatctcaacacctagaaaaggactatttgtctgacaattcagcaggacatcaaagaagccaagccaaattcatcaaagaacaactttatccatatgaataccatgggaaggaaaaactacctgaattgttgcccatacagcagccaacaggggaacccagtttgagaatggcacaacccatcgttcaacaaaccatgcaaacaagacaagagggaccaggaaggggagcaagggctgctccaccatgacctggttgaaaaattctagtgcatccttggcatgcaatttcttcagcttcttcttcgccatctctcctccctgctgctctgtgaattcagcaaagctctcttctctgataaccacacagagcttgatgcagataccttttgttgttttttttggcctttgtttccactgcttcccgagttcctgtcactggccccttttgcactgtgggtattggatacctgtccacctacaattttggttccaattaatggccacagcaagatagacacctaagataaagcatgtatgattgcgacctattgctcccagacttgcgagatatttcaccacttctagaatggaacaatgaagagaaaacctccaaatttttcattctttcaggcagcgtgttctattagcacgaataaacaagaaattgacccaattgatggccctaacaaagtcaacagctggattataccactaagattcgttctagttctggaccacataaacgagagagagagagaagtccaagccgcagaaccattacagtgtgcgtacacatctggccaagaaattcttgtgaaaacaaccaagcagcataggagccaccaaagcctgaaacgtcacattcgaacaggaaaaaaacacatccatgttcttgacaacccaaatgctaacctccatgaaacccaaatagatcccctgtaaactgtaaaaaaaaatccgctaaaaaatctgcaatttaacactgactgacgtgtacccagcgagtagaataaactgcatgctccaatccaacccagtcaagaagaactcctcacccgtcgagtcgccaacgctatggccaggtccctgcacccatggagattgattcgcgcagagacaccgtgaggccaagcagacaggagatcgagaggagcagagaaggagagtcgcgaaggctaaccggaggcggagaaggcgaggtggctccactccacgcacgcaatagggaggagttgaaaaaactgcagctttcccccttcagagttgctacgaattccacgaactgcttccaagatgcctcctttccgatccaatccgccgcaaccgcatccggcgaaatcaccagccttccccgccggcgactgttcttccccgcctcctccaagaggggaagttggcagaggtcaaactttgcaagtttggaatgattctataaactccaagaaccaagaaccagggtgggacaaaggggggaaattttattttttgtgagttgaggggggctctgatttgttggaactggaagcgattgggcggcagaatcaagtagtagtggatttcagtgtgctgggacaggagggaacgaacgcgtcaaaatcgggctcgtgcgtgttcgtcaatcgtcagcggcgcagcgctcttctgtgccacgctggctctcattggtttgtactcctactccgtagtaccttggaatgcgactgatttttttgatcgatctcttgtttgtttctttgggttaattggaaccatgccattacaacttcagctatttggaaatatgccattacaattagcaaaaccggctgggtgccatcgcaatttcttccaaattggaaccatgccattatatacgtctgaattgccatccatgccatttgtcctcgcacgtatttccgtatggacgcttgtgcccctggctgagacgatacaagccaaccatcccggtccggctcaaccatctctgttccccattccctattccccattgtctgcaaaccctagctcgccgacggcgatctcgacggcgatcggtgcagcgccggcgacgacgacgggggctagggatacggcgccggcgacgacgacgggggctagggatacggcggcggctttaccgatagcttctcccggcgtagacggatcaacgcggcaacgagtttggaggcgagctataccagtggcagtggtcgctctgcaatttcgagaaggtgcagagtcccatcggtggctccttcaatcccagagctgaaatgtgcttgtgggcatgccgctgcggtgcagacatcgaacacaccaaggaatccaaggcggcggtggctgcagtgtcctggggaggtgagaatccagtcctacttgtgcatatttgtgtgtgattttctttctgaatccaatctggtttccttcttgtagaattgtagatgtgccttgtggatttgggaagatctcaacgaatacgttgaggagatggtcgcttactgtcatgctgacgagtacgactatcttagagagacatgcgacagtttgcgccagtttatagcagatcaaagacatgcatatctctcagttgtcagcctaggctgaggcaaaagagttgcagttgcaagccaattacgaagctttgaatcagtccaagttggggtgtgcagacttaaagaagaaattggagtgcgagaaggcttggactcgcacaattgtgtccatgatgatcttgttctatgtgttgttagttgctgtaatgataaggcaggtttaggagatgttctgtgtgatgtctggtgtgtgaaatattgtgatgtaccttaggtgtgtgaaatctggtgtgtgtatttatgtttgtgcaagttggggaatgcaatgcaagggctatattttggaatctggtgcaaataatctgctgcctaacatagaagctgtttatgtgcaatggtgactgaaataaatttgctgacataaatgacataaacttactgacataaatgacataacttgctcacataactgacataaacttgttcagaagtgtagcaactgacataacttgttcaggagtgtagcatagaccaacatgcagcacacaaaagacagaacatttcaggtttggagcccattaccatggccaatatctaacaagtccaaatggccatctacaagcagcaaaataaacaagtttgggtttttacatcacagaccaacctagtctgataattttctaactactctagcgggtggagcagtagaagcaacaagattcttcctcttctggggagttttcttcttcttaggagtatttttcttcttgacaggtgcagatgaacttgcttcagctgcagctccaggcactcctttcttcttaggagggtttttcttcttgactggtgcagcttcggcctgacctgcagcttcagccacttgtctcttcctgcacacagatagtaccattagggaagttttgaggtagtcaatttgtggactaaatagaaagaagtccaaattacctttttttggttgttggctggattgtttgctcatcttgatgaactggctcagcaagtttgcatatcttttcaaagtgaccaaaaccctgacatctcttgcatgtaactctcttcctgccaggttgttctaaacaatctcttattctttgcactctaggtcttccagcacctctcttctacctaggtgggtataccttgaagccaagatctacatgtggccactgagacctatcagtcattgttgccactctagctgcataagctgctctaaaggtctgaacactatagtagggactgacaaaatcttggattcgacctctgttagtgcaaatccaggccaatgcatgtttgcatggctttcaacttgccataccctacatgagcagttttggttctgtaaatcaactgtgtgccttctagtgttgttgtcagactcaacaagtgtcacttctgcgaaaccttcatcgcttctaacaacctttaccaccctgagacagacagttgcatcattcaattctttcattacatttggcaggatgccatccacaagctttttaccaacttctctcctgagggccatcttctccatgatcatctccctgatcccatccacaagttcatgcaacaacagacctttaagcttcttgatctggttattgaaactttcagaaacattgtttgtgaggtagtcacacttgctagactcagaaaagccacatctgtaccaaatccttgagtgatgcttctcaagatactctattgcatcagacctcacttggtatatttgttgcatgtaccacctaaatccatcctcagtataacttcttgcagttggatacaggtgatcagtgaaggcaggaccttgaaacttcttcatgaagttagcatagagatgcctcatgcattctctgtgctcaactttttcaaatgcagcatcaacagctttttccaaacccttacaagcatctgttgatataactaggccctctggattatctatggccttattgaggtgtctcatgaaccataaccaattttcatcagtttcagagtcaaaaattgaataggatacatagaacaaccaattatgtccatctacactagtggcagcagctagttgaccagtatatttacctgtcaatcttgttgaatcaacaccaacatagggcctgcagccattgaggaagccatctatgcaaggcttcagaacaacaaacatcctcttgaagcacattttcttccctatcttctgtacatcaatctctacaatagaccctggggacttcctctccatctcagatttccaattaaaaagaaattggaagctctcttcatatttaccatgtatatgttacaatgcacacttgaacccagaccatgccttcgaatacttcaactttatctgaaaatcttcttcaagcttgtgccttgcatcactagctcccttttttgggtttttcttgacccaatccccaatcctgtctgcaacccaaccttgagttgccatcttgttttcttgcaatttggtagatgcacatgtgtgctcaaagggaagaactttgatctgcattaaacatgtataattaacaaaattgcattacacaaacataatcaaaagcctaatcaaaataaataaatgaagcaaaccatagcacctgtatgactttggtcccaggtagctttgatgcatgaacacgccaaggacacccttcagcagcacaatgggctagaaaacgtgttggatctgtcttcaaaccagcaaacacaaaaccttttttaactgcatagtgccttattgcttttctgaaagcaattatatcaggaaataatgcatctttctctatttttggattctcagggtcacgtatgacattaaagacctatggatcttcatcagtaacctactcctcaggagctctcacccctgcaacaggaggctgagaagactgaccagtgccagtgtttccatcgggttcagcaaactgtggaggctttttaggttgtgagggaacatacaaatgctcatcatcgacacccacatattcttcctcattgtcaaatatgtctggttctctaacaggttcttcctctattgcaggcttttcaacaccttcaacattgggagcgggctgttcagaaccaatgatgggagcagagttgtcaggaggcacaacacatatgggttctacttcattctcgacaagggtggataaaggctcagatgtaccatccatcttattgtcaagcactgaaacaataagattgaattggctctctgttttgtacatttcgaataggtcaggtagctgactattgtccacaagtctaacatcctcaccaatcgccttgtgcaaaaaccagattgaaggagattgatttgttccccaggtgaactcaacacttaaagtattcatcagaaattccatggaaaagctatctgaatccacaacccaatgccgagtagctcctttcgtgtaagatttcctaccatctgtttctatcatgacataagctccaaccctaacctctactgaaaaccagtgcctaccatgaaaggagagaacatcaactgaaaatctacatgtaaatacgatgaaatacccaatgcacttctacatcagctatccaaggagtatattcgagttcaagttactcacggtatcgaggaaataggaggaatcgagcctcccagatccatcccctccatcggcaatttcgctgcgcacgatgatgtcgcaggtgaacttgcgatcttcaggggaacttctacatcgtgggtcgtcgtcgccggcgccgtatccatagcccccgttgtcgtcgccggcgctgcaacgattgccgtcgagatcgccgtcggcgagctagggttttgcagacaatggggaatggggaatggggaacagagatggttgagccggaccaggggggcctcgcccagcgcctctcagagatgaccggggccctcgagcgactccccgaggagctcgaggagacgatcaagtcatcctcgagggacctcgcccggggggcggtggagctcgtactggcaagctaccaggccagggaccctgacttctccccgtgggcagcgctggaagagttccctcccgggaccgaggacggcgcgcgcgcgaaggtccgggacgccaccgaccatatcgtccacagcttcgagggtacggcccctcggctcgcgttcgcgctcgacttcgatgaggagggcagtgacgacggtgcggacgacagcgacgacgaggccgacgtcccgggcgcgtcggagtgagcccccaggcccccgccaatcttaataacttttgcttcttcttccgaggccttcgggcccccttcttgtatagactgatttaatctgtaatcaaataaagaggaaatttctgcgtcagctctgcttgttgtgtgtatgagacgaggatggtctgtgccgcggtccttctttgtcttggcttgaacaagggctcgtgcccaggtcccagcctcaaacggcgcgggtcggggctagtgcctggggagatccacgtgtcgagactggccaggccgggagcgcggtgaccaagggttatggatgacccgattgtgggcctttgccgattcccccccgaagttcaccacgccccggggcacggctcggttctgggccccgtttggcgattttagctggcccgggccgccgagggcaaggtcgagcacgagcgtgctaattcaagccaagattcttcaaaaggaaaacgatggcacagacacagtcctcaagaaatcgaaaatgcttttattgaaatacggaagagaaaaaaggtaagtatatgcatgtggtagcccccggccaactctgcacgcccggggggtgcggggttggcccgagcccgagacatgatacccgacccccactaggggtagaagcgacgaaggtgctcgatgttccacgggttaggcagctctgtgccgtcgcccgtggcgagccgaacggagcccggccgggggacgccgatcactcgatacggaccctcccacattggtgagagcttgctcagtccagcacgcgtttggacgcggcgtaggacgaggtcgtcgacgcagagtgatcgggcccggacgtggcgctgatggtagcgccgcaggatctgctggtagcgcgcggctcggagggccgcgcgccgccttcgctcttccaaatagtcgaggtcgtctcggcgaagctgatcttgatcagcctcgcaatacatggtgacccgaggggacctcagggtgagctcagatgggaggaccgcctccgcgccgtagacgaggaagaaaggcgtttccccggttgctcggcttggcgtggttcggttcgcccagagcaccgctggcagctcctcgatccacgagtcgccgtgcttcttggggatgttgaaggtcttggttttgaggcccttgaggatttccgcgttggcgcgctccacttggccattgcttctggggtgggcgggggaggcgaagcagagcttgatgcccatgtcttcgcagtagtcaccgaagagctcactagtgaactgggtgccgttatccgtaatgatacggttaggcaccccaaaccgagcagtgatgcccctgatgaatttaagcgcggagtgcttatcgatcttgatgaccggataagcctcgggccacttagtgaacttgtcgacagcgacatacagatactcgaacccgcccggggcccgcctgaacggacccaggatatcgagcccccagacagcaaacggccacgaaagaggtatggtctgcagggcctgggccggctgatgggtttgcctggcgtggaactggcacgccctgcaccgccggaccaggtcgaccgcatcgttgagagccgtcggccaatagaaaccctggcgaaaggccttgccatccgaggtgcgtgaggcggagtgggctccgcactcgccttcatggacatcggcgagaaactcgacgccttgttcccgaggaatgcacttcaggaggactccgttagccgcacgccgatagagggtcccttccaccagcacgtagcgcttggagatgcgccggacgcgttcactcccttcgcggtcctcgggtagagtcttatctgcgaggtacgcctggatctcagtgatccaagcaatcaatctaggggagctgggagcgctcccctcggatcccgaggcctggactccgacgggcctcgggggccgttcaggcgcgtccgtctcccctagggggtcgggtcgcgccgacggctgggcgagcctttcttcaaaggcgcccggtggggtctgggctcgcgaggaagcgagccttgagagttcgtcggcgaccgcgttatcccgtctgggcacgtgccgaagttctatcccgtcgaagtggcgctccatacgccgcacctggcgcacgtaagcgtccatctgcgggtcagagcaccggtactccttacagacctggttaacgaccaactgggagtcgcctaacaccaggaggcggcggatccccagtccagctgccactctgagtcccgcaaggagtccctcgtactcagccatattgttggtcgcccgaaagtcaaggcggaccaggtatctgaggacgtctccgctcggcgaggtcaacatgacccccgcaccggcgccctgaagagacagggagccgtcgaactgcatcaccaagtaggcggtgtgaggcagctgcgaggggcccgagctggcctcgggggcggagacgggctcgggagctggggtccactccgccacaaagtcggcgagggcctggctcttgatcgcgtggcgtggttcaaagcgcaaatcgaattcagagagttcgattgcccatttcaccacccgtccagtaccctctcggttatgcaagatttggccgagggggtaagacgtgaccaccgtgacccgatgcgcctggaaataatggcgcaacttcctcgaagccatcagaatagcgtaaagcatcttctaggcctgagggtatcgggtcttggcgtcccggagggcctcactaacgaagtagacgggccgctgcacctttcggcggggccgatcctcttcgccaggggccgcatctccagggcgctcttcgtccgagaggccacgcggggcgcactcggcttctgtgccgacgacctcggggtcagagggcgacaggcgcggccttcccgcagtggccccggggccatcctgggggtcgggggcgcctggcaccgtcggacaagcaggcggagggccagctccggccgtcgggggcctcgggccgccgttcggctcgggggcctctcctgcctgctctctcccgggtcgagtcgacgcagggtggggatgcgcggagtgagggttgtcctcgtcgcgctccacgaccaacgccgcgctgaccacctgcggggttgccgccaggtagagtagcaacggctcatctggctccggggcgaccaggactgggggagaactgaggtacgccttcaactgagtgagggcccgctcagcctcctccgtccaggtaaacggcccggagcatttgaggagcttaaataggggcagtgccttctctcccagcctcgatatgaaccgacttagggcggccatgcagccggtgacgcactgcacatccctaagcttgctggggggggcgcatccgctctatagctcgtatcttctcggggttggcctcgatgcctcgggcagagaccaagaacccgagaagcttgcccgcaggcacgccgaacacgcacttattggggttcagctttatgcgggcggagcggagactttcgaaagtttccgctagatctgagagtaaggtctcttggttgcgcgtcttcacaaccaagtcatcaacataggcctcaacattgcgtcctatctggctacccaaagaaattcgagtagtacgttgaaaagtaggacctgcattctttaacccgaaaggcattgtcgtataacaataagtttctatgggggtaatgaatgcagttttttcctcatcctccctagccatgcgaatctgatgataaccagagtatgcatctagaaaacacaaaaggtcgcaccccgcagtggagtcgacaatctgatctatgcgtggcagggggtaagggtccttaggacgtgccttgttaaggtcggtgtagtcgatgcacatccgaagcttgccgttcgccttgggaacgacgaccgggttcgccagccactccggatggatgacctcacggatgaatccggcctccagaagtcgcgccacctcctcacggatgaaggcttgacgttccggggcctgccgccgcactttctgccggaccggccttgcgcccggccgtacggcgagacggtgctcaatcacctccctggggaccccgggcatgtccgccggtctccaggcgaagacgtcggcgtttgcccgcaggaaggagacgagcgcgtcttcctatttgtcgtccagaagaccaccgattcgtgtggtcttggacgggccgtcgcccagggcaacctccttgaccggaacctcgtcgcacgtgaccatccgctgccttggggcggccgggacggaggtggtgagcctctcgtcgccacccgcgggcttggacgccgcggcgaggtggtccgcgcgctgctccatacaagcaagcgcgactttgaggtcgccatggacggtgatggggccaccggggcccggcatcttcatctggagatatgcgtagtggaccgccgccatgaacttcaccaacgcgggcctccccaggaccgcgttgtagggcagactgaggtccgccacatcgaagtccacccgctccgtgcggaagttggcggaaccaccgaaggtgaccgggaggtcgatatgacccagcggccaggtgtgccccggcgtcacaccgatgatcggctgggacggccggagcaccatccccggggccttgatggcgtcaaaggctgcgggggaaaggatgttgagggctgcacccccgtctatgaggacacgccccaacttcacattgcaaacggtgggggaaaccaccatcgcgatctgtcctccccgggcaacgcacggcgggtggtcggtctggtcgaaggtgagggcaacctccgaccaccgcgcccgccgcgtcgcctcatgggtaggggccgcggccagaagctctcgcttcatggccttgaggctccggcgagaagcgtgagcgcacgctcccccatcgacggtggcgacggtggcctcaggctcctggaaccccaggtcatcgtcgccatcgttgatgtcctcggcggtggccttctgcttggcctcacctcgccggttgccggcgggagccgccggggtcttgccctcacggcgctcctgcctcttctcctcctcccacttcctcgtccgctcagccaagcttttgaccgcgcggcagtccgcgaggtcgtggagggaggtgttgtgcacggtacaccacttgccggtcgggcgctccctgctgggagcgccggcctccttctttttgtcgctcgcaggcctcccctttcggggggcccacgaagcgccctcgacggcgaggacatgaccctcgtcgtcggaacgggccggccccttcttcctcctcctgttccgccgctctgaccgagtggcggacccgggggcggccggagctgtcacaccagagccggaggagttccaggtccaggcctcctccttgcgagccacacggtccgcgagctcaaaaagctgcgcggtggtctggggctccttggaggcgatcttctcgagcatgcggttgtgccgcacgccccccctgaacgcgtagatcaccgcgtgtgcggggatgcacggtatggtgttgcggacttgacaaaaccgctgaatgtacgagcgaagagactcatcgtcccttcgctgtaccgcatgcaagtccgcttcttcacctgggcgcggatatatgccctggaagttcgtggtgaactgctggcacaaatcctcccaagagtggaccgacgcgggtggcaagttcattagccaaccccgcgcctgacccttcagggccatggggaagaaattcgccatgaccctgtcgtcgcccccggcggcctcgatcccggtcgtgtagatctggagaaactcggcggggttgacgcttccgtcgtatttttcggtgacggtgggccggaaccttgggggccaacggacgttccgaaggctcgccacaaaggctcgacagccggcaccgccaaccggggacacggggggccggcccccgtgcccggaccgaagtggcgctccggacgaggaagcgccctccattgcgtgggcggcgtgacgagcgtcgcgccggcgctcgatatcgaggcgggcatccggccccccacgcatatctccttgggtcggaggcgtcgacgagggaatggcggacgaacggcgggtaacggccgccgctcgccgcgccctccgcctcgacgacgtggagccggcggcgggagcgccagaggtctcggtggcggaggaccgcccgccggcgcctaggcgctgctgcgccgtcatgaccaagtcggccacatcatccagccaacgccgagctggagtctctggatcggggacgacgggcgggtgacgcaggagcgcgcccgcagcctggagcgcaccctggggcgtgccgccattgccgtagacgaggcggcgacgcgccccgtctcgccgtcctcccccgtcgcccgcgggcggcgaagtcgcggatcctccggcctccccgagcgcctccccccgcccaagatttcggcgagagggggacggtggggtgcgagcccgacggcgcgggttctgctccccgtcgtcaccgctagcgttcggagagaggctgtgcgcccctgcccgttcggccattgggctgagcgggagaagcttggcgcacacgaaagaggacgagggcttagaaagacacgcgcgccccctacctggcgcgccagatgacggagcgtggggctcctcaccgggagactacgcaggcccccctttgccggttcggccgggggcgctaagtgaggttcttcgccctcgatctgaggaacgtcagcgagagaagaaatgcgcaagacacgggcgacgtagacaggttcgggccgctgagaagcgtaacaccctactcctgtgttctggtggatctgtgtgtgaaggaatccagagactcgagagcgagagagagagttcaggttctagccaacattcgccagagtcccaactcccctttcgtcctcccttttttttaggcctgggcctcctttttatctggtcaggggtcaccacatgggcctctagctacctaagaaaggaaacatgcttttacaatgagggctagtctacagccggaagtgacctctgacaagccgagcgcacgtctcttgctccgctcgcccctcttccggtggacgcccatttcaaccttcatttaatggccagcgacttccttgtcatacttgcgctgaagcctggaatgaatctgaccgggactgacatacccactcctggagttggcacgccggctccggctagggacgagagctaggaagatctcatcattccgacgggacggggcgaggcgtgtggcaggccgcctgttgccacctaacccgcgatctgaccggtctgtgaccggtcactcaccgcgatcggtcacggaccgaataagcgtgcgctgcgccgcattaaatgcggcgtggcgcgctcgtccaacctgctataaatgcggttaggtgagcccgctgtgctcacctaacccacacacgtggcgccaaaaccacagggggtcggggcaccccagccctcggggccgaaacgggagcggcccgacccctcggggagacagagggaggggtggccacgtcaccttcgggcccgactcccccgagggggtcaggccacgtgggtgaccgcggctacccaggcctctagtcacgatacccccggccccatgtcaccgacacggtccttaattgaccggggacggtactagccttttccagataccacccaaatcctctgtccgccccagtcgaaaacagttgtttaattttatttctcctttcacaaatcatgtcatcaacatcatggcaatgtggcgctcatgtctccacatgccgcatctcaattaccttcccaaaggtaattgcccaagcatatagcatttgataaatatgagtatgcatgattctagaatagcatttctaagcaattgtcatagttgactagggactcatacgtaaacatggttacaaagatttaagggtaaacaataatcaaggcatggcataatcacaagtaggatgttcatcattgcatgcaattttatttgtaaataaaacaatttcgcaattgggatcaacatgttcaaggaatagtgatgacttgccttgctcaggatagtccttattcttgatataattcttgatcaaccttcacctcctggaagttgctgacgttgcctcacgactaaccgatacataaattctataacacgcaagaaaaaccaatattcaaataacaaccaaatatgcacaacaaaatatactattcatgtcttctaatggattccaatcacgctaggggctaaggtttcttaatctttctattgtcaacgtggcctatttaggagttaaccaacatagcatttataggatacatatatatttggctaatcggtggtttagtctatcaaatggctatggaaggattatggctaagcatgcatctatctacataggacggttatttactagaggttctgttgttagatggatttaggatcaatcaaataattacagtgaatcatttgtattatttattttattgatggaagctttactttaattatgaacatattttacttgtcacaataaattataaaaggttaataattatccatgctttgtatgttagagttgtttaggttaatcatattatggttacagattatcccatcacataattttacaatgaataatcctaatttacagttgaactataattataattatatgaggtcaagatttataactagtatttatctaatatacatgtttgtcatacactccctcttaatttaatatatgcaacacgcaaattaatactataccgtaccactataatgggatgtatagtatatgtgtaagcaacaatatcttattattggatcatatatttgagtagttgctttttactgtaagctatacaatacatgttgattttaagatggctctgtttggttaactaatggatatcaaccgactatatacatatattctacttcacatgacattgtatcgacaaatttttaagtggtccaaatacaactagctctatgattactctcctaaacaagttaaagattcatctatgtgtgtttatattttagttacaaaatatgaggctaaactttatgtaaacaatttataagtcatggatttagttatatttggacatagaccagtaaatagcactaatattttcctatacacccattaatttgaaggattgattataactaatttatttagttgctacagtgacaagacatgttaaagataattatgctactgtacaatatccatttttattcattggcacactatttaggttaactattatctaatcatttgatattaattaatttataattataaatatattttgttaaatactgaattatatatcattggaaagcttatgaatttagatgaatttaggttcaagtttcactcaaatccaagttaaaatgaataagttatgctagtgtaaagattcaaatttgaattaatccgagaaattgcgaaaagctactgttcataaatgatttatttttaatccaagacatatccacagccttgtaccaactgacaagtgggaccccgggtttatttctttttcctaccgaattattttctaaagggaaataggaagagctaatgacaagtggggcccacatgtcatagactcgagaccataaaacttctataattagatttttaaccacccggacctacatgtaatagacactactaataaagattaagaagggggttactattcaccaattacgtggggcccactctaatctctcctctccttcctctctctttcttcttttatctctttctctccctcccggcttcttctccctcctctctccctcggctctctggcgacggcgaccgagcaaggggaggaggcggcggcttactgacggcggcggcggcgacggcggcgcaaggcggcgacgcacggcgcggcggcttcgaggcgacggcgcggcggcacgaaggcggcggcgcggtggagagaaagggggaaagaaaggaggggaaggagggggggtgatgtgggatggaagggcgaccggaggggatttatagggcgcgggggaggggcggccggctccatggcgatgcgacggcgcgcggcgcgtggggcgcgaggcgcgaggcgtgacggcgacgggcgcgcggctcgggacggctcggggctcggcgggcggtgatggcgacgggcgacgcgacggcgacgggcgacgcgacggcgacggcggagcgtcgacgggacggcgacgctgcgatgggacggcgcggcgcggcgcggggcttggcgcgcggcgatggcggcacgacggcgacgggcgacgcgatagtgacggggcgtgacgcgcggaggggtggggctcgaggcgatgcgaccggagacggcgacggcgcgcggcacgacgagacgcgagggggcgcggcagtggcgcgcgcggcagcggcgaagtgacggcgcgcggcggctcgaggcgcgaggcgcgcgcgggaggggagatgggacgggcgcgcggcggggcaggggcgcggggcacgaggcgacgacgtgacgacgacgacgatggcgcgcggggctcaaggcggtgatggcgacggcgcggtggcgacggcgacggctcgacggcgacggcgatggcgcgcggcagcggcgcgggcgacgacgatggcgacacgagcggcatcgggcaggagaaggaggaggggtaggacggctaggaactaaatcgaacacctagggggctaatgaacagtgctagccggctatttaaccctattttagcctattcctatataaattttattctataaatcctaatttttacacaaatgaagtttactcaatatttgtgttattctaaccaatggattcaccctagattaatattacccatatttatttatttatcgcacaaatgaattctttttagattaatttgagttattggccctaaggtgaacttatatatttttgaagactttggggtactattaaatttaatataacgacttgtcatgattaatacattagcagattggtcaagtttagttgtatagcaatatattttacacggataggttcaatctatttattctataaatagtaaattgagactcggcacaatattaatctaattgtttaattaaaacctcacaaaattttataaagcttaatttaattatatgaccattatttcatgtgaattggtttacctttatatatatagaccattagagtttagtaatatcccattaattactcctagtgaaactatgttatagatagagttccattataaatggtcatcatttcatgtgtatttagacgtcatggcacgcaacacatggttcacgtatttagtatttaatccataatttaaattagtaattaaccttccgtttgtctggctttgttttcttgtgcgtaattatttgtagggttaacaatattatattctcgtaaatttatctattacttaaattttagatccttactttactttctttgtgatcatttacggtttggcaagcaatagcaatcataacaaccagcatgatgtaaaagttttaaaaagttcaaaattttagtgatttttattgtcttgaattttcaggatgttacaagtctcttccaaggagttctggtgctggccgcgtgaaggaagtggctcctcgatggcttggctgatgtccattgttatatgtcagagctgcttttcgctttggcgactttcgtgtcttcagtgtcgctgcagttgtgaagtcggcgctgctgggtcgcttgggcggatagctcggcaatgataacacctcttctacgatgtgggagttgttatgtcgcttttgtgtttagcttggcggtgacatcctgcttttgggctccgccgtcgttgttagttgtgtagcggtgggtttcagccggttttactataattaaccgtgtaattgtgtggttttcaggcccggttttccttataaactgggtcaattctcttcttctaaatataaaagtggaacaaagttccgccttaggtttcaaaaaaaaaaacactctgtagaatctaaccaaactaagaccctgtatagtttcaaaaatatcacatcgaatctttagacacatgcatagagtattaaatatagataaattaaaaaaactaattgcacagttaggggggaaatcacgagacgaatcttttgagcctaattagtccataattagccataagtgctacaataacccacatgtgctaatggtggattaattaggcttaggctcaaaagattcgtctcgtggtttccaggcaaactatgaaattagttttttcattcgtgtccgaaaacctcttccgagggtcaaacgtccgacgtgacacccaaaaattttcttttcgcgaactaaacaggttctaagtgtcacattttagtttaaaatacttatattttgggattgtccatattcataatcctatgaagcgttccatcctatgaagagagtactacttttgtgttctttttcctgataattctttaacgaaattttgaccatctctctgggtttttcttccccatggtgtaaacggtaaacaggtttaccgtctggaattcatattgtgagacgcacatggtagaaaagcatgtacagcatggttcgaacaaagaaaaactaggaagttttttatttttttaaacctaaggtggaactttgtttcactgttatatttagaagaaaagaattgactgtcgaaactaggaagttttagcttaggaaaatctcttttgcaaacttagagctatggactgtcgaaataattacatttaagaaagtaaacaaattcctaacttactgtcaggcaatcaccttttacccaaagcaaattctcaattatcataattcaccgcacctgaatttgatgcttgtgtcatcatatcacagttgttccctctccctacctttcaccatcagagttttcggtgccaaaagagacacaacacatcgtcttgattcttgatttagagtattcgctatactcatggcgattaaggttttggtgcatgtggtgttttgttagcggtagtctaattgatgtatgggtggaattaaagtgcagcaagtgtcataaagtgtatatatggtaagtgatacgcgagacaaattatacaacatgccaacaatttggtaacatactaatttattattgagtgataaaaattaattaccttggggctataaaaattaattaccttggggctatttaaaagtgcttgctacaacgttttgaactacaactacacagcacggactctcgacgcaacatttgaatgtacatcgtataaccgctacggcattcatttaatgagctttgatgcacgtttcataacaactcgctggctgcaagcctgtaaccgtgttggctggctgctacaacagctatatccaacactttcaaacaaccccaaaatatgtgcagaagcatgccaccaaacaaaaaaaaacccataaacacatcctattattgccgtgaaaaaacaaaatagcctaaggacagaaattgtgttaagcagctgaaaatcatcatgagttgaggatgatccgcttggttaagtttttgaacagatccgtatgtttatagtggattatctaagtgattataaatataaaaaatatatatattggtaaataagcttgacaaagagctttgaagaaggcatctaaaaaatagaagtaaattctttttttaaggtattcttagcaagtaatccgcagaaaagtgccatgttagttttaagcccacatgataggagtattttttaaagccgaaaccaaatctgtttttgtccaatccaggtacccaaatggtcctttctctgtactgatggagcatcgaagtttcgttgctgcggaacagaaacaaaactgctgataagactttgttatcctcttccagaaaaaaaaaagaacgaaaaacgagcatgtcaatgttgacgttggccttttctttcagattttttcgtcgaaacaaaaaaggcgtcctgtgcttgctggagcagcacatggacggacagacttccatagcgtccttgacacttcttctgtcagtgatggagatggttcatggagaatcagaatactgttactggttggttggttagttggttgcctaataaattcgcaatgtcctcctcggcccaactctcattcggcccaacaaagtcgttacgttgaaatgggcctatctgaccagtcgagagtgatgggccttgatccaattctgagatggcccaacacatttgcacacgtggactggtggtctctgcagagagaggcagagtagtaggtgcggtccgtggatgatgtcattgcatttgcagctgccctttctgatcttatctgaccatgatgcgtcatatccatccgcaaagctaaaaaagaaaatctgacaaatcaactttattctaataaattaattttgtgtgatatggaaatatctgtcccttgataatatcatgtggacaatttaggtagatcataagtataccagtactacatatatagtataaatcaatacactatgataaggtgggataagatcaaagtgctattgatcacatggaaattttatgttgcgttgtgtatttgtgccaagattaaaaaggtaaactcgtggaacttatcaaagacgaatatgcaaaaatgtatacatctattgtgtcatttatgatttttatcgttgatatgatcattctcattatgtctatctatatcttcgaagtacaacaggattgaaatagagctactccacataacaatatcagaatttaataagaagtcagggacaactacaacattgaaaaaaggaaaaaaaaacagtggagaaccctcgttatgagataaaggtggcacaatgtgctatttataagtaaaaatgtatatcaagtacaattgtacttatatcataacattgcgtagagaactctgttagctatacatgaaggaataactcttttcaacattaccatttattaataataaataatcaacaaacacacacgacgtattgtaaaattggacaaatcaatattgctataggaaagtgaggcatgccaactactatgacacatcacagtaggtcaacatcatctctctcatctctagtagtactaatagacttccaacaacttccacctatatattaatgataggtaatttgacattcaaccatatgttcacatatcgcttcatgtatttaccactagttaaaaaaaatccatataccgtttatcgcaatattaacgtacgatattttttttttcatgccatgtaattcacgtcagaatcatacatttcacccgcccataattaaaaatgcttagtattttataaggggtaagaacgaggagaaaactagtaatgccacgcatcgtattatccaatctgagataccataacttatatccacatttatatttacgctattcgttaccaaaaaaataaaaccctagcttttttattaacatgtgagaaggtaaaccggtgaaacctaacaatatgtccgacagacaaaaatgtgctcatagtgccatatatacacaacaatattatcccatccatttacaagtatactcacatccacatcatcatggtctaacagaatccatccagaggtatctcacctgaataaaaaaggagcagcagcaaaaaaaaaaagtgagaaaaaaataatccaacaagaactcggggaagaagattacattacatcggaaaaggagaaaaaaaagagagagagaagagcccgaaacaaacgtgacaccaaagtgggtagtagacacagaggtggcgcaggcagcacacagaaaaccagcgagattttacacacgcctcgccctcgcgttcgcgtcgacgggaataaaatcccccgcgtctcctcttctcctcgcgcaactcgctcatctcatcgctctcgcctcgactcgcctccacgaagcccacctcgactcgccatggccatggacgacctcgccggctcatcctcctcctcctccgcgatggacgccgtggtcgccgacccctcgcacgggtggcagaaggtcacctaccccaagcgccaccgcaagcagggggcggcggcgctgccctccgcggctgctcccgatctggggttcctgcccaacggcggcggcaaggtcaacgtgttcgaggccgtcgacaggaacgccgagaagcgccaccgcgcgctcctggccgccagggacgcggccgaccccgacgccgcgcggatcgccgccgccacggcctccgcgtactctgacgacgacgacgactccgacgaggcgcaggcgactcgccccgagggggaggtgaagaagcccaaggtgaagaagccgaagaagcccaaggtgacggtcgccgaggcggccgctctgatcgacgccgagaacctcgcggcgcatctcgtgcagatctcggtaatacccgtcctgtttcgctgaattcctcttcggaaatcgtcagatctcgacttgtttggactggatcatatttttgtctttttgttaaggatcggatctgatgagggtttagtgctggatcgttcgggttttttcaaaattccgacaaaatgttgggtgtctactagttttcgattaagatggaggaaaattctggtcgtaccagaaagttgggatctccttgatgtaaaaacacgggatcttgggatcttggaaagcatgggggttttggtgcaactattagatcttttaacgtgtcatagctcttttctgttttgttccgtagattctaaccctctgttctgtgtgcaggaatcttacgagaaccagcaggatattcagctcatgcggttcgccgactactttggcaggtcatttgcaagcgtgagcgccgcccagttcccctgggcgaagatgttcaaggaatcactagtgtccaagatggttgatgtgagttactagagttgccctaactcttttacgcatagagatattgcatttggaccagatataaaaaggcaattgcagtttatagggtgattcacttgcatcacatatgaaatgttactgcggtttatctgattgttaagttcttatgatctttttcttgtatctacttacaaattttacgaaaattaatggttgtgcatgaacattgatactgattcatgcatcgtcatcattgagttgtgaaatgctaatgctgcttttggtaactgccagtaatattattcgaattatttgcagacttgacgtcgctgtaaacgtgcttgtcaagtatgctagttttaaggatggttatgctatttctgctcaccctgtggatgcattatcaattaaaacaaattatttccgaacacgattattcatgtataacaggatacagctggataagttcaatgcaattactgcaacaacttgagtttacatttaacggtttacctgaaatccgcattgtccaaaaatctttctgtatttgtgacatggtattgtgttcagttccttccattttccgctctgaaagggggaggcgtggaggcaagttaatttggaaggtggggggttggtgcggattgtagtatgaggagtaaatgggtgtatcagggtacacattaattggattagcatggaatttcttagcctctaataaatcggaagcgattgcttgataaatatgcaatatgtttcattccagaaaagaaacgacacatactcgtgcaattaataattcagtgtattaatggattctagtacttctgttttgattttataagcatgaaaatgtccctttatttccgtgtctctctatttttagatttgcatctaactagttaatatattgtgcagattcccttgtgccatattcctgaaccagttcgcaacacagcgagtgactggatcaatcagagatctcctgatgccctgggagactttgtcatgtggtgcatagacagcatcatgtctgaactgtcaggtcaagcagtaggcgctaagggttcaaagaaggccgcacagcaaactccaagggcccaggtagtccttgttcgatcacgacttaactctcactatacaagcctctgcatggtatcatggacttgtgatgtaaagcagcataaaaatgctctacaagatggaaatagcatgcgttttatatttgcgatatgtcctatattgtattcacatcaactgagcctagcgctaatgctgtcatctaatgaagcaacaaccttgcaatgagaaaaaaaaatgtaggctttgcaattgaaatattatatgaacaatttgctcacatcctgcattgctggaagcttgtgcttgtcaataccatttactttagatagatgtgaatgtttctgattgtgtaattcaattagtttagccttttctcattgcttttaacacttcctcacaagaagtaagataataagcagattcgattcgattcgatcatttgtattagtttattactccgatctatggatcaccacgattgctaaaaagtttatataaattctaagaagaactgcattttgatgacagaatattcaagtcctactttatgtaaggtgttcatgaaggagattaaacttttttttttctgttttagggccctgaagattgcatggtggtagatatgataaaacctaaaatgctgatctaataatctgactgccataattcacacttgcttatcggacctgtgattgtaattatggatggttctatcttgttttcaagttggtttatagtttttaaatgactattgctctgttcaggttgcaatatttgttgtgcttgccttgactgtaagaaggaaaccagaggtactaacaaacgtcctgccaaaaataatgggaaacaataagtatcttgggcaggaaaagcttccaatcattgtttgggttattgctcaggtatattttccctgctgtgctcttacttgttctgaatggtgctaattattttcagtgctccatactatcattttatattttcttaaaaaatatctcttgcgtgatgtatcataggcatctcaaggtgacctagtgactggaatgttttgttgggctcatttcctgtttcccacactgtgtgctaagccaagtgggaatccccagacgagagatttagttctgcagttgctcgaaaggtatggctcaacttaaacctgattaagaatctagagccgtttttctgttttctgatatatatcagaagtatttatatgcataatcttttttgatatttcacgtgcagaattttgtctgcccccaaagctcgaggcatcttactgaatggtgctgttagaaagggggaacgcctgattccccctgttacatttgatctgttcatgagagctgcatttcctgtttccagcgctcgtgtaaaggtttgttcttaattcttccttcctgtttgctgaaattttgatatgcgatgatgttctgacttctggtcatcatatggaactctttaggctacagagaggtttgaagcagcctacccaacaatcaaggagttggcccttgctggtcctcctggctcaaaaaccgtgaaacaagcagcacagcagcttttgccattgtgtgtgaaagcaatgcaagaaagtgagctgtcatcctttttcaccctaacttctctttctatatagagcttgttacctttgttttgcaactctgagttgttgcattattgcacattatgttcagataacgcagacctcaccggggagtctgctggtgtattcatttggtgcctgactcaaaatgcagagtcctacaagctgtgggtgagtaatctttgtctgtctgcctttataacaccaagtgagaatgttgcaactgaagttttcttaattctgatttgcaggaaagacttcatcctgaaaatgttgaagccagtgttgtagtccttagcactatagtcacaaaatggagcgagctgtctcataagctcagtgctgaatctcttaaggtgactctgaagaacttaaggactaaggtatgatatgtccctgttgcattacttgttttgtttgactgtttatgatgtttgtttcattcttatgtatatgcaatgtgatgctatcctttgcatagtagtaaaattctgtatgactagtgaattctgattcatgacaaaaagagagcttcttgatagcacaattagtttgggataaatggcgttacctcctttttttttttgataaaatggaaatcaaggtgccacaactcttaaggacatgcaaaagcaagtaaacttgtttgacaccaccacctttagctgttcacataccccctaggtatttgtactccgtagtaatatgtgcaattggttgcaattgcagaatgaggcggccctagaagcagcaacggactctggaaagcaggcatctatcaaggccgcggacaagtattccaaggagatccttggaaggttgagccgcggcggagcctgcctgaagggcagcctgctggttatcacgcttgctgttgccgcaggctttgtgctatctcctaacctggagatcccatccgactgggacaagctccaggccatggtggcgtctcacctgtcgttctagaagtatatttgtccagcagttgataaaagcttatacagagaatccaaaggagatgaagtgaagattctaggagtgaatgaagaaggctaataagaagggatagatcctagaaaagaatacagttacctttttcgcatcttttcccaagcccgtagttggggggagatgcaagcaactttgcagagatagagagttaaaaagttttaatcgggttagactgatcggtcagaagaaggaaaggttgggccaaatggttcggcctgaggactaacaccacctttgctctatctcgtttttctgcatctgcagcatctcagatgatgagaaacatttttgcttcttttgtttttcctttttcttctgaatcttgtttgcttttaccaacatgccatgtgtgatattattgctgaatcatctgtacttgttggtgttgatgatatcatatcctgctatgttgtggtgtaccaatcatcctatacttgttggttatgatgttggatgggtgtaccaatcattcctaaaggagtgtgaagtgttttactctgtggttgcaagtggtgaaagtgaggaagccgtgtgagtgacgtgtcgacgcagcggcggccggtgacggagacggatcgagggcaggaggaggagatcgccggcaaagtgagggcggcggcacatggcacatggcacatggccgcgggccagcctgtctctgtacgctctcattccttcgtaccaaggccagttgactcgggcgcgaccgaagcagcacgatctctcttcttgctttgttggtgatcaataacgtggacactggtcggtggtggcgaccacgcgtcgacggccaacctcgaccgtggcgggccccggccgccgtccaccacccgggccgaccatgggaaggcaacaacagctactacacctacaccagtgagagtggtggccggagcggcgccacagcaacagctaggacctactagtacaaagggtgagccagccactggtaatggcctcttcccctcctccgcctccccgctgctcctgctcgcttcctgccctgcaatggcggctctcctcctcctctcctccgccgctcgggtacgtagccggtaacacatgactcagtcaatcttggcacttgcggagttgcggtagcttcagttcttgatttgctgctgcaggttggcgtggctgcgccactggcgctgaggcagcagcgcccggtggtgctgcccggtggccagctccgcacgggaagcggcgccggcgcagcgtcggcgtgggcggcgcgccctctccggccggagctcgccgcggtctcccgccccgccgtccccgcccgcggcagggcgcctctgttccggcctcgcgcatgtaacgcctctgcggccccattcaattctagctctaccacaactgattggtgtaggactgactgacgaatttcgccatggatttggttgtgaggagcagggatggcgtcgtctcagattgccagctccgccttcacctggggcaccatcgccgtcctccctttctacactctcatggtcgtcgcccccaacgccgacgtcgtaagaattcctcaatcctccaacccacacacacacaatcgaattgctctcacttgctcctctaatctttctctgtgctggcgcagaccaagcgtgccgtggatagcagcgcgccgtacgtcgccctcggcatcctctacgcctacctgctctacctatcctggactcccgacaccctacgcgccatgttcgccagcaagtactggctccccgaggtcagtcaatcaatcagtgacaccactctgcactccatgatcactagcattctctcaacctttctcttctcctgcgcagttgacggggatcgtcaggatgttcgccagcgagatgaccgtcgcctccgcctggatccacctcctagccgtcgacctcttcgccgcaaggtgagcaaattcttgattcatgtgtgtagtagtgtacctatggatgatggttgtatgtgttgcaagcgtgaggaggttgttaaaatggcttgagttttgggatcacaatgcaggcaggtgtaccatgacggcatcaagaacaacatagagaccaggcattcggtttctctgtgcctgctcttctgcccaattgggatcgcgactcacgttctgactaaggtactggcgggttcaattggtcgctcacattgatcgattgtatgtaggttcatattgcttagatggtgtatttttatgtgattcatatatgaataaaatttattcaattaactatgtgttacatcgagttcaatgtgattcttgtttttccccacgtattgaatcgatttggcagctgaacatccctataccggtttagcgtactctactttctcagtagctaatgaagaaaagtgcaattgacaatatgatcagagataagcgacaactcttaaatgtttgcaaataaagaaatgagatgattagagggaaatgaatcgatttgaaacacacttattcaagtggtacactgttcaaacatagaggaattacaacaattacatttatgaatgctatactaggcttatgtgtttcttgtcacagactactttcaattgtacatgaatgacagcatttacagttttgaatgctgtactaggcctatgtgcttcttacaaataaatgtgctttccaataagcaattacaacaattacatttttgaattctatactataggtatgtgtgctttttataaaatatgtgcacaaccactaattagagtggcagcaacaaataacatttctcctgaatatttctggtgatcataacccttactgaacttgtaatggtatgacattaccatctggtttatcctcaccaaatatccggttcagtatcaacgccaatctgatgccggcctgtgctagcctcttctccacgattgggtaccgagagtagaaatagtcatctgtattccaggatgcagaatttgccaattattattgccctaagcccaaaatgacttcttgtactagttttagtcacaaccactgtgatataaagaagtatactcacctcctagagtaatgtcttgctcaacatctttgtaggcataattgcaggacagatgtatgctctcaattgcatagctgcatgacattgagttaaacaatgcatgtcaatttctctttaaaaatgtactagacaggtggaagtgtttgagcaggatatatcattactcatttgcacaggtttcctttttgttgccacaattttcccagtgactgatatcttcagaccatccatcctacaatttacacaaacatcagaaactggaaaagcatttctgaactgataaatcattttacatgtctgtgctctcactgtgaggttcatcttgagagcctccaccatggtatccaagcttctgttatagaagtccttcatggccgtctctatgatgctgttgtcccacacctgtaaaagcagcacatgaacacagaaatcttgtgagtgaaaaatggcagtttgtgctgatctgaataattcagttgacatgacatgagagaagcagtacagacatggtgaaggttttccttcctccggtaccagtgcactttgatggtgttgcccccttcgtcttcctcgaagccgacgtgcagcggctggtgcacgtcgccgacgaagtgggccaggaacatcaggctctccgtcaggttgtctggtttatcaatcagtgcatgtgtatggatgttcagagatcatcggatcagtgtcctgcctgctgaatcagagcactatttggcactgtgttttgcagataagcttacatgaactctttgaatcgccatagctgtagagctgatcggtgtagttgttgatagccccgacaacgcacatcccttgctggtgacgagaattatggcagtcccctggataattgagagccacaagcagattactccatgatgaaagtaaagctcatgtttcagaaatcagagaaatgtttgtgccttagctctactcatctctgctatcatctaatcagagtggcagatttcaccatggaatgctgaattattaatgtatacctcagttaaggtcagctgctccaattagcaaactttatcattccattgaagaccacaaacaacatatccagtggttaggattatctctgaactatactagtaataattaacaacaggtctgtgtgggcacatgtgtgactgtctctgtcagactgtcagcggcacattcctggtcccataagaacgtgctaacaaagtttggaagatatttctcgagatattaagaacgagaagaagcagagaacacgcaattattataatcaagtcgtcagattcctgttgttagtatgtccttttttttcttccttggagtctaaacattcattttacatgcacaattacgacagatgtctggtttttatggtgaaagctactgattgaatgcaacatgaattcgttgtggtttggaacaaggaaattagtggatcgaatcattggtgatgccgtgagactctgaatctgtctgtgatgagagtttgagttgtgtatctttactcaacctctttctctgattgtttgtcctccccaacaagcaacagtacgtgccggtataatttggatattcgatagggaataattcagaatgggctaatggcatctacgctgacgtacttgctgctcatactgttactgatttttttttcgctagcgcaaaaggattgcacgttaatatataagaagaaaaaaagtttttattacacaacgtaatcaccagaccggcttatgccaagggaagggagaaaaagcaaaacaaaaattgaagcaaggaaggctaattaaactactacggcggctaaacataactcctaacagagcgagaagggcagagccactctacactcaagaaaaacccaaaaacgttactgctactactccatccgtttcatattgtaaaattttttagtattgctaacatttatatagatattagtaaatctatacatatatatatatatatatatatatatatatatatatatatatatatatatatatatatatatatatattcattaacatttatataaatatgagcaatgctagaaagtcttacattatgaaatggaggaagtgctaattaattgttttgaacagagaaaaaaagaataacgcaaagcgttctctcgctcagcctggtttgcaaccaatggcgcgcaattaagctcgctttgaacgatcaatttgtattctgtaaatgcagcgttcatttgcagctataattaagtcgttatcttaaaagaagaaaatttgaagctaagattgtggaggtgagtgaagacgtacgtgagtacttgaagttgcagacttggggggtgttggcgtagtggagaggacgagaccagtagtagtggaatcgcacctcgtcggcccacgggcacaccgtcgacagctccccgccggccgactccggcagcagctcctccaccgccgccgccgccttctccgacaggtacttctgcaagtacaacactccgtgttactctctagctgcagcctcttcaggtgctgtgcgaggagaggaggaaggggattagcaaagccatggtgtgcggagacctcggcgatcttgcagacgatgatgtggccctgcttgccccacgcctccgcacgccgaggcgccgcggtgagggagacgacggagacgaaggcggcgagaggcagcagccggaggcggagcagaggcgctgcgagtgccatctccggtggtggtcagctcagcctcgccggagtggttgggtcgtgggctatttattgggcggagaaagagcacgagaggagaaggtaacgtagcggtggcatgggctgggctagtgggccaagattatccggatgggccggatgcttgtgatgctgagggcaatttcggcccataaattttatacagatttttatcatgccgacaacagtctctggcgtttttatcggagaaaatttccagactacgacatgatacattgctactcctgccaaatttgttgctccattttttttctcatgaaatcaattggtgaggctgattttcatacaacgacaacactggctttgtttgagttcattgtacatgaagattaagtgtaaaacatgtaaaatgagaaaatcattagcttgattaagtttaaattattttgaacttaaaaaatggatttatctgatattttatagtaatttatatatatatttctttttttttgcaaaaaaatgtattgtttagcattttgaaaagtatactaatggaaaccacgagtaaaatatgtatcttaatagaaaaaaaaggggcaatacagctatgcagctagctgttgcattcatcctgcaggagaaaaacacacacactgaataacaaacactgctgtgaatgcacggacatggcaccaggagggtccagcagtagtcaggcgtgtgcatgggtatgaacatggcctcaattttcagcagcgtgtgaacgagattgccggccgtgcatgctccgtagttccgacagattcctcatcctctttccctttcttaaaataatggcgcgaaatgatacaatattccggaattcctattgggtgggtgatcgctcctccatccacccagcgatcactcccctgcctctctcctatactatatactcctccctcctctccccccttcctcctccccttcttctctttctactacagtacaccacacaaaactttttaaaaaacaaaagttagaaaaatttatgtatagaaatactatttataaaaaatttgaattcaaattcaaatttgaattgggcatgtaaacttttgacttataaactttggatctatacattttaggtgtataaactttagatgtatagaaataatatatatagaaaatatttgaattcaaatccaaattcaaatttgaatttgaatataattcaaattcaaatttgaatcgggtatataaactttaggtgtataaactttagatgtatagaaatactatatatgaaaaatatttgaatttaaattcaaatttgaatcggatatttgaattcaaattcaaatttaaattggatatataaacttttgacttataaactttaggtatataaactttatgtgtataaactttagatgtatagaaatactatatatatatataaaatatttgaattcaaattcaaatttgaatcggatatataaacttttgacttataaacttttggtctctaaactttagatgtgtaaactttaggtgtataaactttaaatgcataaatttactaaagtaggaaagtaatgaggtgccaaaaaaggaaacaggtggagggagggagggggggcggggggcgacccgatcgctaccaggtaggtaggaactaccccactattcccgcttaaaaaccccatcaccgaggcactgatactgatcgatcgtctagctagcttcttctacctcgcatccgatcaggaattcaggatgcagcagtcgatcatgtcgacgctgccccttctgctgctgcttctcttctcctcgctcttccctgctccctcgcacgcctggggaatccatggccatctcatcgtctgccagatcgcgcaggcacgcacattcttccgtcttcttcctcgatctgctcctcgccttctttcatctgatcgtctcgtctcgtgcagggccggctgagcgacgcggccgccgcggcggtgaggggcctgctgccgtcgtacgccgggggcaacctgagcagcctctgctcctgggccgacggcgtcaagctcaggtacccctggtcggcgccgctccactacatcgacaccccggaccacctctgcagctacacctacgacagtttgttgattttgtcctcaaattcgactgaaatttgcatggacatgctgtcacattgtagcagcatgcatcatgttggtttcttgtgttgcattgtcaggagactgcaaggacgaggatagcttcagggggaggtgcgtcgccggcgccatcaacaactacacctcccagctcctcacctatgatgcaacatccccttctactcaatgtaatactgctccatttaattcagttctgcaattttttttgccttgttagtctcaggctgatgataagtttctgatcttgagttcttcagataacctgacacaagcacttctgttccttgcacactttgtgggggacatccaccaggtacacccaaaaaaatgtgattagtacgct

SEQ ID NO: 8383 - DNA, 6431 bp, Oryza sativa
tatgtctacttaaggttcctgttatagttttcaatatagctggacacttcaatctgttcctttcaacttctcgtgccatcccataatttccttgggtccaggaaagagcatcaaatacccgtccacacaagtttcgatgaatctcatgcttatccaagtgtgttcccagggtgaacctagcattctatgttccttaggttctcaaccttgacctatttgtgttgccttgtccatcttatttggcatgttcaaatatacccggttaatctcaaatgattctcaaatggttagttcaatctcatcgtggtttaacttatgattgtgtcctttcagcagtgatagctgattcattcagttgttaccacaggggaagaactcttctttctaactactctgctgcagagccaaagcttcctttcttttcaaatgcagtatgtccctatggtggatttttcttaccattgatcatgtgtatatgctctttgccaaattcttcaatcacaagaatttggtcgccttgtttggcatgctcaaatattcccagtcgattagttctatattgtgtcctttcaggagtgatgactgattccttctcatgattatgtcctttctgcagtgatggctgtttccttccattgttagtgtggggggatagttcctttttctaactgttctgtttcagaaccaaagcttcattttcttttcaaataccccatgtcctatgatgggtttttcatagctataatcgtttgtgtataatctttgccaacctcttcaatcacaatatgcagacagaatttctggtgttctgcatattgcttgcgattgtttccgctggatataaggactacgctaatatttaactttagaagttaattattttagtaaaactcacttagctgtcatctcctttgaacttccacttcaattcagattttagagccatggcctaccaaacaggccctacattttccagataggttccattgctcaatgtttttttggctcaaatttcttaatctcatcgttggcaggagcctttggcatgttctcagatttggtttgttatcaactgtgtattgtaggcaattttggtcatagcaacactgggtacaaacttgtactcaagcaagagttacaattgacaacatgagtacattgactagggcgtgcagtttttttagatggttagggcatgcagttgccactggtgcaacgtaatagttggagtctcctttgtaaatagaggatacgagattctgaatttttgtagcaaatagtcaatgattttttcacccttgtgtagatgagtggcattcgcatgttctgtattcttgaggataaatttcaacggttttcttctgaaatgcagaatatgtggtcttgttggtaaactgttgtcttggactagtccatgctatgcaattttgagcaattcgcatctggttgtaaaccgatatattctatgggttgtgtttacgaacgtgactattgttgagataatatgatgtcattatctttgtttatcttctgtggttcgaaccaaacattactaacagaactactccgtgatatgttatttgtgaaagcaatattcatagttgcaaacataagctagtgagatgcacagtaactagttatcaaaacgaaaaagaggctagctgactctgctcgtcatgcatgatatgtatgaatttttgtaggttactactgatatcagttcatcgatgctgcatcatgcatgaactgcaggttactactgatattgttttgggcattagcaggtttcagaattgaactttcgactgttgctgcgcgcacacaaaataaccttcactgcaaaaatttagtatgacgtatttgcaactactggtaaactcatattgtcacgttagcattatccgagacaaatctatgcttttcaggttaataagctaaatatttcagaaaacgtataataataacagttactccggtgattttggaaatttgactacggtgacgacttgttatcttgatcgaaatgagcgccgtatgaatcccttcttcggacttttgagtttacagagcagctgctgatggaagcaaacctgaggtaaatactgaggagctttgctctattggggatttgggggtggggtacatatccaaggaggtccagacaactggatttgatctatttctcctaaaatatactctctccggttccatattaattgatgttttggacaaggttgaggtcaaatttttataacttagactatcaataactttagaaatatttagtttaaagaaactataacaacatatatagatttgtcttttaaaatattataataaaagtaaacatagatttatttattatatatattataatagaaaaataaggtcaaagatgtatcttgtagaccgtgtcattgtccaaaacgtcaattaaaatgaaaccggagggagtaagttgtttgtgcttttattattattatttttaagaaaaagaagaaaatttatgctagccatggatttcagtctccttgctggataggataattgccagtggctgaaattacccagtcagaaagaaaataacttaccttatcttgtattgtcacaggctcagaatttatctatttccccccttgatagtaataataataccatctttggcagagaaacccagattcttaccttctgaagtcccctcattcctgatttggagtaaatatttgagtagcatctgaatgtgatgccctagctagtgaccatatattaacattcagttcttttagataatggattaaaacctggcctctatatccaaactcggatgtacatggccaaattaacatccagttcttcatccaccttcatatcagaacattccagaatacagattgcaatggcatccattggcaccacatgttttgactgattctttcactgtttcttgatatatttgttgatttttaatggtaaatagctcatctgtccaatcctggcaccacataatttcccctgttaaaacagtgccaacacaaatttactcatgtccactgaaaatccccagaggataacgttctggcactgccatatcaggaccggaccatacgcggcgcgccacgtggcgcgccggcggtcacacctgtgctggtgcaccctggcattatccccatccaccatcctgtgggtgactggccaccaaaggtttttggcgccacaattatattgagctgccattgcttctcacctctgctttgcatccatccatccatcagagatcaggtagaacagtgagagtgaggtgcagaaaaatttgagctgaagctgaggatggcaacatccatgatcacctcgccgctggtggcgccggcccgggccaagggccttccgtccatctcccgccggggatcctccttcgccatcgtctgcagcggtgggaagaagatcaagaccgacaagccctacggtctgaaactgaaactttcttcagaattcagacttcggaatgttttgctgattattgttgagtgggtttcagtggctgaatttgtgtggtttatcatttttctttttttttttttatctttgcagggattggaggtggcatgtcagtcgatattgatgcatctggcaggaagagcacggtcaggacttgtccccagctcctaaatttctcaatgtcagtcgaagtttttgctagttattcttcatggtggtggctagattttaaaaagaaagcaccataggtttcaaactttaaaacttgcaagaataattgccccatatttgtccaagtttcagtgacaatttcgcaggttttgttcattcaaagattccatctgtcagactatgcactgaataaactgacagatttttgtgatggatgcaggggaagggtgtgtaccaattcgttgacaagtacggcgcaaacgtcgacggctacaggtaaccaagatgagatataaaattaatattaaaagagtacttttacggtggtatctacttgttttagcaaaaattgtttggctcaatctgacaaactcctcgacgatttgcagcccaatctactcgccggaggaatggtctcccaccggtgacacctacgttggtggtaagtaaaccattcttttacagtccatttactatatatatgaaatactactatcataccagcaaagaagtcttggaataatttttagaaaaaggagagaaacaataagaggtatgctgtaagttagaataaccaaatctaatagatatatatatatatatatatatatatatatatatatatatatatatatatatatgcatatgttgagttagtccatcgtagttaactacttcatctattctaaaatataacgatttctagcatccagaatttgtctcaaaataaaacaactcttcactaacattatctttccatccaatcacaatcctccaccattcaccacaacttgcaccatttaattatatatactttcttaataattgtgtcttaactctaaaacttcttatattctgggacggaaatagtagtaggtacaaaatctgatagggtcttgtcagcaacctgtgatgtgatggagagttcttacaccctagaaatcataaaggcaaaatcttatcttgatcaatattattaagaaacttataattcttttgtatggtcaatcttatctgcctatatgcttgtacggttaattaattatatatctctgtattgtggtaattaatctgcaggaaccaccgggcttctgatctgggccgtgaccctcgccgggctcctcggcggcggcgccctcctcgtctacaacaccagcgccctcgccggctaaatttcacccaaatccagtctatgtatgtaacaccaagctgggtgtctgcatattcatctgtaatctaagatagccttcctctgaatgcgatgtgatgatgcccactgcttaatcaaactgcattgtgattaatctatgtaacactgtacttgcatgatgatgatatactacacttgatacttgaatttggagattaattgttgatactaaatacatagattacataaggttatcttgcattattgggccttctctctagtgcatatagttagctcaatgaacatgcaaattaaagtgagaagagtaaaatatccaatagctagttgactctcttacttattacggatcccaatttaaagctaaggactgaatttatttggattggtttatgtatggtccagtcaagtactcctacttcactccagatatgccaagggacaatacaggcatacagtgtgtggttcagtctatgtctagctatcttaggtgaaaacgatactactaccacatgaaattctaccagcagaggccgtagtacagagctgacgaaaatatgtggaccttcttgtcccgtgaatagttggatatttacgtggacggacaacccctgtcaaaacagttttcacaggcaaagtgagataaaagattgcctccaagtctacatgtcggtgagagatgaatatttttgagacaacatatagttgaaatcatgggctatattacataaaagttaaccatagattttcagcacaaaagataacaaccaaaagtaataattaactagttgggcctactacaacaaaaattagcaattagctacctataaaaaactacttccgatgaatctaagtgttttcatggggtcttaagatgcccgactaggtaaatattcatccccaggcgctgttcttaattgcctgcgtgtgacttgtttattgtctgctcattccactacttccactacatgtagttctatcatgatcatgcgggctcctctaaagtccaaccgctggactctagtcacgttctccattaccacgccgtgcctcatcatatctcactctccatctattttccagtaaaaagagggcaatgtgggttttcttagcactcttcctctctctgcattctcctttatctctgaccatgttgggctcgccacgccaaccgcagtacatgaccattggcgaagaggaaaaggtcatgttgaacaccgacgaggagcaaatctcctcaacgccgccaccgtcacttagtaatgtgtaggatagagatgatgagtggtggtagaacgggtcgtcgctaaaggtggattctccttagctatcatgctggtagctggcaaagctacagagaacacgctagtggtgcctcttctagatctctgtctttgcctctagctccgatggtgcctcctctgtgttgtccgccagctcaacctccgccaagtcacttgcctctcgtttatccatgctaggggccaggtaccttctccgtgttagccatcggctcgccctctgctacaaccgcgctagccacccccacgactacaccgactactattgctgccacgccgaccggggctgcaggaat

SEQ ID NO: 8384 - DNA, 22860 bp, Oryza sativa
aatatttggatcagcaaatgatttgatcattagttattctgtgcagagatgcttttccaactttacagcgaagcatataattaccaataatcccatttttacccttttgatttatcctagttttctcatcagttataaagacttatgaatttctttgtatttattttctctgcaggttgggttaccaaatgttggcaaatccactttctttaacatagtaacaaagctgtctatcccagctgagaacttccctttctgtaccatcgacccaaatgaggcacgggtatatgttccagatgagagatttgattggctttgtcaactttacaagccaaagagtgaggtttgtttctttcctacactataatgtgcaacttcttttcttatgtttcaagacatatcatgtcttctgaatttctttgcaggtgtctgcatatctagaaatcaatgacatagccgggcttgttagaggagcccatgctggggagggtttgggcaatgccttcctatcccatatacgcgctgttgatggaatttttcatgtattgagtatgttcctgttacttatcattttgattggatcttgcatattgagtgtgtagtcatggacttgtgctattgtttcagtgtgaagcaaagtaaacgttgtgattgttctagtgaaagcattggtgctcagattcgaatcaattttctttgcttttttgtttaaccagtaatcacaaggtcatgcacttcatgaatgctgcttatgtttatcaggagcatttgaagacaaagaagttactcatattgatgattcagtggatcctgttagagatttggaaactattggtgaagagctgagactcaaggtttttatagggatgcttgatttgcacgtcagtaaatgctttggttaaaccttcttttaaatcctatcgcactttcttttgcaggacattgagtttgtgcagaacaaaattgatgaccttgagaaatcaatgaagagaagcaatgataagcagctgaaactcgagcatgaattatgtgagaaggtggggcacctgttacagccaacctctgtgttgctaaatttgtctgttagcagccttgcataatttcaaattgttattttcttgagtgagtggaagcttacttttggcttctcttcctaacaggtcaaagcccatcttgaagatggaaaggatgtccgctttggagattggaaaagtgctgacattgagatcttgaataccttccagctacttacagctaagccagttgtctatttggtacgtatttttgtcatctgtatgccagtttatttgagatgttataaagtagttttcatgatgaggtgttcagttgttctttgtgagatttcagttttgttattttcgtgcttctgcatttagagactcagtaataatgtcagtacgttgattcatggctatacatgcttttgaatttatacaatagtgcccatgaatagcgcatattgttttctattagcaagataaacttggaatagtgcaaaacttatcctgtggactttctgttgtgccctgtttgtctgtttcagtcttcctcctattatgtaatgtttattttgaggcatcaagcaatattctgaagcagtgaataatactttcttgttttatgtatgggaactctacctatatatcattttcagagcacacaatcaactataacccaaatagtcactaatcgtgtaattagctgtatacccacctaacctaacatggatattttagttgacctgtcagaaattgaaagggagatgctagtatgttacctttccttgcatatggtaatttttttttaataaaagtagagctatatattgtttaatgactgttttgtttttgcaggtgaacatgagtgagaaggactaccagaggaaaaagaacaagttcctacctaagatacatgcctggtattgttctctagtatatagtaactatttcttgaagggattaaggtgtaatggaaaataaggcaaactgttgttttttattttcagggttcaggaacatggtggtgaaactattattccttttagctgtgcttttgaaaggttgctagcggatatgcccccggatgaagctgctaaatattgtgctgaaaaccagattgcaaggcaagccatgtcacactcatataccattaaatgttctttatgtgtttagcttagttccaaaaaaaccaaaggtaaattgcttgatttggaatcaagcaaatcaagcaatactgtcacactcatatatgagtccttttacttggattttatttcctgagtgacgcaatagtgatgcctattttttggttgggtcactacgtgtctttgaggtgaattccatttggtcatactttctataagatacattatatgactatgattctataaacaccaatagaactatcaaaccagcaagagtctttttagttgcatgttgtttaccatatattgtagcttcttttttatatgattcaaaatttctgatctgtcattagttgcttgtccttaagcattctctattttttgctgcagtgtgatcccaaaaattatcaagactggttttgcagcaatccatcttatatactttttcactgctggccctgacgaggtatattttttctggtcatattatgcttatcttacactattacttgttgattttaatataatccatcttttacttcccatgttgctatatgacagtagcattgccctttaacaattgtgttgtgcaatttgctgcactttgttttaagtaatacgcagtactccctcctacaaaagttatacatattacttttaccaccatgaccaaggagaaattaaactcatcttgcatgtaacaaagataaggagtgtatgcacgcatgcaaccaatgagtattaagatggctcctcgggttttgatcaaacatttaatttacctatccatttaaatcttggatgcatacacactacaaataggaacaacttatttgggaaaactaaaatatgaaataggtctaattcttgtggatggagtactttctttagttcttattttttatgttcttaatagttcaaatgcaagcgatgtgaaaattttagttttatacattcttgtttaaatatatgtttgaaatacattttgctggattagtgacatagatggattttctgttcaggtaaagtgttggcagatcagacgtcaaactaaagcacctcaagctgctggtacaattcacactgattttgagagaggcttcatatgcgctgaggtactcatgcgatatactcaggcttcatatgagtagttagtatatgcatgctaatgtggttagatattattgcaaacaattgatctcatgtcactgttaagtagctggtctaattcactagttatactacctcattttgtacagttatccccaactccgcagtactcaatggacacattgatttagatgttttctgatgcgacttttctagtttgatatagttcttttatttgtaataattattctctttgttttatatatttggttgggcttgtctgtccagtagcattgttctttttagctttatgcacatttgaaacttatgtgaaatacatttttctgggattaggtaatgaagttcgacgatctaaaagaactgggtagtgaatctgctgtgaaggtatgcaaggcacctaacaaagttgatattgttcaagtgcctcttttcgatatatacttaatgaaaacgcccattattgcgaattgtaggctgctggaaaatacaggcaggaagggaagacctacgtggtacaggacggggatatcatcttctttaaatttaacgtgtctggaggtggaaagaagtgagtcaatgtttgaaggtgatagcgttccgacagagtggtgcattttactttaaacttctacacttagctctgtagcaataaacaagttatgattcgatattttgtaccatgaggctataaaattatccaaggattgtatgatgaggctttaaatcattgaagaaaaagtgtacggttttgcaatacaagcattcttggcatgtttgtcttgcctgggtctacatctgtaatattaatggataactgccgtgcatgtttggacaactcgctgtcatgcagtcaaatgtggttctttccccacggtaaaattagagccttccacgtacagctgatttctgcaattctatttttaagccatgcataaacagacacaaattaacaattaactggaatagcaagtcttaccacgcatacaattaccagagcaagataaccctacgaattactgctcaaatctagcggacctctacttctggtaacggcccgtttatgaaatatgaacacgagcatagcataattaattacccttccagtgggtaattaaatcaacttaattaaattagggcagcatgacactgacgtgcctatcaaatatccaattaatcgggatgctgatgggcttcttctgggccttgaccgccctctcatgggccttctccttcatcctccggatcttctgcggcagctcgcacacgtagtcccgcgcgcgccgcccttcgccggagagccccgccgcgagctcctccacgcgccactcccgcaccaggtgctcgacgatggagcagtagtccgacaccgtgtacgtcccggcctgctcggcgagggacacgacgcaggcgtagaggtcgtcgcggcggccgtcggagatgggcgaggtcggcatggcgacccctcgccgtagcatgcgcgccaccgcgcgcacgccggcgtccgggtcggcctcgaggagcctggagacgatgcgggtgtaggcggcctcgtgccgcttctcgtcggcggcgacggtgccgcagacgcgggcgagggcggcgtcgccgtgccctcgcgcgccgaccagccgcgccgtgttgccgtgggcgaccgccgtggcgcgctcctggaacgccgtgtagacgaaggcgtggtacgggctgcacggcgggtcgacggccatgccggagcggatgaggcggtgcacggcgcgctccacctcggccatgtcgaagcggccggagaggtacatgtaccggttgagcacgtcgccgtggcggttctcctcggcggaccacccgcggatccaccgcgcccacgccgtggcgtcggcgccggtgaggtcgccgacggcgcggacgcggttcagcgagctctggtacgtgggcagcgcctcctccgtcaccatgttcgccacgaggcacaccaggagcaggtccggcacgccggcggcgcgctcccgcagctcggcgcacgccgcgtggaacccctcgccgccgagcaccgccgggtccgggagcaggtccgacggctgccacgccgcctccaccggcttcagcagcggcagcacgtgctcctccacccacggctccatctgcgtcagcacctctagcttctccggcgacaggtagctcctcatctcctcgtcttcctcccgccgcacggcggcggcgacgtcggccgccgccgacatgatcgcgctgccactgacagcactacccctgcacatcctgcatgcatgagcacgacaacttgcaagttgcaactggtaatttatttctttctcaaccagctgaaaataaatttatgctttgatcaaatcgatgaaatttttggtaagtttgcaaacaatatgtcaagtaagggagtgcacatttgttcttcgatgcagagatcgagttttaatatattttctaaagggttatactttcttcatcatttttaatgtgacgttggttagttaaaaatgaactaatgaacgttatttatatataacattggaagtatgtctagtaaaaaaaaaaacaaaaacataccagcggctgctactgatcatggtgactcgtctaccaaatagtgttcttgatggtgaagaagagttggtgtttggtttgcaacgaagcctattagctaaaggcatcgccattgttgctgttgcagccatgctggaggagaagaagaagaagatgatgatcgtctatggatcgagttgaactattgtgtcttgagttgtgataggtttagtttcagctggtcgaagcctggtgctgcgttgttatatagagagcgagctaggagtatatttgttgcaattatatgacttcttccactttccttggcaccttagttggccacgtgccttcgtgtcagatcgagctcaattatgcgcattgcattaaaaacaaatgtaccactcccaaatttcaaattttaaaacttattttgacttgattttggagtttttttatattattgtaaataaattgctaagaacaaagttttatataaaaatagttttccaggtatttttttaataagccatcggctttagtttagatagattagtgatgaatgagacggagagagattttaatcacccagaggacgttcattgttacttgtttagggcatcttcaatgtataagtctcattggatcataagctgggcctaaattagctatatggtaattgttacaatgtatatggcaaaaaaaaaagaaagatattaagttgggttgcacacaattttaaaaaaaatcttactatatcataactagtactactgcttttttctggtgagagagtctgagggaagagagtcaaatacaaacggtttgttttttcccgatggcgcccaaacctcaagcttaatgtcacttgcgatatttctcataatgtatatggttgatttttggactaaagtccaccttatgtcctacatcatgtcgactaaacggttatgatatttttaaaagaattgataatatagattaatatgtaatatatatcattgtacaaacattaaacatgtaagtttaaatattcaattccaataaatggtaacaaaaataaaaaaaaactaaactaattaatcacctccctctttcagtctttcgtcctcttgcttcatagaggaagttcaataaaagttatcaaacaccttaaattcggttagtcccgatactactaaatcaacctattacggatatataagttaaattaataatgttgcagtgccacccactacagaaacacgcaaaacaaaaaagaacagcaaaatagatatcagaacaactaagaccggcatctatagttctttttccgcctaaggtgcacctccgcgaggtgcccaaggcaagaaccgacacatttgtgaaacataagtgccggttctaactaaaaccaataccagtagtattagtgctggtttttctataaaaaccaatacctatacttatattataggtgacggttttcacctattaaaaaaccgagccaaacccactggctctctctcttcccctttttattaccccttctctaccccttatcttctctcctctatcggtctccctgcatcatcctttctccctctcccatgcgccacggccggccagggatcagtggcgctccacaggtggcgtccccctcgatggcactcggcggccaatggtgtctctccttctctccgcccatcgcctcctttccctctcccccggcctcccaccaacggtgcgcggcctcctcctttccgttgccatatccaacgcctccacgagtttggggatggccagatctacaccctctgttgctccctcttggtcttcaccttgctatggcccgttggccaccgtgagctcggagttggatcctgccatccctactatggcggaggcaccgactactagatccacgtgtcatgatgatgaaggcgaccaccagcagcgtcgtggctccttcccgtgcgtggcaagaggatttttatggctttctttgttgatttcttacttgttgatattggttgtaaaaacgatattggttatcccttttatgctgaaatgggtatctagtgcttgggtagtagatgatcctttgtgataaaatttgtgattcacttagtgattttgatgttgaaaagcaatttatgactgattgagaacaatttgaggcttggacgttgggtttctctgctgctcgatgcattggcttgattcgagctgatgcattgagcctgttttttttattcctcgaaccataaaggtgttggttggaaccggcacctttgaggaggtgccacctgttgagtgccggttaaaatattcagtatctacggccggtttctaatcggcacagaagtgattttgtgtagaagtgccacttgtcttgcacaatataggcggcttccagctcactagacccattggcatatattgctggataacacatggtacgtccacctaggtatacttcttcacgcatgcagggtctagctagggttcaggccattgtttcacccaaagaaattgttgaattttattactatcacacttctatggtaaatttgagacaaaatagctgaacaagatttaatatcgaaaaaaattcacaatttagtttaaatttggagatggtgaaggaaaaaaagaaccaacaacgttctactattgccccgaagtaactcaacctaggaggataggatgtagacaataatattctaaaacaacggatctggacaaactctcgtccatattcgtcgtttcatgataggtcacatcctatcctatttattttggaaatgagggagtatattatcatgatcttggtatcttacataatacatacgttcactatatattgtgctgtaatttaatacacaataaagtttgtatataccctccgtgttttagatatgtttacccttcgtcttattaaaaaaatatatgtaaattttatttattctgttttgacttgttttatcactaacttatattatatactttaagaatgacttatatttttgttatatttgcactaatttttaaacaagacaaatgatcaaactatattcaaaaatcaatatcattatatatttaaaaatagaggtattatatatgtgtctgtatataggtaaaaacaatacaaattgtatataaaaaatagcgagggtaggtcaccagagctatgaggaaagagaggaggcagtctccgagcaccatggctgttgtagtgatgtggttggcccgataccctccttcctcaccaaggtgcattgctgcactgtgcttccctccgtccatggacctcgtctctcttcgccacgatgaaggctgcaatggccacgtcggcctggggatgacgacggtgataaataaaatgggcgaggacgaggtggattgggcaactttgttgtggagatggagcttgaccttgccaatggagtgatcgagctcaagctcttcgtgctacttatggcctcctccttgtcgccgctgcaccccgctccccttcttcctcaatgttgtgcctcccccggccccaccttcccctctagattccgcagcagtgaacagatcgatccgatcataggaaacaaggcaagatttgtggcttcaggacggaatggccgccattgccaccatcatgtgaagctattcgctgcttgggcgcgcggatgtcaatgcggcctacgaggtgctcctctttgcctaccctcggtctctagaactagtatggaggcgtgcgatgaagaagatggtggctgacagctgggccccactacaactaattaaaaatactagcttaggggatattcatacggtttgagaagttggggcatgtaaaatatctagcactaaagttttaggagggcaaatcgtacttttgtgataattgagagaggtaaatcaaacttaaccctaattatggagggcggtgcgacgggcatgcaatgctacggctaagttcttatcccagttttcctaactcatctctctcgttttccgtgggtatgctttttaaactgctaaacggtgtgttttttttaaaaaaattctatacgaaagttgttttaaaaaatcatatcaatccatttttttaaaaaatagtaaatatttaattaatcgtgcaataatacatgcttcgtttatagcttatctagccacatactgttactggtactatactgtagtatgcatgaattataatgtatacatccatatatatgaccacgtgaaacgcttcaaccagtgcagcaaccgtgccatatatacgtacgtacaatcatacttacatcaactgtacagtatatagttggattgatgagtcgtgtcatcgaatagagacccacgccaatgcaagtacatgcatgctgcatatggctgcattcaaggagcatatgttcgcacgtgctagctaaagtgaacagagatggcaggagatgacatgacgatatataattcatattaataattagttcaccaataccacgacaaagctaggcagatctcggttcttttctgattgagtaattaaagtgtaaccgtactttaattgttgatttgagcctaaaatgctgatataatttacttatgattgatttcacctagctatgtagcacaatgcagagagcgagatagcttgcttaattattttttaagataattgaagcttttattaaatttagtcaattactgtaggtaattaaaggtgatacaactgcacactcaggctgatctgcataaatttagatgcacacagtcaaagcttgcttaattcatagtataatataatttgctaatttcacaaagaaatgaagttgatgagatcgtatcctccttgcaattaataaattacttcctctggatctcgtttgcttgatgttttgatcatcgcgacgaacttaaatgtacatatgttccataattaaattttttataactttatgtttataaagttattgaaaatatatagttatatgaaatcatttttcataataaatctactaatattattttcctatattaaattataatatttttacatatattattgatttaaatttttgagttctctgacgagcagacaaccaactttccttctctttactgcatgcgttgaatgaactggaacaatctttacatcggtgtccgtcgttggctgggacatccacatatgacacatgtcagaagtgtttcttgtgtaatccattcaattcgatcgatcaatatatatatacgtctgcatggatgcatgtgttgtaggcacgtacagtccgtggatctgatcatgcactggtatcaagcacgttactcggggtgcgtgtttagttcacgttaaaattagaagtttgattgaaattagaatgatgtgatgaaaaaaattagaaatttatgtgtgtaggaaagttttgatgtgatggaaaagttagaaatttgaagaaaaagttgggaactagatcaggcctcggatcagcaatagctagcaagccttgttttgctagtagtagtactgctcctttcgtcccacaaaagactttatttttatatttctgtgaccaacgtttaatcgaccgtgttatttgaaaattttataaaaaaagttaaaaaaatcacacataaatttttatcatgttttatcatctaatataagaaaaatactaatcataaattttataaaataagataaataattaaatgttgtttctaaaatctgaaaaatagagttttgtgaggagggagtatcttttgcagcagtaaatttgataactcgctgaatgaatcatcaatgcatgcgttagttgcatctacggctgtagtactgtgtttactcctaccctacctaacaattcaacagattcaacccattgaatatctaatggatccgaacagttcttcatatgaattttattcacacgtactacatatactgccgcacacattttggtaaagtctgagttaccgacgcacgcattttacatttctatacctaactagaaaaaactcccgtgcattgcaacggctaaaaatatcttttttcattgatacaaccgctattaggaactaagcgataaattgaaatgttaggatcattatatgtacattataattggaaaagttaataaaaaatgttcctgagtttgggccgaaaacccttctttcctttcttttcagtcccaacctagtccgctacctccctctcatttgactctctccgatccagcccacagtggagctacaggtccagctcgcacagccaactgcactgactctctccgatctagccgactgccctgactctctccgacccaagccctcaagtagagctataggcccagctcgcacattcgactgtcgtagtcttgtgccaatatgccgagccgatcctccccatcaaatcctctggccgatttttttttaataaatcggttgagggtttttgatccactcgatctccttcttccgttttcccgaaatcagaacaaaaggctggccggctatcatcagcgactaagactaaatctagtgaattaaagccgaattaaaaggaaaattgtgagaaaaaaatgatgagggaggaatggggaatcaacttttgcaatcacttggaacaaaaaacgcatgagaatacatattgaagtggcgacggcactaaggtttggttaggcggtggcagcaacgtccaatggatctaatgagataaaataattggctaaaaaagggtatggaaaaaacaatgaaaaaaagcacctaaataaatggagaaaagaaaccgggtgaaaaaaagcaaaaaagaaaagaaaagaaaaaacgaatcggaataagaaaagcagtgaaaaaaagaaacggacaaaaatgatataaagataaaaataaaaaccaactcatgactatcaaaatcccggcaaaaacatctttaatttttataatagtagagaataaagttttttcatccctcggtttctggcttcaattcctaattgttgctgattcgcgtgatacaaattaaatccggacacatgacgcgaattatgacgtcccgcaaataaaacggaaaacaaaaaaaaaggaggaagctagctagcagcctagccaatgcagcggtagcccagcagccagctcacagagcaaaggagcagcagcccagtactgcacgacactgtaccaacgtgtcacggtactgtagcacaaataataccgtttattattcgtgcaaaccagggatcgaagaaaagattatgcaattttatagttaaaagaaagtaaaaaacaatgacatcctccttttgctccttgacatcattggcccatcaaaaaactactctcacaaatcgcattgtatttttttacattattggtccatccaaaatctacccccacaagtcactgtattgtaaaaaaagaaacatgtaatcaccaacaaattgaatcatgtttcctacgcaacgcaagacatcaagatttttttactccgcgttcggttctcaatttcttatgcacctatttttttttctttagaatttttacggtacaatatactctagtaatatataatatccggggacatctcctctgcgagtccctcctaccattgtgccgtcctttgtggcgccgtccgtgtggagctgggtggcgcgcggccctatggccttggacggagcaagctcgtttgttgtgggctccctctcttcattccatgtaggcagtaaggatggtgccgcgagcctgtagagctccgcggatagcatcggcgttttcttagagtccaactggatatccacctacgacggcgacaacgcacgccatgcggtggcttggagcacacaagagaggggcctctgcagggtagggaagcgaatttgagagaaggtggaagtgggagtggtttatggcaacaaaggagcaggatgccgagagaagcttgtcaggagccctagcactctccaacagcggtgctagcagtggtcacctcaaggtgctctgagccctggtgctctcccaaattaagagaatttttacggtacaatatactagtaatatatattaacattataaatgagggcacatttggaattcgctaccaaatttaaaggggtatttagtaattcgtgattcctcttcattccaatcgtcaaatcgatcttagatgcctatcgatctggagcggagagacgacccatggcattgaccgaacgacaaacatcggcggcggtgtgtaggcaacgacgggacggtggggaggccaggtacagcgggaggcgcggctgcggtggtgggcgtgttggccaacaggtgggcggcatagcacgtgccacgtactgctgctggcagcaagcagagcgcataaccatgaggctaagaagctcgcagttgaagccatttgcagctacaatctatgtcgttcgatcatttatactactagtatatatacttgtagtatattgtaccataaaagttctccaaattaaaggtgcagttgagttacttgttgttgcgctgcagaagctcatcggtgatgcgtccgcgctgccctgctcagctcggccctatctctgctgtcaccagccgcacgatgcgtcaccactaccgacaacctcggcccaagacactaccaccaccagctcacccttgccgcttaggtgctagtgaggccttctattttttctatgagatttacatgtgagtcccatgttggataaagactagccaagttgtcaagttagctaaaacgctttctaaatcaccgagggggtatagtttgcaccggttttgatagttgtgggagtcgatatacccagttttacgattgaagtgcacgaattagattcgatcaatagttgaggagtcgaagtacattttcctaaattttagggggggccgtgtacagtaggtatacacagacccatgccaacatgttcaattagctaggtggcatgggcttcattacctagatagatttcgtggatagtgtttggtttgtcgtctcgatcgatcctgtcgccgcttgattaattgcgccccataatgctaacacattctacactcatgtcctctgctttgctaaattatcatcgtaccaacgcgctctaatccctataaagtccagtgttattattacgttgtgtcgcagaccagcacagatcgatagagatatcaaagcatggcacaccatacacgccattgcccatcaaagcattcgaccaagcccatcttttcaataattattcttaattgtctcccaattttgttttgaattccaatatctactacaataattattaattgaacactctgtcacataaatttagagctccactccggtactctctacttgtatagtataaattaatctaagccattgaccatttttcatctaaaggacaagattaatttatactgtcacctttattaacggtagtagaaacgtgagaggatttaatcatcaataaaaatatatagaatgagaggtaaaattgtaatttgtatatcagttgaaaacccttggatggttggaccgtgctggcatgagaaaacggcgtgggggcagactttatctagagtttatttcttcgtccgtattttaatatatgacaccattaattttttttaccaacgtttaaccatttatattatttaaaaaattatgtaattattatttattttattgtgtcttgatttatcatcaaatatttttaagcatgacattttttaagcatgacattgatatttttagggaattgctagacggcagcctactaaaatttttttttgttgtcagctgaattttggtccgttcgatttctgcccaagatgcatgcaaccaacccatctctttcacgtgtccaacgccgcacattttggcccgacccatctgtctctctgtgggctgttccccgtggcccacgcagcacagtatacctagcccaacccacaacatgtgtcattccgacagctacacacgcgccccgtgcactgtttcaaaaaggaaaaagtacacccaaggtccctcaacttgtcatcgagatacaaaatcgtccctaaatcgcaaaaccagataccagacgtccctcaactaacaaaaccgttcactttaggtcccttggtggttttgaccccggttttgtctgacatggcggctgagtcagcgtaggacccacgtgggcctcccatgtcagactatccacgtcagcctcccctcttccccctcctctcccttcctcctctcttcctctctcctacactgctacacacacccagatgagtcgttcggctccgtcgacggcggcggcggtagcgcgtccgcgcgacggcggcggcggccgtagctcgtctgcccaggagcggctccgtcggctgcggcggcggctgtagtgcgtccgtgcgtctccgtcgttgccgccaccgccgccatcggcgacaacctcctggaactggcaccgtcgcgggcaccatagaaggagcggcgggagcggatggggacggcagaggcgacgcgggagaaggtgtcccgacgaaaaatcccaccacgaagctcgccggcctccctcggtggcaacgacacggcggcgaccacgcgggaggaggtcatcgggccgaggcgcgaggaggagggcggagcgacggcggcagttgcgcccgccgcactggcctgccggatgtcccactccccctactgagtcccagctccgccgcctcatcacggacgccgacctctccgcctcctcccaccatccacaaaatctcatttaatgaacgtgaatcatcttttcagttggtagattgcatattttcctcaaaaagtatcatttagaatacaatatcaaactcaagacatcaagaaagtaattaccagccagctctgttagcctttcagcatacatttgggtagaagcctctgtagcaagcatctcctcgcagatttctaccactttatcccactctgtgatgaatgccccaaaaccttcgctcacagacgccaagcagaaacaaacgtcaatcgagcggatgcaagaacctatcccgatccactcaatcgaagcaagaactcccatgaagctggatattttgtttggggggggacaccttgacgccgtggaggagggcggcgttgacccagcacggcagcgggagcgtgacagaggtagtgcgagaagtagacgaagacgtcgatgaggtgccagtgccagagcgcgtaggcgcccgggtcgtcgcccccctgcggcgccgcgtcgtcacggtacccgccccggaagtcgtggcacgcgaggatgtggcgccggggcgggagcggcgcggcccggcgcgaggaggcgagggccggcacggaggcgcggttgaaggggaggtggaagttgccgtcctcggagaggtaggcgcgggatgcgagcaccgcgagtgtggtgatggggtaggagatgggcggcgccggcaaggacgcgtcgaagggcggttcccacagccgccgctcgccgccccccggccgcccggcggccgcgcgcgcctaccagccgccctgcagcgagtgaacgaggagaaaagagagagaggaagggagagagagatatgatgtgcaccctgacatgtggggcctacgtgaggtcccacgctgactcagccgccacatagggtaaaaccgggatcaaaaccactgaaggacctattgtgaccggttttgattagttaagggacgccagatatctggttttgtggtttgaggacgtttttctaactcgatgacaagttcagggaccttcggtgtactttttcctttcaaaaaagaatccacatctttttctcctccgttctcatccgctcattcgagaagagaggcagaagcggagttctcggcgctatcaccgcagcttcgccgcgtcagcgctgctccaccgccgcgaaagatccccttggcagccagctctcccaagcttttctcgcgcgtctcagctgctgccgagggggaggggtgaaagcgggacggggcaaccccggcagccagtgaagcggtgaatttctcggggtcggcgacgggagatggctgctctcaagtttgtccgcaaggtagccacttccgtcagcgagcacccgacgaagtacttcgggcgtggcactgattcggctatggtggttctctctctctggtgggtaaggaccgtaaggtgaccaaccatctctccaacgggcgaggggaccaaccatgtgggggatctcgcagatggacctctgatccatgaactcaggttgaactctgttgacggctgttaagtacaaaattctcgccgtcaatatctgcataaaaccataaaagtaaaacatccaacatagtggtaggatttatttctaactatttccacgagtgttggtgtatatttatatgtaaatgcaacccaccaacgttgagatgaaatgtacatgaagaatataacttccatatccaaccctatggagttttgagcccacaaacccaataagatagatttattttggccaatctctagtagaaaatgtagtgggactcacatgttagaacaccagagaaaaggctgggctggatgggccagccagggttcggccgaatcagcagctagcctaatctagcccaacttcggtatggcggttgtaaccctcatcctatgacggttgtggccgttaataccgatggaaactgtcatcaaaagggacacatggcaaagggagaaggaagatgctctttagattccatggagaatatttcttagcatctccacactcccaagcaagctcacactataaataccactctcatctttcattccaacacacataaaagcttaagctgaattataagaggctctattgtactagattagagatagagtagagtagaagaagtcggattagttccggagttgtccgtaatactcttcttatttttttctgctctgttaattactctgattataatataaatatcttttgggtaatttagttttgcttggtgagaattaccttttggttagatcctaatcagcgtgcgggatcatcgttcactataatttagtaaaatatagtgattgctttagtgagttataaatactatagtagttattaattgcttaaacgcggtgtctaggtagttgatttccggtgtttgctccgtatcccacaataggtttgaggtgggtgtaaaggtggtgatagccctcaagatcacttaagtcctccatgtccgggcacgcagtagagcgatatctgggagcagtgggctggctagtgcccgaagtatcatgttaagattaaactaagctttccgtagatactgtttctaaacggtaaatcctctctatcctttgcctatccttagcttcgtgtccttggatgaacctgacgaggagttgagcacacacgttccctgtggattcgataccttggaatactactgggtggagtgctacatcggtatcttccgtgcgcttgcagattttatctgtgacattaagaaataccaacaaacttgtagtaagccatgagggcaaatcgaccaccaaggtgagcgagtataccttttttttcattttttcaaggcttttcatttgttgtaatttgtgttaattttttttaatttgttttcggaaacattcatctgcgagtcagatctgttaatgtggctaactgatctcgatcgccccagtgcaaaatctaagctgtatttgatttgtgcttagtgttgtgcttagcgcaaaatagttgcgcttagtgttgtctgacaaaaaaattaagcatgtggtgtgatattctcaagttgtaagtatttcagtttctgtttatagcatatgtgaagtatttttttctacccttgcacgtgtggaagtttatgctagctctagaaagtatttcagtataattcagtacatggtggcctgtatggtattcatcagtacatgtgaccataatttgttgttatatgcaaatgttttgtagcatgatcatcgtggaactataacttgtcatgctttgtggtgtatcttttggatttttgtagtatacattttgggccaattgcatatttgccactactttgaatcggtattgtgaatttgccattacaaaaaacataattgcatatttaccaccaaaaatgattggaacccagcatacctaccatcaaactcacaacatagactaacaccgttagaagtttggttttcatgaaagtgaggacaaggatgcccctccacaggaaattgcaatcctaccactggagcatacaacctaataaaatcgtgcagcataagaaaacaaacaacagtggaacaaacattgcaacgaagcatgtggaactgctgtaaaaggttttacaggtggagaatcgatcctataagaaaatgaaaatcagggcttcagaatgaaattgtcgttctaatgttattaatatccagaatcttttctaaatgagcaaatgtttattggacatatatactaccaaaatcaaattctagactaacaactcaaatatcaaggaaataccataacaacttcctctgctgctgttgttggtgtagtctgcccctgttgctgcagccgccgccgccccaagctgcttgttgctgttgctaccggtccgccgccgccgcataatgctgttgtcgcccaagcagcttgttgctgccagctgctgcccaagacgcttcttcaaattggactgccgcagctcccgtcgccaagcagcatgctcgccttgatgccataatcatcaaaatccatctccatgagcttttttactatcaccagctacttcatcgcgaccgatttctaactgatttgctcccgattcgaaggacgagagtatttgggatctagggttcctagagagagtgggggattggttcttctcttctcgcgtgtggtcagattgggagacgggcagtcgggcatggaggggattgaatctagccaagggcaaaaccgacttaccattgatttcttgttttcttgaattatttctatgcccttaattcctccaattcagacgggatggcaaacggaagcaagctggactgactttagtggcaattttgcaattcgtgcttttgtaatggctattccgagttagaggatgaaaacagtggtatatttgcaattctcccatacatttttgggatctccgctatacgtcactcatgaaaaacttgtaggcaattcttgctgcggatgtggcccttgagtttggcgtatcagttatcaagggtgcgatattttcttatgtgttggtttaacacacgaggcaagcaagttcgcccccattatgcatgtttatttgtcactggatacatggatatttgccggtagtcagttttgtttgaattctagttgcagctttgtcagtgcaaattgatgtaaactctgatcacaattgttttgaacctgacaagagatgatatttttcattaagatttgtcaggtacaatagggagaaatgcaaggaagaaccatttttacccgctgaagtctcattaaggactgctgatcatacatatccaccatttgagcaggtattactaataatcttctttatgtgagtctttcacccaacctgaaaaccacaacatgtaatatttgtgatttgttgtaatttatcagttttgtctcaagaaatcatgtcatgtaatatttctagaaatgttttgtgtgaagaagttatgtcgtgccagttttgttcacactctctgagtttgttttttatttttgtctttgtcttttgtctgttctttaaatttaatattaatcaagcttctagtacctaactaattaaagtttactggacttaaagttttttgtcagtttgtttttgtatttttgtcttatttgtctttgtgttcgtctttgtcccttttttaaatttaatattaatcaagccaatttcttagttttgtgaaattttcaggtagcaatgtttgattaggcacttcaagtacttaatacatttcagctagcagtattattcaatggctccttggttcaattcatggattcaaagggccttatgagtttcatgctatagttcaatgactccgtggcccagatcatggattcaaagggatgctatggtccctgcatttttttagtcaacaggttagtcttggcactatcaaacttaactgaacactgtacgatggtagatgttcagaaaccaaaactttctcaaaatgcaggagtgtaactctgctttgttagactaaagtgaaacattgaattaataaagatgcaactctgttatgcagttaaatttatatcatctcccacataataatgcagctcttttccattagctagggtgtaacagctaaagctttgagcatctaagagttgtcatgcaagtagtagtagtagagttcaacccataattaggtagataaatgaatttgtagttctgccagatgctacaaatatcagttaatgcacattggtgtttcagaaatgagcatagttttagaaatggtgtgtttttgtatttgttttgtcaattttttttcagttttgtaaattttgttaaaaaatttaaataattcttggctatagccagctgtgggcaatttgctcacaactgctctcccagccccgcgctctccaagccctatgtgcgccactgctgctgcccatagcttatatcgctaccgactacagtctcgctagtgagattcttcccccgctaaaacctaaaatttttttcttgcacttttatctctggatctcttctttcagtctgtagtacatgtacaagggttatgatgatatgcttgtgatgatgatagtgataatataagggttaattgtttgttttattttttttaagtgtcattgaactaattatcgataatcaacttctgttacaaactcctattaagctactgaaaatctgaaactaacatgacctgtagaaagaacaatccaactcatgtgacactttgctctccagacaactaatggaattagatagtttgcaattttcagttgttttcattgagaactgaacatctcagaggggctgcaggaat

SEQ ID NO: 8385 - DNA, 26130 bp, Oryza sativa
tatataaaactagctgggacccgcgcattgccgcggacatattgaataatcaaatcaaaagttatacgattcttttgctaatcaatgaaatattctttatcattataatatagttaaaaaaaatgtatcaattgttccatgtacatgacctataattgtttatacaaacgaagcattggtgagttcaaatagtagacctgaaggctatcaaaatacaatgtacccaagcaattaactaagagttgttttgttatggatgaaattgagaaagctgcacagggtggcctctacaaaaaattaagctcaaatgcaatgcaagatgcataagtattattatacacagaattttgctcaactacagaatagaaatcaagcaaaacatgaatatatggtatatggctcaggggagcttgaacaaagttggcattttacatctgatggtgcaaatataattttgtcaaaaaaaatcttgtataaaaagataagtaagaataactaatcaggttgtctggtttaaaaagaactaaaatagtaataggaggatctctagtatagaagcccggtgaaggagatgtaacaatatattactgtaataccttcaaaggcctcggtaacaataattgtacacagcacccaacgaaagatccttgtgtgtcatgatatgatactctgcatggagattgaaggtcacatcaatacatctgcatttgcagagacatgaaaagcagcagcgcacagattaaatcatactccctccgtcccataatataagggattttgagtttttcttataatgtttaaccactcgtcttatttaaaattttttgaaattattatttattttaattgtgacttactttattatctacagtactataagcacaacttttcgttttttatatttgtaaaaaaaaattgaataagacgagtgatcaaatgttacaagcaaaaactcaaaatcccttatattgtgggacggagggagtagaagttagcagttgaggataaccatatgaagaatctcaaggacataatagattcacattttactgatagtatcttacccatcgcaattatcaagcagcgaggtacactgttaaactgaagctattgtcctaggcataacaatgtaaatatgagagaggaaaaaaggcacgcgatgaatttgaagtcatcattcttgaaggatatctcagggaatgtgctaggatcagaagaaaacaatcatgaacacatccactgcatagttgtttagcagagaaggtgcatacatcgttggataaaaatgcttcctgaattgagagaaaaatttcatgaccaaatcaacgtaatacatagcataacttggcttcaatgtgatatgagtatactgcaagcaacaaagagataacaccaacaaactttgtgctggcctataatacctgcaatagccatctttaagtgctctagaactgaaccatttgggacaaaatattatacagttaatagctgccatatcctttaaggcctgactcttatgtaactgaacgtgatgagaaatctaaaattaagtgacagcagtgtgtagttttgagtacttaactaataatgcataccgacgggctaagtccatcaagcatttcatcaagtatatgacatacacaaacatatatagtagacgagtgtatggttaatttaccttctatttcaaagagttgtaggcaatcaatttgaaacaatgattgagatcaaccatcttacctataagactgtaaagaaaatcaaatgaagctactgaagaattctgaaaatctgcaaatataattaaacaaaaggagaagagcacaacgtaccttggttctattaaactgagctgctcacaaagtcactgcaccatatatatcaaaacacagctgcaatggagtagaaggtgcatctaagcttatggcatggctataagaaaaatagctttcaagttatacaacgcagcagcaggccagtgaatctgacatactttggtcaagataagacaccacccaacattaaatttacattgtaaaccgtccatgaattttcctgtggatgaaacaatggccatggaaatcatctgttgtagagtaaacgatggcgaaaccaaccaattgacaacaaaatgaatagagtcagaccagataaagcgctgttgcggatgaaaatgcagatctgcaaggaaaagaatcaaatattagatattaatgcctaaaattaatgatgcttcagcagcagagaagtggcaaaactttatcctggacagggagcagttggaatagtgcaggcacgcatcggaatcaacatttatggcctaatccagagagaagataacagaggcatagaagcttacctatatccgcttgctggagctgactgtcccgtggaaggcaatgacggcagtggccggaacacacttactctactccgtactgaaaccctaaagaggagctcatgctccatggaacacgcgtggtggcggatgagcggaggcccgggaattcagacaactcgatgagaggcctaccggagcaccgctcccctgtactgaccacggcgaatcgatggatttgggggtcaatgtactgtggtggtattccatctagaagagaaaaaaatcccctaacaaacaaccaataacggctaacctaaaatacatttacagttcaacgtggagatgtacaggaaaaggtggtgcaaattcaatacctgagtggtcttgctgcttccggtttctccgacgaggatgagggtctggttgtcacggaggacggcgaggaaatcgtccttctgctgccacacggggagcgtgcggtgcttctagaggatctcgaggtaccttgccgagtagggcctccccgtccaccaattgatggacgggttggccgcggcggtggcggtgctgttggtggtgccggcgtggccgagcttggtagagacggagctctcatcgaccacgtcgaagaggctcaccatgcgcttccgctccgtccccatcacggctgcggcagcggcgaagcgggggtcgggtcggttcgcgcggtaaggaggaggaggcgggcgggggaggtgaaaccctagctcggttcccctctcgccccaatgcagcgatgcgtgggggaattgcgcagccgtgcgggatgggatccatcgatctgtttggtgggatgtggggccagcgaagcgacgcatacgatagaggaaggaagcatcgcggcttcgcccgccacaaggagacgacggacggatggatccaatcgagaggagcagatcgagcggcgcagaagcaaacaggaactgttgccctgtagcaacccaagacgcgctgagattcatcggcggactggttaaaaaactaaggatttgatatgatgtacgtgcacgcatgtgtgagtagctcaagagtttatcaaagcccgagtacgtgacttcaatttgaacagaattcatttgaagagctgttcgcctgttctggtatgtagatttgggtatttactactagaaaaaagatttttcatagcgttattctatcattttcgctgacggtcatacgagaaaactgctagcaaaaacgtaacaagaggtggagggctacggaccgccagtgaaaacagatttttgctggcggccgagttaagcgggccactagcgaagatgttgctattttccctgatgccgccaccgaaaatcagattaaagagcaccacggcgaaaaatccaccgcccacctattaaaatccgcgcccaccaatatattccacgtgcttctccgcctctctccctcctctctccgcctccacccaccgttctccctcctttctatgactctccatccggccgctggccaggccttgggagctgcgacgacgaagctcatggcgcacagtggcttggtcgacgggcggagcaccggcgacggcgactcgcggggcggcagatgcggcggcggtgactcgcggggcggcgaacaggggcggaggtaccttggttcctgggtattcccgggaatacctaaaatttttttatcaaaaaataagtatacttttaatatatacacatgtacacatattagtgcacctaaatcctcaactcttcgatccaaacacggcccaactggcctcttgcattgcctcctaccaacctgatccactccgtcatgacccatcagacatcagttgacctacttagccaccactcttccagacgacgccctctcgctctccctccgtgacctatccctccctggctcggctccctcgcgccgctccccatttgcaaaccctaggcggcggcgcggcgaggctaggtggcaaccggcggcgggagctagaccgtgctaccatggagggggagaccattgccgccgccgctggaggccagcacccgacactctgccaagctcaggcggtcaggctggttgggtggccggcggccacgaggggcagggatggccagcggtttagcacttagacagaaatacccaactttaaaatcttggctccgccactggcggcgaatgccacttttaagctctgtttttatttgtactatgtttttttttaaagctgatgatacatctattttatttgctgatagctaatgtcactttttgacccagttaactctcttgcccgtggcaacgcgcgggccgccaatagtatatagagatattatgcatatgcttgcgtgcataagctagctgactcgatcgtgcgcgttaactattgatcgatccatcaaccggtcgatatcaagctgtacctacgtacatgcaaattaactaattaatcacctagctagctatatatatagattccatgaataatgcttgtgcgtgtgcgcatgtgtgtgtctatatatatatatatatatatatatatatatatatatatatatatatatatgcatctaattaataataatctctcgctctgtctctctctttctttcggagatagcatgcatccgttgttaactggtactttatcctcctcatgcatccacatgcatgcatgtgaccaataaaagaattgcacagcaagtaagagaattaatcaatatatgtgaatatgtctgtgtagctgcgctgtacgtacctacatgcaaattaatcacttcacttagcttccatgaatatacatgtgcacgcatatgcatctaaataatgtcatctatatatatacggatctttaaaggagttttcttcacatgatcagtgttaactttcagtttccaccactactaaaataaacatatctacagtttggcactatcggtgttggaaatactaaaccggtacctataatgcttttcccgctccaaacgcgcatccatgggacaccatcggcctgaactggcaccttgctgaagacacatgtgccggttcgacaagtatcagttttttaaaagaatcgacacctataatatattataggtcctagtttattatcatccgagatgtgccaggaagatctagcatcaagttttggaatgacggacaatggtgaagtcagatctaagtatgaggggaccaacttaatttacaagtaattacactaagaaaaaatattataaaatgttacgaaaatagatgcacaacggaaacacaaattttacgtggaaaacccttgcggaaaaaaactacggacgccgaccggcaacgatcaatgtagaggagtttgatacaacgtgggggatacattgggctgttacactctcgccgtgtggcttacaagggacacaagggtggatctgaatgggggccttggccctacaccgaaggggggcaaaagaccccttacatttctttttcactttcatagtgtacctgtgcagtagacaccccttactccacctctcattctactcgttgtttctgctcgtttgtatatataagtaactactagttgatacctcgcactttgttgcaagatatgtgaatgaatgcatgttatacaatatagaaatggtagatgtatatattttaataatgtgaaaataatatggagataatgatttgacactttttgcatattgatttcttaaaatacaacaaaattataaatgatatggcatatttgcataatatttaaaaatactctagataatagttgttagtgagtgatgatgtgacacacttgtatgtgatttaaaatactctagataataatttctagggagtgatgatgcaacacacttatatattgagttttaagagttagtggatgtcaactttacactaagatatgataagtagaagtaattatatatcaattcactgttagaagccaatgttatccagcacttatgtgaggaagcacaaggcagttggtaagggccggagaaagaccagcacgctaccttaaagcaggtcatgactgcttcaaccaggcaatctagcttggtgatcaggaccagaaacaggaccgtccatgtgtgagctctgcgacttatgaaaaataaggaagaagaagaagttaggagcctagaaattgctccctctatcctagaaaaaaccaaactcgcactaggacgtgtcactactacaataaatttaaacatagagacatcttagtacgaggttggcttttatcgagacatgatatctagatcagatccccccttccccaaaaaaaaaatttactatttctgcttcacttaatcgggttgaacaaattattttttctcaactccgacaagtgttcgatggcaattataactacatccaagatctgtattacgttataacgaagcgagtatgcaatctaggtggtatgattctattttttttatttggttagaagaaaatgaattgttgcaatgattcttattctacttattcacaatgtcactacatatgttggtgagcttatttaatagtatagctctaagttgtcgttagttgcgaacgggtttttacttgttagataacataacataactaaagaaagaagtattagattgttgcgtacttccattgcatagttggaaggcaaaaaagattaagaaaaatgtagtggtattagagacccgtcctaatgcaatataaattatatataaccctgatctgtcatattgtcagtattttcaaaaagataggattttattttatatttcggaaatggacttaaattgttagggatggcccaaagatgatggatcaagtaacgccaattctttctgcagcaacaggctgccgtatttttacctcctgtcgctgccgatgccactggtgcgcactgcgcagctgatggccagcatcatcttgatctactagtgcgaagacgacgagactgcagctgaacgagccatgtctatcgtgtgttatacaacttattacaatgcaaggactgaactgtgtgcttttcagtccttgttagctagcttgtgctcttcggtagggcacccacaatggattcttaagccctctaagatacatatacattatgaatgaagatggtccttaattaattatatatgtcttttggatgagctactatatatcaacaataaagaccaaccacacaagcaacaaaacatgcagtgttcatctctattcccatagacgactctccttaatttctctctccaacgtagttgcttgccgccatggatgcatggatagggaatgagggcacctgcattgagcgtcgctaattctggccgcgagatgatgccgccactgtcgccggggcctcctcctctcgcgagcaccgctgctgtcgtgcggcctcctactacgagtggcgccgatgccaccatggcctcccgcgagccaccaccactgtcagagtctcctagatatcatatattcccgttcccataatcacatgctatcctttcctttccaaattccaactcactacaataaaagtgtaaaagtgtcttgtaaagacactttggtttaggtatcatgtactatgcctcgaaaaaccacttgagtggagtctaacggcattcattagaggtatttaataaactatcaaataaatagaatcttaagacatttattatctacatgtctagagacatgttactagttcattataaaacgcctctacacctatagatacatattgtaattgcatcaaaatagtgcccctacatttctttagacaaattgcagtgcctctatggaaatataataccacatatcttgtagagacattttacatattgccattataatcattgaggcaatttagatagtgtctctatagctaactagcgcaagaaaaaaaaagtgcctctacaaaccaattatgtcgcagtgactgcagcccaagccccatatgttactttttctgaacctatttttaccgttccaatcatctcctatttgatcgcaaccaagtagtgctccacctctggccctctgctaccatcctgcagtgagtgaggagagagctagaggcgagccaactgtgattggttgctcgctttgctttttttagcccaggatggctggataatgcagcagccagctagctgcacaccagcaaccatactcgatctctctcaaatatatacttccttcgtttcacgtaagatgttttaatttttggtcaaagtcaaactgcttcaaatttaactaagtttatagacaaatataataatatttatattaccaaattagtttaattaaattaataattaaatatatttttattataaatttatcttaggtcgaaaatattactattttacttgatcaaacttgaagtaaacatcagtacatctctttatatacgtcctttattactccctctcttccataatataaggattttgagttttgtttacattgtttgatcactcgtcttattcaaaaaatttgtacatatataaaaaacgaaaagttgtgcttaaagtattttggataataaagtaagtcaaaataaataaataataattctattttttttaataagacgagtggtcaaacagtgtaagtaaaaaactcaaaatcttatattatgagacggagggagtatctctctatttttcatggaaaaaagggcgacaactttcttttccacggaaagaaacacgccactctgaacgggatttttccaatacgagaggaccatatatatcgaaaaatgagggccgtgagggaatgcgttaagcccagtaccacaaggcccacctagaaacccaggcagttaattgcgctttgagtttttttttcttcccttttgcaaaagagagaagtgatccaaatttaaaggtatactaccaaaatgcatgtgccttgcattgagtgaagccaaaaagagtagtagtgagtgtgtggggagtataaagccaccaagtttaattgagttccttataagcaaatagaatcttcccggtgtaagaaagacgctcacatgatgtaattattttttctctaaatccattggcatgggtgattataagaaaactattaataccaccttaaaatgaaattatgtattacagactaaagtttgaaaccataatatgtacttttgtcatgtattattagagtcgattgcaatgcatggttattttttgagtaaattccctatgtacccctaaaaactcactcaactctttcatacccccgaaatttacccgattccttctatactcctgaaatttcaacatgattcattccatgcccctaccgttatattttctttcatttcactattacatttggttgcaaatgtctttttgcctttgatgctttaagtttgaatataagcttgaaaaataattgaaaattttgtttgagtgcacagtatgtgcattttatgaaactaataagactaaataattagtgcagaaaattttgacataaattttgaaaataaaacaaatgtaataaattaaaaaaatttatttgaaattttaataggacaatggattttttttatcgggagcattcaaaaaaaattattttcagcattggtagtcatatctttgtatggatgctcctaattttttatgaatttttttaaaaaataaatacatttttttatttcattatctaaagataaattttgtggtagataatgcatcacataacaaactcataactataatagtctcatgcaataaacttttatatttttaataatgtagttcataaatttatatgttcatccaaggagtaaaatggtcatttttatagaaattagatggtcaactgacgagagagataaggaagggatccgaatcatatttagggggtatacaaggaagtaagtaaaattcagggacatataagggattagctaaaattttaggggtatataagggattttctcttatttttttagtacttgatgttgataaaaaaattatatttttcatattgtaaagagtagccttagtagaataaatgttttgggctatatatcggatcaagctcactgcactccaatctagaattgatttcactctaaaaaaatcagaaagaaatcatacagtgaatggaaagaaagaaaaggaagtgatgtggtgtcctgttgagaaattgagagaaccgattgcgaaggaaaaaaatgagaactttttggtacaatatactgtaagtatatactagcagtataaatcatcgaacgatatagattgtagctgcaatggcttcaacggcgagcttcttagcctcatggctatgcgctcagctcgctgccagcagcagcacgtgctatgccgcccacctgttggccaacacgcccaccaccgcagccgcgcctcctgttgtacctggcctccctactatgccgtcgttgcctacacaccgtcaccgatgtttatcgttcagtcaatgccatgggtcgtctctccgctccggattgatagggatgacgttatctttgtcgggcctaagtgaaaacccgccaccaacaacattcatcggtgacgggcctaatagttatctcaatcaggtctcaagttggagctcgtcacggatgatggacatcggtgacaggtttctgttagggctcggtcaagatatcatcggttatctttgttgggcctgaagttagggcccgttactgataggtgtcattcgtgatgagctcgatttttatgcacatctaatatgtctgtgcgagtatatttttatcagcctctttttagatccgtttgagatgactttgttgtgacggactgtaaaacccaggcatgtgaggggccgtcatagatgagaggatctgtactagtgatgcatgcatgtacattttacgttggttatgttctgtccctagaaattcggagaccatgtgcgagccttaaatttatgtgacaaaatgttcaattgaaaattaattcagtagatattggactgcaaaacaaaattggtagacaagaataattattgaaaagatgggcttggtagaatgcttgatgggcaatggcgtgtatggtgtgccatgctttgatctgtgctggattgcgacacaacttataagtcgaaaagtctaattctaaacaaccaaacaactttttcttttcttttttaagtcatatataagtcactataacaataataagccgaaaactagatcaaagaagctttttttgtcttatgtaaagaagatatatgacttcatcactaaacttaaaatattaaatccaccgacttataaatcatacaagctaataaattgacttaaaagtctaaaccaataaccctcggggggcaaagtccgagagggattagagcgcattggcacacgcgatgattatttagcaagcagtggacatgaatgtagaatgtgttagcattatagggggcaattaataaagcggcaactggatcgatcgagacgacaaaccaaacactatccacgaaatctatcagggtgatatcgatgaagctcacctagctaattgaacatgttggcatggcgtgtatatacctaactgtacacggggccccatagaatttaggaaaatgtatactttgactcctcaactattgatcaaatctaattcgtacactttaacgtaaaactggatatgttgactcccacaacaatcaaaaccggtgcaaactatacgcctcggtaatttagaaagcggtttggcttatatgataacttggctagtatttatccaacatgggacccacatgtaaatctcatagaaaaaatagaaggcctcgctagcacctaagcgacgagggtgagctagcggtggtagtgtcttgggctgaggtggttggtagcggtgacacaccgtgtggctggcaactgccaagataggcccgagctgagcaggcagcgctgaggcatcaccggcgagcttctacggcagaacttcaagtaactcgaccacacctttaatttgggacagcgcctgggcttagagcatcttgaccactactagcactgctgttggcgagtgctagggctcttgatgagcttctctcggcatctgctctcttgctgccatgaaccacccccacttcccccttctcctctccaattcgctccccctgcagaagcccctctctcgcgtgctccaagccaccgcatggcgcgcattgtcatcgtcgtaggtggatctccagttggactctaagaaaacgccggtgctatccatcgagctctacaggctcgcggtgccgtgcgccatagggaaggaggagagggaactacaacaaatgagcttgctccgtccaaggccatagggcggcgcaccacccagctcctcactggacggcgccaaaagaataacagtgttgctactcccaacgttgactgagacatgtgaatgggataaattagaagaaaaattatgtttggcagcaggtatacagaaatagctaacttttatggtttataagaaaaaaaaaggaaacttatgatagcagataatgacttctaatgtaaacaagatatacatcgaacattagatgatgatggatggcttggatgtctactcgctgattgcgaagttgtacatttggagtcttacatgtttcaaaagactcacgtggctatgaaattaacagtattataacttactcgatcattctctttttaatatcctgttttggttgccaaaacatacatattgtccttattgtttaatatcattactaaatactactgtaacgttagtacggataaattactagtcatacactagtacaataacttggctagtacgtgcgaacttttgtcaaaaccttccatgcaggaaaaaattatctaacatggcatggcacacactgatgtataattattattaaccatcaaatttttcagtgacaaaatatgtaattattacttttagtatgtttctgagatatagacaaaagaaaaagcaatacagtttaaaatatcttattataaaaatagctttttttaaaaaaaaatctcaacgaatgatcccttgtcccttttcttcttactataacctcgtgtatactttaataccaatttgatcctaatactctactaatatcgttgtcaggtataatcttcgataacattatagattggttttgcttgcacgggtagtttttttttttctgcttgcatggatagtttgggcccaggtacggaataagcaacttgcatccactcttagttcatgtataccatgagcttaatttaaattaattaaacattactatatattttcttccacaccgaactgtttattatttcacattttaagagatttttttattacacggtaagcacatacgtgggcacacttctacacatgcacaccacactcactcacccgtgagtacgtacgctaacacatgcttacaattccgattgaaaacccatttacgtgtgtatatagtgtttttgagtaaatactgatgggtaaagtaatgcacccatccacgacttcaccatttgctccaactgtggctattttgccattcaaatattaagttagtatgtatgtaattcatgtacttacagaagcgctatacaatttattgatagttgaatgctacttaaaaactaatattatgggacgaaggtaataattaaactgtcctcgaaggcaccaataaaactacagcaacacaagtactatggttagcatccatgtaagattgctaacaatccatatagataaatacagttgtgaacatttggaacacgatttcatcaaactttaaaaaaaaaaacagtagatgaacaaccttactaggaacattacatcatttgattttatttagtttgaggtagataaatacaatgaacacaactttgggtaacacacaccaaaccactacaaccagaagctcaatacccaccatataattagcacaaaacaaagtaattaattagggcagcatgagatccacgggcttatcaaagatccagctaaatggaatggccgtgggccttttcctcatctgggccgctctgtcatgggccttctcctccatcctccggatcttctgcggcagcgcgcacacgtagtcccgcgcgcgccgcccctcgccggagagccccgcctccagctccgccacgcgccaccgccgtatcaggtgctcgaggattccccggtagtccgacgcggtgtacgtcccggcctgctgcgccgccgcggcgtagtgggcgaacaggtcggcgtcgcggccgtcgtccatgagcgcggcgggcatggtgatccggcggcgcatcatgtacgccagcgcgcgcacggtggtgtccgggtcggcctcgaggagcctctcgacgacgcgggtgtaggcggcctcatgacgcttctcgtcggaggcgatggcgccgcagatgcgggcgagcgcgtcgtcgccgtgggcgcggacgttgcgcgccgtgttgccgtgggagatggcggtggcgcgctcctggaacgcgacgtagatgaagccgtggtaggggctcgccggcgcgtgcatcgccatgccggagccgatcagccggtgcaccgtgcgctccacctggcgcatgtcgaggcggccggagaggtacatgtagcggttgagcacgtcgccgtggcggttctcctcggcggaccacccgcggatccaccgcgcccacgccgtcgcgtcggcgccggtgacgtcgcgcgccgactcgaaccggttcgccatgctctggtacgtggggagcgcctcctccgtcaccatgttccccaccaggcacaccaggtgcgcgtcgggcacgccggcggcgcgcccccggagctcgacgcacgccgcgtggaacccgtcggcgccgagcgccgccgcgtcgggcaccaggtccgccggctgccacgcctcctccgccggcttcagcagcggcagcacgtgcgcctccacccacggctccatctgctccagcacctcaagcctcgccggcgccaggcacctcctcacctcgtccgcctcctccgcctccgcctcccgccgtgacgtcgccaccgccgccgccgccgcgctccgcctgcaccgacactgccacgtcagcacacgtacagagagctcagcgaccagtggcggttaaaagcttaccagaatcggagagtggcagttgccggcggcttgaggtgacagttgcggtttggatacccaaacatggttactgctaaggtggaggtcgttgccgatgccgccatgatcgagcagtacgtggatctgatcggaggagggaggaagacgacggcgatggcgacggcggcggcggcggcggcggcggcgagaaggcttggaatatgagtggatgcgactacttagcgagctacccttgcagatgtacgtgtgggtatatatatgctacgatcgatgtgtgtagagcttgtgttaatttgattaattaattaattatatatactgttgcttaattaaaatgttttaattggttggtggctgctagctagctgactgcatgcctggctcgcggtatcgtgcgatgaccgtttttgcatgcagaatctgtaccttaaataagtatagtattaactaaatcaaatttagattacaaatatgttaaaagaatattatgcccttccttaaggaacagaagaaagtatttattcaattaccaaaaatgaggaaaaaatacaataatattggaaaagtatacgtaccgtcgactactctaaaactacactattttagcaatgaaattttaaagtaaagctgcaattttttaggtagggaattctagtgttgaaagttcaggttatatttttcttccgtttcgggagctaggatgctcggctaacatttggaaacgtggggttaaggttaccatccaaattaaggttttccaagaaggttaactattagtagcatcgacgtcaaattaatcaaccgggtcaaatccttggcgtacgtcttattcgagctttttttttatttagtgtgtactataagccaaattaaagagacatgtgcatgactcaattaattaagcaaccaaaaataacttttagctagggaaaaaaaaccatgccacgttgaaccaaccaggtgcaaaacggtatagattatcacccagcttaaaattgaaaagctgtattaatcaagcaccatatagaaacataatgttgatactcgtgattcgcccatgatactcaatgatactcctacatttttatatgatatcgatgatggatagaaatagcttacatgcatgatatcttgaggtctaattgtagtaccttagagatactcgaattaaatttaaaaatatactgttcattcaattttttttgaaatattcgggatgtaaattttttttaagaaatatattgtcaatctcgcgtaaccgttgcgcaaaaaaaacatgatgtcatgggcgatatcgcgcgaagaaagtgcgagaccgcgcggcaacggcatgagaccacgcgatctcgtggaatggaagagggagaccgaacggtaaccaatcagcgacaccgtcccaacggcttcatttgattagtgattaattacctaattaactattaactaataataaatagtgattaattatcttgattagcgattattaattaatcaataattaataactaattaaccattttgaaatccagtatcgctctctggctcaatgagaccattcggtttcgctcttccgttccacgagatagcgcacggtcttgcactttcccagtgcgataccgcccacgatgtcacgcccacatcatttttgtgcaacggttatgcgagatcgacgatatatttgtgcaaaaaaaatttgcatcctaaatattactgaaaaaaaattgaatgtacggtagatttttagatttaattaagagatactctttgatgtacgttgttactcgtgattcatccctgatacccaacaatactttttttataatggatactgagaagacttttaagtgaaactagctaaatgcttgtgctttgttgtggctaaaaaaatcatattattatctaaaataaataaaatcatatcttttcctaaaatatgtttcctacctttttattatagagaatactcacttttgtttaattttatatgtagttgtccatttggatttaattattattcaatatatcctaaaatataaggcacaaacatcattaacataaggattaagaaataattattaccacttacttgtttcaatcactcaatagatacaatgtatgcatccaatggaattggagatgttgagggtggaggatatttaaaaaccgaatttaagaaagaggaaagtactaattaattccatgcatgtatacacgccttatattataaaactattaagaaactacgggtgatctcatccacccaaggaaataggaccaacggttgctaatctaaccgatagagaagaggagatcgcccctctctctccctttggcgtccctctcgacaaccgatgcgatgttcccaaacatcgcatcccctgcggttggcaccgcttcacattgtataaatgtactgttgatcaatgagaaaatcatccattcgctctattgtgttcaattctctctctcgctcaatctctctcgctccaatcaattcatccactttcaacacgttagtcgtgccttatattttagcatgaagagagtatgtcatattaataagtttaagagataatatttaaaaactgtaatagtaacatgtgggctggcagattcactgccaacatcattagagtccttttaaggaagtataaatcaatgatacattaaagaatcatatactacctcagtctcaaaatggattttgacaatatatcgataaaatcctttaaagtcagagatatcattgtagtatccttgactttcggaatgcaattctaaagatagcataaataagtgatagagaattttttttttgtttgcaagggacaaaagagttcattgatcagaagataaatccttccccataggatgtgagatgaggttataagagttaccacatcaaaattctgagcttgcttcacaatgagcataatttgcaggctcgtagagagttgcaaacatgacaaactttttttttccttagaaagcgtggcacgccatatatatttttcgtggccgaaatttagcgttaatttacatgaattgttgagttgtattttccatatctgaatgatcgtatagctgctaaacgtaataaatcttcctttttttcccgaataattgacactgttccaactgaatcttggtccttcagagatattggttccccggcctatctctgtttagccatgtgttactaccaaaaaatcagtcataaatgctacatgtgcagtcaaaagtgacgatatttagaccagttgctcgagacgtgccctaacattaccacaaaattaaccaaacacatcgtaagtttactacagacacatctgacgagtttgtttcgcaatgaattctctgacagcaatacagcatgtagcagtcattcaggcccggccagctactgcaaggcaatgaatttgcaatcaaccggtggatgtagcttcagtagaacatgtcgcatagacgtactccaaaataaataaatctaaaacaaacataggatataacctaatacaacgaatctaaataaatcaaaataaacaaatctaaaatataatgttatataatcattacaataaatttgaacactcgttgtactagattatctctcatctcatcctgggtttgtttatttcgggatataatgcatggagtatagttgctgactcccactgtccataaatataaatgaataaatggactctagtactatattttcaattcattcaatcattatatatatttagtatttactagtagccatgggcggatccaacgtgggtgcagggagactcaagtcccctctacacccacaagacctatggatacccccgaaacacccctttcaattttttcaccatgaatgataaactaaaggtccctaaatggctagatattgaagaaactgtgtaaatgagccccctcaattttttttattcctggatccgctactgttggtagcagcattgttagacgtgatttttctcaatttaggaaccaagggagtacattgatacgcaggcgcagggctgcagaaacacagcagcagcagtaggcaggcaggcaggggcaataaaatcacagcttaattttagggaaacagttgtgtgagcagctatgcatgccacctgaatgctcgtgaaaatatcggcgactgcatgttcaatgctatctcatgaaaaatatcggccaatgcatgttcagtttaatgttgttctgagtcatttctgtgtacattgggagagagagaaagagagatacatgttcattggtctgctgaagaagaaatggcagagaggtggatagggtgtcatagaggagtaactgcatgctgaaacagaattttgtgtgggtcctaaaagaaatgctatgatcatttacatggcatctcaaaaatatctgtgttcctttaaaaaaatttatccatgttactgctcttccctgaggagtaatgggatgcagggatgggatggagagcctgaggagaaatttatccatatttttcaatttgacaaatttgggttaaattttactatttcaaatttgaactattgaaaactattcgaaaatttcagttagaatctaatttcgtcccgcatcgatcgaaatatcaaaatttcattgtttttttattggttttcataaaaaatgtaagccctagattttatcgaatggtggctctcttaccagatttttattcaggacacaatgggtcttatgaaaatctttctatatttggagaaattaaaaataaatgttcttattttctggaattcaatgcctaagtgtacgtaagggtatggtttcattcttttagatatgaatagtaatatgtttatatgttttaataggtcagaaccatataattagaagagatgtacgtgatcgaggataaaatattggatccagtggttacttgtgcgaaacgtacgaaagtgctacgcacggtgggaggagcagatggaaggagcacaactctgaatttaaagatggtagagatattctcatgtatacatgtaggatgaatgagaataatgcaaaccattattatggtttgatatgtaaaaatgatatatgagtagatttttcattaaaaatgcttcatatagttacattttcaacgatttctataaatatattattagaaaaaataacgaaaaagaacaaagttagtagtttgccttttatgttgtttactcataaaattatttactttctaaagaaatagtatatataatttacaagtctgtatcttttttaaagaggagctaaatctttcgtgacagatgtttaataatgttttcacggtataatcacgtgagtagaatctctagaggttgacttgagaacgtaaaacatgcatgccatcttttttaaaaaaaactaattattattcagtccccatgacttatctacctgtgacaaacaaatcttggcacagagatgacaaacaggaagatctagtcgcataaaattattgctacagaaaccgtgcccacattatggaggcgaaggtgatattattttgatgctgatcctcattgatcagatattctagctgggggggtccttgagtatggccgtggcagtacagatcaaagaccacaatatgtggcattaaagatgtggaaccccgtgatttgagagagagagagagtgaaggaaagcgccgaaagcaccattagcatggttggagacaacaagaagctttgcctaggttgtgtttgcaggaggtatctgaaaactactggtcttatcttttcgcttatgattatatttttcagctaaaatttaaattttcaaccttaaatttagagttttttcatcaaaatttatttttcaaacattgattttagatcactaagaacacatatataaaatttttatttataaattatttttcatttgcaaatatattgtttggcttattccacgaataagctggggtcgtacaacttatttcagaattttcatcttcccaaataatcagtggcaggcccggctcagttcataggtatccatatgaatatccataatttttagtaaaagtaatatgtatatacaatgtgtaatgcgtatgtatacgaaaaatataaaaaagatgctacattcaacacataatatgcatgctatatattattataccatcagtactttgtggtattataactgctaaatattagggtttttttaaattaccctaccacattttttaatacacaactaaattatgggcccgctcctgcaaacagtttagattattgcctaaatttgaagaactgtagttatactattgagaaaataaactcgaaactaaaagttgaagctcagtttttccaaattgttaataactatagctacatacttacaagctatgtttagaatcttaagcttcacaaacagggttatatattggatggaagggagagggcctactagtttattactccctctatcccataaaaaacgaatctagtaccggatgtaacatattctaatatatgtttagattcgtagtattaggatatgtcacatcggatactatgttgattttttatgggacggagggagtacgttggagcaacactaacttaaacactgctttgtgtgaaaaggtgtattatttgagtagttgcagactgatatgcatatggagttgtttatgaataaactattggtcaagaaggctccaacaaggatgtctagttgtctagcaaattaagtattgttagttactgttccaaatttccagtagagatggcaatacaaacgatttgggcgcattaatcactaatatttttgtactttgtcaaatgtagccatcaccggtggagaaaccatctttggtcggtcggctaaaatccacaatagtcccggttgcaataaaaaccaggactaaagattcaaaagattagagctacttttttatctttagtccagatctatttctagtcccggttggtaacaccaaccggaataaaagatcggcatgcgcggcggagagtacgaggcgtgcacgagatcgaggaggaggagacgggatcagttaataaattctatctccttctccctgaccttatctcttcctcttcctcctcctcctctcctttaactcctctcctccttcctccctcccccatcatccccacttatgatctgcagcgcgaaggcccgggcggccggcggcctcgcggcctcgcagcggcgcggcggcacggcagcgtgatggcgggcagcgcggcggcgggcggagggcggagggccgggcggccacgtggcgggtggcgcggcagcggtagccacagcgagctttttttcctttttttttgagaatttgtgattcggatctgtatatttgatttgtgtgtgatgtgaatatgtgataaattttgtagaagttgtgatgcaattttttttaagattttgtgatgtatttggatatgatcgatttggggatttgaggatttggggataatttatttgggattttgggatggggactgagtgaaatcaatatattaaaaacaatgaagaaaaaaaataatggagcaaccggatctagctagactagctctatctttaatcccggtttgtgttaccaaccgggaataaaaattctctatctttagtcccggttggtaacagcaactaggactaaaaatctatttttactcccggttaattcaccgggactaaagatagcgatctttaatcttggattcgtagtcccggttggaaaaccgggaatacaaagggttacgaaccaggactaaaaaacacttctccaccggtgcatgtataactgtgttaatcaaagttaacggctagtttgaaaaaaaaaagtgatgtacttcatgtgggtacttaattaacgatgtaatttgacactgctccttattttttatgtgagatttgctaaaataatactagatagtacttttcgtacatccaaaatgcaaaggattccttttatttacggaggtaataaattaatatgaaatggagggagagttagaagtaatatattatgcagtctaaaacgtgggatcgtgattattgtgaataaaaaaataaataaataaagtggttacaagttgtgaagctagctcgtgtgtgtgaataagatttttaattaatacttgtacagccactagttgagttgtttgacctgtacattcatcaattctgcagcctaatcttcgatcccaatgtacaagcatgggtagtacgccagctgcaatgggcacgttgtcacattgatgccagctgatgtcttcatgggcatgaagaattaatttcgagatcctgattggaccttgaatgatttcaatgaaaaatagtactccactacgatactcctccatccaaaaatactactccacgcgttgtcgtagaaatttagcagtactaagtaaaaataatgagtaatatatatatatatatatatatatatatatatatatatatatatatatatgtatatatgtgtatgtatgtatgtatgtatgtatgtatgtatgtatgtatgtatgtatgtatgtatgtatggtaaatttgtttggtgtttcatggtgctcgggctccatgatttaaattgagtatatactcaattcaaatgagtatgaaatttttttaaatgtttaggtataacatttactaactagttcaaaacaagtttgaactgaatttaaacatgtttttgtcagattttaattctaggtatatagcatccaaacatataattagttaggtatgtaatattggattgtgaaataaagttaaatttgagttgttttgttgctaggtataggtatgaatcgaatacttataactaggtatatgctcacaatttaaaaattttaaaatatttgggcgaatttgtgtatttcattccatggtgcccgggcaccggcaccatggtgcctcatatgagtgtcctgtatgtatgtgtatacacacacacactcacgtaagttgatgtggtttatgataatttaaatttaaatagtatataaaatgattattgaaatgtaaaagtaagttgacgtgactttatgagaaaagaaaataagagagatagtttggatcatagattaatcatctaagggataaaaaatggaggtgatatgacttaataagaaaaaggagggagataatttggatcatagataattatctaataacaaaacaattgatgtgatttggcttaatgagagaagagagatcacattttaactaaattaggagttagaatgaacaatatagatacataagatattataaaaaatgataaagagacatattgaaatattatgtgaattatgtgagatgatgatttaatattcttgcattcgaaaagctataaaatttagtaaatttaaaattattataaataatataacatgcttgcacgatgtttaaatgtaatactctatccgttttaagttataagacgttttaactttggtcaatgtcaaactactctaagtttgaccaattttatagaaaaaaaagtagtaatatttttaactcaagaaaagtatattataaaaatctattcaattatagatttaatgaaattatgctggtgctgtaaatattactacatttttctatagagttagtcaaatttagagtagtttgactttgactaaagtcaaaacgtcttataatctgaaatagagggagtaattgttagtggatgataatgtggtatctttacatgttaagctttagaatttagtaggctctaactttaaagtaagagaagataagtcacaatcactatttttattattttataatataagacgcacatacatacatataattaactaccatatttgtctcctctttaattcattataaataaaccatccacacataaaatctagtcatattggacacctagggaaccggttttttcagatgcagctatttatggtccgcctgaaacctactagcctactgctcatccagaaatatcagcaattgtatttattggagtgatcatcatacgagaaggtgataatagtatttttttttctataccactaaagtatattgttcaaaataaacatatagagtagcataagatagaaaagagggattatctatacttttatcgataatttttctctatatcagatataaatactatacaaattatagtgtaattacacttatatatgtaactacaatacaataactttttttgtgtgcacgtgttgtgggtatctgcgtctatacgtgtttctagaaaaaaaaatacaataaactttaaaaatcatgctataacacattatttttgtgaatcacaggtcgcaggaccaaatactttcacccatgtacacgctgtgattttttcctttcccaattgtacaaatttggagcaaattaacctaacgtttcgaaattacgtaaaatttacatacaagttatattgcacttgctgcatgcagactataatgtaaatacaccgtaattttgttgtactcatatttgacaaatgttttatagaaatagaagaaaactgacaaaatttttcaagcctaacgttgtcaggcggctctcctgttgagaagcaattaatatcacgcataggaacagtgccgtacagtggaacaaaactttgcattgattatact

SEQ ID NO: 8386 - DNA, 15203 bp, Oryza sativa
ttaaatgtcctgcctaggaaggatgatttttactggttgtgctctttaggtatctgacagtggatatatattttcgcacgcgattaattcatgcttgtgaaaatactctatctatttttattggcatttggttgttggcggttggtccggctgtcagcgaaaatatgatatggccgccaatgaaaagctttttttatagtaaccctgaacatagcgagatttcatcaacatcataggttcttgtagatgttgcacatgccccagtggtgatatgtccgatattcagacaggcacttaagtttctgcacagcctgactcggtggctatcttgcatcgtctcgtcctggttctcgggctggcgcaggccggcaaccaaacgggcttctgcatggcctcatacgaaccagacctgatgtagacaaatccaacataaccataataggcaccgagctgcaagtagccatccaactgtagattgtctgatgagtgatgatggtattcagaaaatgctccaaaacttcatgatcaaatgactcatcaaacatgtcgttttataaagttcaagttcggagtgattccacacacgcaatctatgtgtgaaagcaactgctgaaaatcacagaaccaagtgaaagctgaagaacttttacgctatgcagtaatgtagacactcttaaggcctcatgttttgctttggcaaaatttgtttttaccatgatcacacttcccaaactgttaatgtttttttcataaaaaaattatgtagaaggttctttaaaaataaccaattttcaagtttgtaataatctattgtattataagaccgtcttgaatccctagcacatggtagccgtgacactgagagctgctgctaggtcactactccatggcgatagactgttgttgcggctacgacaacacatcctggtggttgcgagtggttggaaggtgagagaggaggaagaggaaacgggaagagaggagagagtagagagaggcgatgaagatgatgaggcggaagtcgctgacatgtgggtcccacctatcacgtcaactgaaaccgtttcccaaaccagcagagaaggcagttcgcaccagtttttaagttggagagacgttatacccgattttacgattgagggatatggttcgatcaaaggcaaaagatgagggaggtaaaatagactaactcagctcaagtaggactttccccaaactgggccgctaccatcagtcgtgtcgtttaccgtgcagaacttcagtcaagcaaatcatctgtgagaatatgactgtcaaagctgtgtagtaccacatcagaagaggaaaaaaaaatgctcctactcaattttgcgggcatgcacctcgcactttgacacgctaaaactttatatcctgttatatctcgaatatttaaacacatgtataaatattaaatatagtctaaaaaataattaattatatagattatgactaatttgcgagacaaatcttttaagcctaattactccaagatttgataatgtgttgttacagtaaacatgtactaatgacggattgattaagcttaataaattcgtctcgtggtttaccgacggattctataattagtttttttatgagtacatgaatattttatacactaacctctataatatccgatgtgatacgctaaaacttttcacctctaattctaaatatctcctccgttgctgactaccgtgcacattattgcccatagctagtggagtggagtactctaccactgtaccagccaagaagaggagatttcagagccgaattcacagctagtaccgacaacttgccaagatatttcgctctgtagaaaaatcgctgtcaggccatctccctagccgacttctttgatcctagttctttgtcagttcattatattttctctcatataatagcatatatgttttctcattatattattaaaatatattacaatgacaacataattttaaattttgcaataactttacgaaactactaatgtgtaataaccactctagtctcctcttctaatattacttatttttttaattccaaatttccactgtttctaaattgtatttctatatagactctgccttttctttttctccgattaatgtgagaatttctaggctatgagagtgaatgtggaggctcctttttattctaaattttagttagttttaaattccaatatggactctatactctatttctaatattccttattttttaattccaaatttctatttttttttcttaattatatttctatatgtactctatactttacttctaatatttcttatttttaattccgaatttctattatttcctaattgtatttctatatggactctatactctacttctaatattccttattttttaattctgaatttcaactatttctaaattgtatttctatatggactttagtctcctcttctaatattccttattttttaattccgaatttcagctatttctaaattgtattttgatgtggactctgctttttctttttctccgattaatgtgagaatttctaggctatgagagcaaacgtggaggctcctttttctattcctttaataatataatagattgtgttcaacatttaaccgttatcttatttaaaatttttatttaaaaattttatgagaaaattttaaaaacaaatagtcacgtataaactactatttatattttatcatctaataacaacaaaaaaactaatcataaaaaaattaaataagacgaacggttaaacattggatatgaaccgtgtaaaattatacttattttggaacggagagagtataactcaatctaaaaaagacagattcttgctacgaatctagacacgtatgtgatcagattcatattaaggattatgtctttttctttttggaaaggagaggtagactaccttaattagatgaaatttagtactattaattatactccatatttatacaacaaccagtgactcatcaattatcgcggtggagaaaattcctatcttttttcttggagtaggattaggatgtaccactacgtcttcctcgccgccgttgcgctcctcgccgtcgtcggctacggggtcaagaaccgacgccgtcgaagcgccaagctcccgccatcgccgccgtcggtcccgtttctcggccacctgcatctcttgggcccgctcctgcaccgctcgttgcacgagctgcacctccggtacggcaccgacggcggcctgctcctcctgcagctcgggcggcgccggacgctggtcgtgtccacggcggccgccgcggcggacctgtacaggaaccacgacctcgccttcgcctcccgcccgctcgtcgcggcggcgcacaagctgtcgtacggctccaagaacatcaccttcgcgccgttcggggagcagtggcgccgggcgaagaagacggccgtcgtccacgccctctcgccgcggcgcgtcgaggcgttcgcgcccgtgcgggccgccgaggcggcggcgctcgtcgccgcgacccgccgcgccgccgatgccgcggcggacgggggcgccgtggagctgagggacctcctgtacagctataccaacgcggtggtgacgcgcgcggcgaccggcgccgcgggcacgacggcggagaagctgaagcagctgctcgggaacgccacgtcgctggtggccggggtccaggccgacgacctgctgccgggcatggcggcgaaggcggtgaggtgggctacggggctcgagaagcagtatgacgcctcgatggaggagtgggacaagttcctctcgccgataatggcggagcacgcggagaagaagaagaagaagcgagaggacatcggagcaggggaggaggatttcatagacgtcttgctgcgtctgaaagaagaagacaccgagctcacggacactcacgtcaagagccgcgtcgtggtgatgatctaagctatcaaatcattctcatccaaactactctctcaacaaattttcatcaaattaatctctcgattcttgcgtttaaaattctgcaggatttgatcgccgccgcaaccgagacgacgtcggtgacgctggaatggaccatggcggagctcgcggcgaacccgcgggtgatggcgaagctgcaggaagagatcgctcgagcgaccggcgggaagccggccatcacggaggcggaggtgggcggcatggagtacatgaaggcggtggtgaaggaggtgctccggctgcacccgccggccccgatcctcgtcccgcacgagtcgacggcggcggcggccgtgcaggggtacgagatcccggcgaggacgtcgctgttcgtcaacgcgtgggcgatcgggagggaccccgcggcgtggggctcgccggaggagttccggccggagcggttcttggccggcggaccggcggtggacttccgggggaacgactaccagctcgtcccgttcggcgccggccggcggatctgccccggcatcagcttcgccgtgccggtgctggagatggcgctggtcgccctcctgcaccacttcgactgggagctccccgccggcatgcgcgcggcggagctggacatgagcgaggcgcccgggctgaccacgccgctgcgcgtcccgctccgccttgtccccaagcgcaaggcgccgcttgcctagacatatttacaaacgaaatgtaattggtgaataaaacttgggtatagctatatttattacgctatatttttcatcaaaaaatagtcggcatgtatttacattgtaagtccctaaattacatatgtaattttagtgtatttataatgtaagtctcaaaattacatatgtaagcactaaaattacatatgtaaattcgaaaattacatatgtaagtggggtgtaaatgaggtgtaactactgtgtaagtggctgaaaaaaatcgactgtagcatatggcgccatatttctagcaactccgataaaacttttatatacgtgttcttaacaattaaaagaaaggtaaattggaaccatgtcattataattttgtgaagtttgaaatatgccatcggtatctcaatgacatgtaggacccacatgagtcaataacatgtgggtcaagatggtatatcttaatttttacaatattataatggcatggttccaatttttctaaaaataaaggcggaaaaataagcttcgatgaaaaatctttaaaatcggtttcaaatttaaagttaaaaattaaaaatttgactgataaatgtaagcctacgcgaaaagatagtttgttgtcgtgggctcgtcgtccgtgctgctagtcgtagatgcattgtatctggtcagtgacacggggatcagtcgtagtagtatgctgctacgagtgtttctcatctgctctgatcagagtggtgcaatgtactcctactccattgttgtatctgacctcattgtcagcaaatttgtcgatggatggaacacgaacaaatgaccacaaaattgttggaattgttgtcgttgaagcaccgttgttacaaatccgccgccgcggccgccgtggacacgaccagcgtccgccgccgcccgagctgcaggcggagcaggaggaggagcaggccgccgtcggtgccgtaccggaggtgcagctcgtgcaacgagcggtgccggagcgggcccaagagatgcaggtggccgagaaacggaaccgacggcgactgttcttgaccccgtagccgacgacggcgaagagcgcaacggcggcgaggaagacgtagtgatacatactacttcaagcaaaaggatttggatttttctccacctcgagaattgatgattcagataattgtgagctgcaacgatatcgtgtagatatgctttctccgtcagaaaatgttgcaatttatttcctccgttttacaatgtaaatctttctagcattaactacattaatatagatgctaatgaatctagatacatatgaatatggataatattagaaagtcttacaatataaaacggaggaagaattttacatattctaaaaaaatctggacagaatttgtttaggatagatctaaatctcatcctaaatacaacattttgagacagaagaagtagtgtgctcctgtgttggtaacttggtatcggtagctgcgaattgggatcagagaagacaagtcggctcatgagcctgcttgacagcgatttttcagacaaggaaatatcaggtccggtagatcaacgtctggtcgatccgagctctgatgtccccgtcttccttgctcctgctggtagccttgggcaataatgtgcacgtagtctttgtttgagagctgcataatgtggcgccaaatttagttttctctctctcaaaatttagtacagaaacacacacttatatacacgtacacacactcatatgtaaagacacatatgcatattatttttttgaacatctccaaaaaaatattttaacatatattgagattgaaatcattgtaggtgtttcaatgtcgactcataacactccgttcgttgagttctttttttttatgtggtatggagtagctttgacagtcagtcagtcacggcgctttgcttgtctgaaactctcaactccactaccgggggatgtcgattcgaaggcacattgggcctatataagttaatgggccagaactgatattcaaaggaacattgggccagtttatcgtggtccatctttcttcttcggtgatgacatggaatgaggcctggcccaactaaacatcgggcccaacttttcttcgtcggtggtgggctagagatggtgtcagggcccggcccaactagaccacatcatcctacccctacctcaacccgtcggtcctcaattccccatagcgcggctcgtcgcgacctagccctagccgccgcccgttcgcgacctcgccggcgccgccatcccgccgccggcgaacctccccccctagcggcaggtcgccgtcacgccgcgccgccccgcgccgccgtactaggcgccagcccgcgaggtccgctcggctccaggattcgcgctgccgcacactccgctccgctcggcgtccccgccgactcgagggcacccctcctcgtcgggcctctccgtcgccgacgagctttttggggggttgagccgaacccccatgccctacgtttggtctgtcccttggtcgtgaggatatggaccatatagctgaagaagagactgtgggagttgcggaagaccctggtttggctgatgttggcaaggctgatgagaccaaggaagaaggtggtggtgctggagtgcacttggatgaaactagggttgcagtggatgatcccacggaggtgcgtgcttcgcagattgacgatggtacggctatggtgtccgtattaggtggcgatggcgatagctttgttgagcaagatggtcaggatactagcggcggcggtgcttgcaatgaaggtaatgagcctgaggaagatgctcgtgttcaggtgcgtttggatgatactagtgccgctgtggatgaggggggtgcttccttgattgatgatgttatgaatacgctccccgttggaggtgtggctagctttgatgatggtcctcagacggacaagaatgcgcaggatgagggggcgcttatagatgtagtttcctcaactgtgctgaatgatgcgagcatagatcttgtcaaagctagtgatagtgtctcggaggaaggcacagggatggatatacttgtccaaccgggagaggacattaaggaaatggttacaatagcctgtgatgcggccacagatgacgagggcaggaaggtggatgcagtttccagctccagtgatcgcaacgaggaagtggttggtgcagctggtcttgatgagacagatgaagacatgcgattgggtacagttggcctgtctggtgatgacaatgtggcaaatgaggctgctgccgcagctgctggtggtgcagatgatgaggacttgaagatggatggggtcattaccgccggagataaggatgtggaaaatggcaaggctgacaatgctgatggtgttccggaagtgaatgtagttgccattagtagagataatagtgcggaaaatgaggctgctgcagctggtgatgatggcgcagatgaagagggcattcagatgaatgtgctaaacacaactagaggtgagggtgaagaagatgatgaggctgctcaaaatgttgttgaatatgctgttgatggtacagaagaactggaaactataggcctgactggagatgataaggcggaaaaagaagctgccccagctggtaacaatagtgcagatgaggagggcatgcagatggatgcggttaccacaactggagctgaagatgaagatggcaaggctgatgaaaatgttgttgaagatgatgatggtgtttcagaagaagctgtggctgacacagttggtgaggatatccctgaagaagatgcagtgcagatagatgaggacgaggatgatgatgacgtgcctccaccattgacaaggaaaggcggggggcgccggaagcgaggtcgtgcatcttccaaggctcaggttgtggtgaaaccacctgttaggaagaaggatgatgaggaagtttgcttcatttgctttgatggtggtgaccttgttgtgtgtgatcgtaggttcgttaatgacatggaatttcattctttccatatcccaaagtatattgctatgttacaattattaatggttatttctatgtcctcatactcaggggttgtcctaaggcttaccacccttcttgtgttaatcgggatgacgagttcttcaaatcgaagggtcgttggaattgtggtatgtgggacttagtctgaacaactcgcagtgcccttgcttagttacttagatggtttactttggaatgtggatatgagtattcatacttcatttcatcaaaatccatgatttttatgggtcatatttgcattgaacctactctttttacatgcagatagtgggatgccggtaaaatataaatataatagctgatttaaatttttttccattttgtcctgttatatcatatttatttgtttattgttctttactttgaaaactgaagcttgtgaaatctgtgtaatactgagtaaaaattgctggagataaatgatgctggactgtttctctgataatgatgagatttgtgcttagtccacagataatatcttccttttttttttgattttgttcaatctgcatcattttcccagggtggcatatttgtagcaactgccagaaacctgccttccatatgtgttacacatgtacctattccttatgcaaaaaatgcataaaagagacaaaattcgtctctgttaggggaaacaaaggcttctgtgagacatgcatgaatactgtgatgttgatagagaacaaggaggaggctactgagcaaatggtaatatttcctctgtttcttggcttaccttaatctatctattgtatttctatagtatcatccagtatctttgatcttttcatcattttttagtttctgtatatcatttgtgacaccattttatccttttgtcattctctctcatctaagaaacttaggtggtgtttgaaactcatgaagatgaagataaagttggtgcacgtaaaacgagataactattagcacatgattaattaagttttaattattacaaacttgacaaatggatatatgtgatattttaaagcaacttccatatagaaagttttcgcatggaacataccgttcagtagtttgaaaagcgtgctaacggaaatcgaggtaatatcttaattcataagaaaagaacagggcaaggcgtaacaagttttcgagatattcatgctcaataatcattttgttaagatgtaggccctatgtatcttggaactgttaatttgcacttgatttgtctatttgattagtaaactcaaatgagctaaccaacctgctgcctgcaggattcaaaaggtgtaacaagaactattttctgaatgatgttgtccaagcattgcagcttgctaaattgttttcacgaaatggcatttccataacttccaccaacaccttctatgcgctatgtctatgttgtacacacctatgatcattattgagatacagagttgtactgatttcagtactcacttacttattaatcaacatcaatattcttaatttgtcttctcatttcccgttgtgctttgctccataccttgccaaagtgttaacctagtatacttgtacaaatttgcttaacaggatgtagattttgacgacaaaacaagctggtggtatttgttcaaggattattggttgaatttgaaaacaaaattaccattgacgtttgaagaaatatcagcagccaagtctcaaaagaatggttcttctttggttattcgtgacaatgatctcagtgaaccacatgatacaaatgatgaagaagagggtaattcagacagctcatctgtgcgccatctagaaggcaattcaaagaggaaaggaaggaagcgatcaaagcaagctgctaacgatgacagttctgtagttaaagatagcactaggaaatctacaaagcgaggcctgacaggtggccgtgatactaaaagttctacagggagaaaggttagaaaattgtccaagcgtgctttgagcagtgaccatcgaccaagagaatctgaaagcgtagggacatctacatcgtcagctgaagagaccagttgggcttcgaaggagctcttggattttgtagcaaatatgaaaaatggtgacaaatctgtgctgtcccaatttgaagtccaatcccttttacttgattatattaaacgtgaaaacctccgggatcctcgcaggaaaagtcagataatttgtgattctatgctcaaaagcctttttgggaaagcacgtgttggtcattttgagatgctgaagcttcttgaatcccatttcctcatgagcgaggtctcgccagttgaaattgatgacaaccatggtggtgttgtagaccctgatcctagtctggatgctgatggcaacagtgaagcatcaatggtgatgagctcagaaaaaaggaaaaaatctcgcaagtatgaccagaaagctctgcaaacaaaccttgacgactacgcagcaatagataaccataacatcagtttaatgtacctgcgtcgcaacctgttagaagaattgatcagtgaagttgacacatttgatgagaaagttcttgggtcatttgtgagaataagaatatctggaacaggtcaaaggcaagacatctaccggctcgtgcaaattgttggtaagataagacactttcaagctaatctggctggttttagcttcatgatgctgactttcccatatctgtgtgcaggcacaggaatagcgccagaacaatataaatgtgggaaaaagtcgactgatataacactggagattctaaacttagacaagagagaggttattactattgatataacctcaaaccaagagttcactgaggtattatcattttcagcacaggcacttttactgtttgcttactgtttaccgcaacttggtagagttaacacttgcaagcttatatttttctaactgtgtctatagttttatttcctttcactttgtatactgttagtaataaatttgacacaacctgatcatgttactttagattatgtgtacaagcattctctcaacaagcaaatctgctgctttcttttgttcacatgatgttcatttcctgattcactgttgcttttcttgttctaggaggaatgcaaacgcttacggcaaagcataaagtgtggattcattccaaggctgacagtggtaatgttattagttattattacacaacgttatatgtgcagtttttttggcatatgtgcacagtttcgctgtttctaaactatcttaccattcagggagaggtttatgagaaagcaaaggttctacaatctctcaaagtcaacgatgtaagcaattagcactgaatggatgctcagagttttctatatagtacatctatcatttcttaattcattattgcctattgcaaaaattgcagtggattgaaagtgaaaaatgcggcttgggcatcttcgtgaccgtgcaagcgatatgggccgtagaaaagaatatccttcttcatgtcattcttttatatctatcaatatttatttatccttatatttctttaagtcttcactatgggattttaatcatatcgtgctggcaaaaaataagtatattatattacgcaagtattcacaaatccagtggcattatttttgtataaaactcgttcatgcacttttatgcatattattacttaattaattttgcaatggcctatatctatgtggacaagtccttgttaaatgaaaatttagcttgtttgtcttaaccagtatttacgcttagagaatgtgtagagaagctgaagcttctaagtacccctgaagagcgtgttcgtaggctgaatgaagaacctgaagttcatgctgaccataccatggatccagattatgaatctccagaggaacaagagcaggatactggaagaagtacttgattttattttgcttccgccccataatattcattttcgatccatgcgtgctcatctgacatcactcccttttttctattgtacaggcagcttcaataagtcaagaggatctttctctaagaaagataataatcctgtatctccaggtaaaggagagggtaggagtcctgcacaaagagatttaaaaaccaactgggagtctaatcgaaacacatggggcgaatccagtacacatatcgagtcaccccttggacgcagacctgcattttcgtctcacggtgaaagtgctggttacacaagtaaatcagatagcccaaacatcggtacacacgcagttaaagtgggagctactgcaggtaatgctccacatggtctatctggtgtttcatctgaaactttaggagccaatatagggtcagggggaacacatgcatcacagtcagttattaatgagtctgaaaaaatctggcagtacatggatcctaccggtaaaatccagggtcctttctcaatagtgcagttgcggaaatggaatggcagtgggtacttccctccgaatttaaaaatatggaagtctactgagaagcaagatgattcaatattattgacagatgctttgctcgggaggtttgagaaagacctaccgccgtgggaaccgccagttggaagcagttcagatgttgatggtaggccccgtaatgattcccttcttgaggaaggaacaagagctggagaacaaccttcaaaatcagcagttctaagtagcacacagtctttctcaggaagggctggtcagggaaacgatgcggcaaatcttggaccagccactatccaatctagtacacaaggttattatggaatgcaaaactctcaagcagcgtatgcagtccaacaatctcttagtggaagttggaacgcctcaagtcagtttggaactgcaataaatcctgtgacactttctcagcctgccatgggtagctttgtagttggacaaaatgcagctttaggaagtgcaggtcagctaactcctgtaccaggtcctgcgacagtgagtgcagaagtagttaattcacagttgcagtcccagaaccagatagcatcttttttatcacaaagtgatggcagattagctgatggaaacgattcaaagttgggggaagatgcttcgcgtgaaaggatgaggtcatcgggtgaaggtaggctctttgcgaaggtttatatcgttcaatgtattgaggaaacaaatacttaatatataaaaaaaatgtacaccgtttctttaatgaatggtaataggctgagaattataaaatcgccgcgaagaagtatttcaatatggcctaaacattcttttttggttcttcacagatcttggactatctggtgcacaacctggaggggtgcaatcaaatactcaacaacttgaaggtattgctcaatgcttgttcattgtttatgccattgtcttctcttttactgtattagcatctgttgtttcacaaaggaagcttttaatcccgaagcaacttttgttcaatgaaaattatggtttaaatacctaatgaaactgatggcattacctgcagatgcaaggaaccagttacaaactgatgcttccaactcggtaaagccatctcagctgatatcaacaccatctgctgaagcagtgcagccctcgtccacagccatggctggtggtgataatcaaaacactgcttgggcacaattggcaagcacatctggccaatctcagcctcaggcggctggaaatatgacctggggagctactctccagggtaatgcaaacatgggctggggaatggttggacagaacaacatgaacatgtcttggggaggaacagcacaaagtgccacaggctacaacatgggtttggctatgcaagcacagccaaatgcagttccaaacatgggctgggttacaccaaatcctggaaacaccaatatgaatatgatgtgggcaactcaaggccaaggcactccaaatgcagcagcaatggtgggaactcagatgcaaggagttgcaatggctccatggggggccattgcacaaggaaatacaaattcttatcctggttgggggggccaagttggaaacatgaaccaaaatgttggatggggtgctcccatgcaggttaatccaggtcccagtactggaaatgggacaggccaagataataacaatatgaactggaattcaccaagcgggaacccaaattggaataaccagcagcgagacaatggaggcaggcattctgggcatggtggtgattttaatggcggtgactctggtgggaggtcttggaggtcgcagtcaggtggtgatggagggtcgtggaggcctaaaaggggagtctgctattctatactcgacaagggatactgcaagaatggtgagcactgcaacttttcccattcaataccgaatgatggatatccatcaagaaacagtcggcacttcgataggcaaaattcaggtaacgagagacggtacgacaggcaaaacgagaggactgatcggcagtttgatcggcaatcgtcaggcaacgagaggcgtgatgacaggcacaacggcaggga

SEQ ID NO: 8387 - DNA, 14116 bp, Oryza sativa
  unsure (1)..(14116): unsure at all n locations
tccagctcctcaagaagatgcttccgcaggctctgaaacaaacaagttgcaaggaaaataattcaatttgtattactaagtaagttcaaatgaaagacgatgtcaatttttcatctgaatacaggaaataattaaatagtaatgtaaaaggttgtaaaagatgaatgcctgtaaccaaacaccatataagaaaatagcagatgtttaacttggagaaatcaatcatggatcaaattatagtttaaaatacaaactaacaatgttgatactccctactacattgattcttatatggcatattttaatttcaaaaaggccaaactttgtagattttgatcaatgattagacaaattaaaggaaccatttagttagtgtataaaaagtatatcaatagctttgtactttaaagtgatctcacatactattggatttattactattatgagtataatttataagaaatcaatagacgaagttaatgttgaagacttcttcaaattaaaatacagcatataaaaatcaatggaggtagtttataaaacgtatccatgacacagactaatgcagatcacaactatatgcacctcataaaaaaaatatcaaaaggctaaaaaaaatctgggcctaacagttatacatctatcaataaatgctatagaagtattggatgagaatttccatctatttgtttcaatgaggaccatcaacttatacagctagatgtaccagtgataggaatctgtctagctagtacaacaaactttgtccccacaattcgcctaaaattaattagagcatattgttggaagtcaatgagagcaatacaataagcaaaatgtgtacttaataactgactagctagacagaagatactagaccataaccaatttcactgggttaaaagggattagtatatgctcctggatacggtttggatgagaatgtttgaaatgagataagcaaggctcttgctgattcttttcattcaagtgtcattgattcccttgaaactacatttaaaccttcttatctaaaaatcaacataagactaataacacgaacaataacaccccttagggcggggggagcggcaattgcagtttggatcaagagtttccctttgaacagatctaaatctctacttagcaactgccagggaatacctaaatctctacttagcacctagaatcaaaatagcacatgctatgtcagcattaaccaattgtaacataccttgaaagcatcggtcttgcccttagtgacctggttctttgcgatgcagctgttgagcacgtctcgggtgaactcgtcaggattcttcccgtcatcgatcaaactagcaaaacaggcaccaatccaatccaatccaatccaagtcatacacccagaaccagggggcgaaaggggtactgagatggaaatcgaaccaactcacttgacgacctccatggggacctggatgttgcatccctcggcgtgcttctgcatcgtgtcgagctccgccaccagcgagttcctgcggcaaacgagacaatcaccaaccaaaccctaagatttctccacccactcacacccgcacaggaagggggagagggggatttgctgggagaatctcacaggcgctggaggaggggtagctgggaggcggagctgaaggaggagacgttgaggttgagctggtggaggagccccagcgtcctctggatcgaggccatcatcagcgccaggttctgcttcgacgcgtcctccgccctctcgcccccgccccccgcntgcacgccgttccccgccgccgctgccgccgcggcgactccagatgcgttcgtggccgcgccgccgtccattccgccgcgatcggagaagacgagagagagagagagagagagagagagaagagagaccgagacttgacgtgtcggcccaatatatcagcggcctattgctgggctgacgtggacgtaacaccatcacgggctcttcccgaagcgcatgggccgcaactccctaattcgggcccagtttaactgggccgtgctgtcctaggccgagaagcatcggaagtttttctttttctttttctttttcttttcttgctatatgctacttcctccgttccataatgaactttctagcattgcacatattcatataaacttacattatgagaaaagtactaaaatttagggatgcaagtgggtagtcccgctatccgtataaaaacccgcttgctagttcatttcccatatagtagtataaaatttagaagaaaaaaataaactagaagaagcgggctaaaaaaacctatttgcccgtcccgcttgtatccctattacatacaaaagttggaaatattattagccatgcaaaggtaaaaatggagattgattggttggtgcgtgtcccaccatcatcaaatcataggttgataaccagtccatgtacagtgcacatacgcttcctcgtcggtattcatacgtgttacatatgacaaacaaacgagataacgagataagcgtcgtcactcggtcgctagctagctagatagcttaacttgctttgtttggaggcccgtctccatcatatccatccaatctgatctcatggccgctagctgcagggtgagtccgcagtgtgagtgatcagctgactcgatcgatgtgcatgcatggtgcatgcgaccggtgcaacgtaccgtacgttgcgtaccctgccctcccctgccggtatacgtgttgtgccactgccacgtcagtgacaacagtctcatcgtttggtcaacagctgatgactcataggaaaataaacaaaacaatagaataaataaagctttatttgtgttcttgatgagttaaaagtggatggtgaaaaataaaccatcgttaagaaaagaaattcaaaaaaccagctcaattaagttttagaacacacataaaactaatttgattgtggcttataagctaacaatcaaacaattgggctgcgagttttgggacgacgccgtacgtcgtgtaccatacaggtcatgtcatcagcaagagctggccaaagttgaggacgccgactcgcaaaccgatcgtccaagctaattattaagctagctaatcgatcgatcagtcgaccgatcgagagatcgccgtgtgattgcttacgtgcatggtccctgcagctagctaactagctagcaaaaacgtacaaaaagatcccatgaaaactaccatgtaccgacgacacgtacgttaacgttacgccgtggcatgggcatcagggcatgcaactaggtactagctcgatatctcagctgttggcgagctagttgtgcatttacacttaggacttatttaagagcttctaactactaaacaaaaaattggaaaacctagtttttttttaaaaaaaattagaaactaactatcaacgccgccagttactcctcagaatcttgagctctcgaaataagcccttaaacagctagctagctgagcacaagaacgacaaggccggccagccggctccctgtcgccgctttgtccgagtggccggccggcgagcgaaaggggcttgcgcgcattggattaactacgattatattccgacgattttagcaaggaaaagaacatcagcaaggtaacaaatttgcaaagatattcgcttctcgatcgagatctgtccggcaatcagctggctggccgatcgagacgatagctagctatagcgcagatcgccgtcagtccaaaccaccggccgtcacccgcacccacccgcggcgccacctttataccgcgattcgatgcgatgcgatgagatgagagatgcttcgatctctctctcccctcgccggcgcacccagcgttccgggcactgacccgccgcccaatcggctgcgatattcgccgtgcacctccgctcacggttgctagctagctttgtaccacccttacccgtgccgcccattgcatcatcgatcagtacgtacacaaaaaaccggaataagttcgtaccgcgtacgggcccggcgatcggtacatgcatatgcgcgctgctagtggatcgccgtcgtcgtcggcggcgtccgcctcgtacgtccacttggccaccgtgctggtgatcgatcgatcgccggatcggaggcaggggtatatgcgtagaggtaggcatctcgtcagacacaagtagcttgacccgtgtggcgttcatggcggggccccggggttggatctgataagatccaccgtgccacagccggcgaatcagccagctatagctaccctcgccggcctctgcatcgcattcgctcgtggctacacgtgcggctgcggcctgcgctgcggcacaatatctggaacaaaccggccactcgcgtgctccgccgggcgccaataataatgcaaaatcacctcgatctttacttgcacccggagccccgcactagtggagaaaccatctttggtcgctagaccaaattccacaataatactggttccattaaaaaccgggactaaagatgatttttagtccggttcatcccctgtcagatgtatgtcaggggccgaggatctttagtagattaccactttagtccgggactaaagattgatctttagttccggttggagttatcaaccgggagtaaatatttctctcccacatctgatcggttaagtcccagacagatatttagataagattggatcatcccatctcttcctcttctcgatccaatccccttcctcctcccctcccccctcttcctccccccttcctcttctcctcctcccctctcctccctcccataagccggcccttcctcctcctcccctctactccctcttccatcagccggccggcggcgggcggtggcagcgcggccgcgcggggtaggatggcggcaggctgcgagcggtggccggctcgtttgtttttttatatataatttgtgtttcactatatgtatatttttttagattttgtgattcattgcatcgcatggatctgacatgtataatctgtgatgtatttaatttatgtgtagttttttaggatttatgatgtatttgatatgtgtgtaggatttgtgatgtatttgatctgtgtgtatgagtaacttaatatttaggatgttgatttgggatatgcatcccactcgatttgggaaaaatatagggattaactctagccattagcaaatcaacaatgaaaaaaaaagacctcaagggattgccgctacccctcttcagggactaaagattacccctctttactccaaccgggactacctggattcgtagtcccggttgaaaaaccgagggttctaaaccgggagtaaaaaatatttctccaccagtgccggacggcggatcacagtgatcggcatcaagaattaccatatccacgtattaattccagcgtccaaaattaccaaagccactcaaaagaattagttataattactatacctccatattaaaacataaagatttttggaagtagttatataatattcgatagttttttgaatgaaaaactttcaactgcaactactatataattacaattacaatgtagttgtaggagtaccatgtaactacaatataagctatctgtgactcaaatgtaacttggaagaatttgatggagcgattggttatttcaatgagcatgtagtctgtaggtctcgggttcaattcttgtagtgagcgtgtggttttttttttccattttttccaccacagcacaaagctcaaagcatatcggacggtttaaagtttgctgcaggtctcgggttcaattcttgccgtgagcgtgtggttttttttttcattttttcctccacagcacaaagctcaaagctaagcatatcggacggtttaaaatttgacagttttcacccctgaaaactgtggtgaaaactgtcgacagtaggatagcaaatccgtttttagattgtacaaagatatttttaaaatatgtataattaggggcagactcacacctcagatcactcgggccatggcccgaagactgcccattaattatgatggatatattttcaccatgtaatcattatgcataggctaattaattatgtggatatattttcaccatgtaatcattatgcataggctaatgtgccttaccaattttttggcaacttaaatagtacatgtgtttggattgagcacaaccaattggtagtgcccatgttttatttggccaaattatagaagtttttcactacgataccaaaatttggcttcatattgatcccaatcgaaacaagaaccatataactttaccttaacgaaatattagtagtgctaaaatttgcctagattttggcactagtaataaattgttagggtaggatccaaacatgcccttaactcttttataggctagccctgaccatggaccaatcctagatcacttcctaggtggaactaaatgaaaaagttatgatttgttaagaacataagtagatagagaagttatattttggtataaattttaggaactgcctatatgacttttgacatgaaaaaccccctcaaatgttgtaaattttgaactattggatcactttaagatttgtgcaacatagccaaaaccttttctttctccttcccttcctcagtcccgcttgcacatgcgcatgcacactcctcctgcgccggctgcagcccggtctcatcggatggtcggaattggttaacaataccaagtcctctctctccggccggcctccccccttctctttcgcaaagctatggtgcccccacccaaggtcttacccgtctctagccgccggatccttcatcaccagtcgttgcctcctctacagtctcgttgtttgcccccgtcttcaacgccggcccactgcccactgccaacccccatggctccaacgtcgttggcccgtgtccaccacccatcataggtcctctgctgtctatggcgatccctctgaaccccaaggaaatccttcctcttccccatctcccaacgctcctacccaacctaatcttaaacccaaaccctaatcttgtctcctctgtcagagttgggaaatatcgtcggggccggaaagagggggagctcactaaagtcggaggataaaaagcttagccacaaaaatttagtgcggatcggatggtccaaaatctataagattttatttctaaatttttatcgaatgatatgtagcaaatatgtaaattttaaatgctggaggtccggatggagcgagtacgagcttgattagtaggggtggtcccactgcacagttgatgagcctaacccaatgactaggatggtatctatagtattaaataagttgccatctaaaatgaaaaatgatatggcaagtgaataaatgaggaaagagaaggaaaccatgtcttgcatgagacatggtttctacacaacatctaagacatcatgtggaataagtagcattaaattaaagtatggaatagttgtgtttgcattggaagagtagtgtctagcactagtttcttgatgatgtggagtttatggaaactatgtctagtgtcatgtgttgggaatgacctaccattctcaatccaatgactaggatggtgtccatatcattaaataaactgtcacctagaatgaaaaatgatatggcaagtgaataaataaggaaagagaaataaaccatgtcttgcatgagacatgatttctacacaacatccaagacatcatgtgagataagtagcattaaatttaagtatggaatagtgatgcttgcattgaaatagtagtgtctagtagtactagtttcatgatgatgtgaaatttatgaaaattatgtgtagtgttatttaatgaggagttacaaaatcttttcttgtaatagatcttaacctctggtagataacctagaaatggttatattatttgtggatggaaggagtacaatacaaggttagcatcaggatttgccaggtatgtgaaaagagagagctgatgatccaaatcaaaaaacttaattaacttactccccggaattaatcagctgatggatcatcatcactcatgctccttttagtttcttttgaggaaggcatcactcatgctgtcatccaatattggttgctgtttcttgctaatatgaacaaaacagtcgctatattatatatgctcgtaaaatattgatgcgttgtgagtagaacgcaaagaaaaaacaataggaatcgataaggactcaaacacttatctaattgtaagcgtcttaaaaaaccgcactgttcttttcgtccctcgtatgcactagtaggattcagaacttcagatatatttaatcatgctctcatccctcgagctagaataatatacaatgatgaaaactaacttgtgcttgacatagacagagaatgcagaattttcagatcaaacttactgtaccatacaagattagccactcacagctcatcgatgcaataattgattctagtttatagcttaacacctgatttgtttatggtaaacatggatgttttcctgcaatggaagcaatcagtgtcgatcaagcaagattgccacaacaagatggcaggaacggaaagagcatatctaaggaagaatcttgatttagtcactcctcttcagattaaaatagagttggtccatccatatccacaagccttggaggtgttgttcacccgttctgcattttttttttcgcgaaacctgttctgtattttgcatgtccctctcttgaccacatataactgaagaacgttgcttaattatttcagttaaacatgtagtcaggcaagagcacattatgttattgagtaagtgagtcacctagttgacttgccacgagtcattttcatgtgtttttaagaaatggacataatggtacaattaggggtgcatagggaaattaactaatcagctatacatactaattagtatagtaacaaagcaagcctttggcgtccacaggagactaacagaatctagctagcaacagatcagatattatctatattggttgaagcagctcttgtctgagagcatgtcactgcgtcacatactcgcatgtattgtcgatcgatcgattgcaagaagccaagaactggtaaaaacggagtagaaatgaatgcctgactacagcctgagtaaccccctatttgtcccagctgtttggtgtgtgatactatatgtgtacttgaaagttctatctttccaagaattaatgaagctgcgaataccactgaccacataacgatctgataattaccttgctgggcactttgcctgttctgttcatgctgcaccataactgaaaagatatcacacaaaagcagcagaagaatgttatgacagtgctgagtgcttgcctcacaaactcgtcacccttacgatcgaaatcatgagctaattaaaacaagtccagcgacaaagcatgttgatctctactattattcttaatttggtactagtacaaaatgtgacgtataattttcctgaaccatatatgtatgcaacaataatctaattaacacgcgactgcaattccccctccccgggttcgtatcctctgcatttgggaccaaaggcaaagtttgccgttggttccatccaggacatccatacgtcaatcaacggttccatagtttagcagttagcacccttttagtgactaattagcagctaattaactaatagagttgttctctcttaaaaaaaaatcaaggaaatgatctccagcggtaaatcaaatacaactaatacctgccttgccttttggaaccaactcaaaaaataagataaaatcaagaagcaaacaatctcaggacaagaaaaatcctttatttatacagtagtaaaataattatgccacgtccgtatgaaacatctagcaattctaatgctaaaatcctcccaaaaaataaacatttattttgaaaaaactaatctgtctttattgtacaagagtattttatcataagaaaattaatagacagaaccgatcttgttaattaattggactaatatatagaaattattatattatattaattaattagctgttaatcatctttgaggtgctaaaccatgctaccgttcattgaagtacggatggtctggatggaacaacggcgaaccttgcctttcatcccaaaggcaagacgatactgaccccccagtattctttttagttcaaattttgtagaataatataaatattcgtagggaactgatcctaatgaacagaaattcatccatttaggcaatcatatcctcgagggggtaatctaaacaaatttaaaattggactactagtgtgtgttaatcttagtatttactactccctccatcccataatataagagattttaaatttttcttacaatgtttgatcactcgtcttattcaagaaatttgtgcaaatataaaaaacgaaaagttatgcttaaagtattttagataataaagtaaatcaaaaaaaataaataataattcctaaattttttgaataagacgaatggtcaaacagtgcaaacagaaacgcaaaataccttatattatgggacggagggagtaaataacttgcatatgttcgtatccatgggacggacatgcatgataggtgcacacttaagtacctgacttggatcgagttgttttatgcatcaaccttgcattatttgaggaaacttttttcataccttaatgcaatatcctcttatttttacatgcatttaatattttttagaaacatagtataaacacaaatacttacaatgcgcgcacattcaccctatgaacctatgagggccttcattgataaagtcgacacggacgcctcactatcgatgggtacgttgcctaccacggaaagaataattagctatcaacgcgagcagccatgtcaaatctataatttaaaccagatgagctagttccacaacaagaaacctacccagttgagttacactcacttcgctatatgcacctaaattgttattaattttttttaaaaaaaatgacatgatatattaatataagatatttcatgtcacaaacgtaccaatttaaaatcaatatatacaaatagaaataaaaaaacaataaatttgaatgtgaacagtgcgtaccattcgcaacgatatttattatttttttataattgtctaagttaaatttaaatttacatatttgtgaagtctatcttgttaatattttaatttttatcacttttaaagtgataagtacaaaacaagggaatatcctcatggaatggatatatgtctcccatcactgtagtgatatttggcatggtgagttggtgacatttctagccattcgatatttatttagtaggagtaatcacaaagtttgtttaatggtgtcgctaaatgcgtgacgcggtactaatatatagaatgacattatgttgcatcagctgggactccctgcccctgccctgataacctgatccgtatatctgatcattatctgaagatgtctagctgcagctatgcacacggaagaacttgcgtagactttcacaatcttcagctcctcagacaacctggattttcctatggatttcgaaaatcaatagctatagtatttaaaaattgaactaaaaactagaaacggaaaaacttctcacccgctaactactcatctcttaacaatgaatcctctaattcctgtttggcacaattccagctccagctccacctccatcctctactagaaaaaaaacacttttaccgacgttaggtatttattttcgcaggcggacatgaccctcggagccaaatagccgcctacagaaatacaaaccggggtgaagctcgttgtccgcctgcgaaaatagacttggaatataaatagagccaacctatagggcctattttttttcaaagtcctcattctccctcattcctctcccgcgttgtaatatcccggcctagggcttaatagaattaatagaatattcatatcaacaagttacaacttcttttccggaagccgatctcgaaagaactttgaacttgtgttggtttgtgagggtagtttatgacctatgaaagctgatagatgtaagcggacccgacctggaagaggcgggacgttacaagtggtatcagagccgactctcgcggttacacaggcgcgtgtgtcgcagttgcacaggcatggggctcatggctggtgtggactcggagtggtcatacagcatggcacatgcgctggcactggatgcacggacgtacgttacaagtggtatcagagccgactctcatggttacacgggcgcgtgtgtcgcagttgcgcaggcatagggcgcatggctggtgtggactcggagtggtcacacagtatggcacatgcgctggcactggatgcactgacgtagtcaagaggggacgttcctagcctggggttgaccgacgaggacgtcggtgtcttaagagggtgaggatgtaacatcccgccctagggcttgatagtattaatagaatactcatatcaacaagttgcaacttctttttcggaagcccatctcgaaagaactctaaggttaagcgtgtttggcttggagcaatttcaggatgggtgaccgatcgggaaattcttcctgagagtgcgcagaaaagacttgtgttggtttgtgagggtagtctatgacctatgaaggctgccagatgtaagcggccccagcctgggagaggcgggacattacacgcaccctccccttccccctcccctccacgacgttgggcggcggcggcgcggctcccctcccctcccggatccggccaggggagggcggcggtggcggcattgtttgtccagaggattttcgcaggcgggtgactaggccacctgcgaaaatttatatatgggtgacgggagcctgcgaaaatgatttttggttgcctgaaaaaaatgatttttctagtagtgatctctcctgaagctggagttcaatcaaacagttttagctccacctaaaatgggagcggaactgggtggagttctctcacaaaatgaactagagaggtggagctaggtttagacagctcaacaacttcactcgagacccaactcctgtagttatttagaagttggagctctacaaggccctagggtatgtttggcacggctccaactcgagttttagagctcagccaaacagttctagctccacctaaaataggagtgaagctgggtgaagcgttctcacaaaataaagtagaaatgtggagttgtgtttagggtgttctccaactccactccaaatccaatttgtgagctaaatttaggagttggagctgtaccaagggcatgtttgatacagctccaactactaaatataactccaggagttgagtctggaatggagttatggagctgcataaacccagctccacaactccagtatattttgtgagagctccacccaattccactcctagttttggtgaagctgaaactgtttagctgagctccagctccggaaggggtggagctggagctagagctatgccaaacagaccccaaatactactactagctgcttttaaaaatctcaaaactcttcaaacagcgccgttgcggcatttgccagaggacttcatgaagcacacgatcgaacgagcgacaaattaaacaagggatacggaggaagaggtcgatccgccgatgccgttgcattggttggtgagcagcatcatgcgcgcgcccacgcccgcacgcgcacgagccccgcgtgagcgacgcagcgacggcgcgtgccgggctagctgtgggcgagcgcgcgccgagccgaccagccgcgccccgcggcgcgagcaccatgctccgcgcctacctagtattccgatcgtagacaattacacaggccgacgcgacgctagcctctgcacatgcatgggcgcgcacgcctagctgccaaccggcgcatccgtgcatggtaataacgtgcacccaacgccgcctcgcccccgtgcccctctccggcacccctaccaccaccgatcgtgtacgtgtcaccgccgcttccctctatcccaagtccttacgcgtgcccccccactatcgcgcgcgccgtttcaccccctcaaa

SEQ ID NO: 8388 - DNA, 36757 bp, Oryza sativa
atagagttcgttcatttgatggatccaatggccgcttcagttttcgcctttatgatttcttccaatggatggatcaatgaatctttatgctttcttccaatggtggatcgatgaatgctacaaaaaaaaaaactagataggttcaagaaagaaagaaagtgaagagaggaaaaggatgtgtgcatccatgtagatcaagattcccgagcaggtgaggggatgagaatcgaacaacacacattcgctcactcacacgtactacgctacagtacgggacaatacagagtggcacagatcacagaacatgcgagccgccattgttaatttcaagcaaatgtaagaggcgcgtgggattagtcagcccaaatatatatatatcataccatttgatcggagattgattttgtagtgtagtgtagtcctgatcagtttagcacaccccatttagacacaaacctttgcagagttgggacaaattaacccgaactcatggcacctttggaacctaattaagatttctacagagttttcatatatagtagtttgattcctacgaaaatctttcaaaatcctcctgttccaaacgagcccttcagcttgctgcgcttacaggataaacgactgatgagtagtcgcatttttctgcaagatcagaaggccattttttatgactaaagctagaattttgtgagaaggctgaagagtgcaaggctgagtaatcaatccggatacaagcagtagcagttttagtcaaagacaagacccacccaggacaatgacagccaccatgttaatccttcgtttatcctaggtagaagtgatagtaataatttacccggcatacttcttttccatcctgacagcgaccagctccaacgtgtcaacaatccagtacatgctagctcacccacaaggccacaaactaaaatggtgatccaaaaccaaaatttcacttatcaattaagcaacttatttacttacagtaattaatggcgatggtatcacccactgtttcttgggcacgtacgtaaccccggacgaattaggttgctttctctggcgaacgatcaggtctctttctttcgtcttcaactgttgtgtgggctccatggcataattacatgtcactgttcagacacagtgacgatcagaatcgttgaacacaaattctatgttcgatgggcactagccaagcagccaagagtatgaaactctgaaaaagaaaaatggagaggaaaaaatattgagttgagcttgctagctccagaatatcacaggcgcttgtcgtgttatcttgagggtggttagcattgcttccatctaaccgatatgggttccactcaaatgtgacaactcatgagcccaacatattataagcaaattgcaatcctgtcaagaacaaagaccccatcagtgaaggcaaagggcaaagcaaagcaaatataatggactagcaatatataaaaaaaactcttcacctagtcacagaattgtagccacttgtacaccctgtgatgtgaatgcaagggttctgtcatcaagccgttgtccacgtggattgcttatcacttactcgtgtgacattaccttggatgagttagaatatacagaggcttttctcagtggatgcttgatacactccaataagagactgaaagactccaagcacgcagtttcaatttggatattcaactttagatgcgattaggtgtcaactccagataagttgcagatcattcaaaagatgagcaccacgcatggtagtacatcaatttactacatatctggaacacatgatttacgtaatactagtaataattaaaacaaagatttgtatggaattcctagagatgaaactcagtggaacaaacagggtcttgcactctcatcttcatccatggacgtgttgtactgggagtttgaaaccaatagcatctttgacttgattactgatgcacaacgactaaatgatttggactaaatgatttggatacatagcttttgggacttatctgggcaggcgtgactcgttaatttaaaaagctcccatgcttggaacaatccaaagactgagggtagtacagccatcaaagaagaaatatgagaaaatgatctcaaattattctcacatatctttcaaaataaacatatggactacatcatacgatcgctcgctacaagtcactgttacgtcctaaagatactctgcatctcatatatgcttatatacataatattccaggctgatgtcaagatcaaggtttacttctaatttaatgcagtcttgtattcataatatatcttccgtccccttaagttccattagaccatagcaaattccatggtagctcagtagctcaccatcatagtatccacgtcactttaggagaaatcaccaaacgatttaagtacctgaattaattgcattcatgtgataaactggtgataatagtcaaaatcataaataggaaagattagacattgaagcgccccaagtatacagatgaatttcctaatttcaactagctgacttcgaaagggaaatcgaccagccaacacagcataagacaaccgtttctctgtttaacaaaccagaaggcaatctatcctatgtactatataggaccatagactacattgcagaaagaatctaggggcaactgccaactggattagcaaatgaatggagtacacagcagtatccagtaggaccagaatgaggaaatggttatcagatcagacgaatgataagatataagcttacagatttactattaattgtcagttgcataatagtctattgactgatagatgaggcatggcattcctagtccagatggtgctactctttggataaaccaaaataaggtaaacacaactactcagcatgcagcacctaataagcaaccatttttcccttgagctagctgagctgcagataatttatgctcatgtaggatgatagattacagggttattacttcaatcattaggtaagctgaacaaatgatgtggcacacaatacgagaatacatacagatctattggtaagaaacagttgatacaaggaaatttgagttgttaattcacaaatcatacctaaagcaaagcataaataaaaatccttacctttgcagttgggtcctctcaatgctccggtttcactttaacatcaccattaggcaaggcgctttgggactgagccagctgttttgattcctggataaaaacaaaatatttagaaatcagttggatataaaaacgaaagaattagtacacccagaagaactaaatatgcattctgataattgaataatgaagcttgatataataccaaaagatgatcaccacaacattgctggcccattggaccagctatgggcattcatatgcaaatcctgaaacagaaactacattccagaacttacagcagcagcagtagcgcgtatctccctgtatgcttctacatcctcaggaaaagcttgctccagctcctcaagaagatgcttccgcaggctctgaaacaaacaagttgcaaggaaaataattcaatttgtattactaagtaagttcaaatgaaagacgatgtcaatttttcatctgaatacaggaaataattaaatagtaatgtaaaaggttgtaaaagatgaatgcctgtaaccaaacaccatataagaaaatagcagatgtttaacttggagaaatcaatcatggatcaaattatagtttaaaatacaaactaacaatgttgatactccctactacattgattcttatatggcatattttaatttcaaaaaggccaaactttgtagattttgatcaatgattagacaaattaaaggaaccatttagttagtgtataaaaagtatatcaatagctttgtactttaaagtgatctcacatactattggatttattactattatgagtataatttataagaaatcaatagacgaagttaatgttgaagacttcttcaaattaaaatacagcatataaaaatcaatggaggtagtttataaaacgtatccatgacacagactaatgcagatcacaactatatgcacctcataaaaaaaatatcaaaaggctaaaaaaaatctgggcctaacagttatacatctatcaataaatgctatagaagtattggatgagaatttccatctatttgtttcaatgaggaccatcaacttatacagctagatgtaccagtgataggaatctgtctagctagtacaacaaactttgtccccacaattcgcctaaaattaattagagcatattgttggaagtcaatgagagcaatacaataagcaaaatgtgtacttaataactgactagctagacagaagatactagaccataaccaatttcactgggttaaaagggattagtatatgctcctggatacggtttggatgagaatgtttgaaatgagataagcaaggctcttgctgattcttttcattcaagtgtcattgattcccttgaaactacatttaaaccttcttatctaaaaatcaacataagactaataacacgaacaataacaccccttagggcggggggagcggcaattgcagtttggatcaagagtttccctttgaacagatctaaatctctacttagcaactgccagggaatacctaaatctctacttagcacctagaatcaaaatagcacatgctatgtcagcattaaccaattgtaacataccttgaaagcatcggtcttgcccttagtgacctggttctttgcgatgcagctgttgagcacgtctcgggtgaactcgtcaggattcttcccgtcatcgatcaaactagcaaaacaggcaccaatccaatccaatccaatccaagtcatacacccagaaccagggggcgaaaggggtactgagatggaaatcgaaccaactcacttgacgacctccatggggacctggatgttgcatccctcggcgtgcttctgcatcgtgtcgagctccgccaccagcgagttcctgcggcaaacgagacaatcaccaaccaaaccctaagatttctccacccactcacacccgcacaggaagggggagagggggatttgctgggagaatctcacaggcgctggaggaggggtagctgggaggcggagctgaaggaggagacgttgaggttgagctggtggaggagccccagcgtcctctggatcgaggccatcatcagcgccaggttctgcttcgacgcgtcctccgccctctcgcccccgccccccgcctgcacgccgttccccgccgccgctgccgccgcggcgactccagatgcgttcgtggccgcgccgccgtccattccgccgcgatcggagaagacgagagagagagagagagagagagagagaagagagaccgagacttgacgtgtcggcccaatatatcagcggcctattgctgggctgacgtggacgtaacaccatcacgggctcttcccgaagcgcatgggccgcaactccctaattcgggcccagtttaactgggccgtgctgtcctaggccgagaagcatcggaagtttttctttttctttttctttttcttttcttgctatatgctacttcctccgttccataatgaactttctagcattgcacatattcatataaacttacattatgagaaaagtactaaaatttagggatgcaagtgggtagtcccgctatccgtataaaaacccgcttgctagttcatttcccatatagtagtataaaatttagaagaaaaaaataaactagaagaagcgggctaaaaaaacctatttgcccgtcccgcttgtatccctattacatacaaaagttggaaatattattagccatgcaaaggtaaaaatggagattgattggttggtgcgtgtcccaccatcatcaaatcataggttgataaccagtccatgtacagtgcacatacgcttcctcgtcggtattcatacgtgttacatatgacaaacaaacgagataacgagataagcgtcgtcactcggtcgctagctagctagatagcttaacttgctttgtttggaggcccgtctccatcatatccatccaatctgatctcatggccgctagctgcagggtgagtccgcagtgtgagtgatcagctgactcgatcgatgtgcatgcatggtgcatgcgaccggtgcaacgtaccgtacgttgcgtaccctgccctcccctgccggtatacgtgttgtgccactgccacgtcagtgacaacagtctcatcgtttggtcaacagctgatgactcataggaaaataaacaaaacaatagaataaataaagctttatttgtgttcttgatgagttaaaagtggatggtgaaaaataaaccatcgttaagaaaagaaattcaaaaaaccagctcaattaagttttagaacacacataaaactaatttgattgtggcttataagctaacaatcaaacaattgggctgcgagttttgggacgacgccgtacgtcgtgtaccatacaggtcatgtcatcagcaagagctggccaaagttgaggacgccgactcgcaaaccgatcgtccaagctaattattaagctagctaatcgatcgatcagtcgaccgatcgagagatcgccgtgtgattgcttacgtgcatggtccctgcagctagctaactagctagcaaaaacgtacaaaaagatcccatgaaaactaccatgtaccgacgacacgtacgttaacgttacgccgtggcatgggcatcagggcatgcaactaggtactagctcgatatctcagctgttggcgagctagttgtgcatttacacttaggacttatttaagagcttctaactactaaacaaaaaattggaaaacctagtttttttttaaaaaaaattagaaactaactatcaacgccgccagttactcctcagaatcttgagctctcgaaataagcccttaaacagctagctagctgagcacaagaacgacaaggccggccagccggctccctgtcgccgctttgtccgagtggccggccggcgagcgaaaggggcttgcgcgcattggattaactacgattatattccgacgattttagcaaggaaaagaacatcagcaaggtaacaaatttgcaaagatattcgcttctcgatcgagatctgtccggcaatcagctggctggccgatcgagacgatagctagctatagcgcagatcgccgtcagtccaaaccaccggccgtcacccgcacccacccgcggcgccacctttataccgcgattcgatgcgatgcgatgagatgagagatgcttcgatctctctctcccctcgccggcgcacccagcgttccgggcactgacccgccgcccaatcggctgcgatattcgccgtgcacctccgctcacggttgctagctagctttgtaccacccttacccgtgccgcccattgcatcatcgatcagtacgtacacaaaaaaccggaataagttcgtaccgcgtacgggcccggcgatcggtacatgcatatgcgcgctgctagtggatcgccgtcgtcgtcggcggcgtccgcctcgtacgtccacttggccaccgtgctggtgatcgatcgatcgccggatcggaggcaggggtatatgcgtagaggtaggcatctcgtcagacacaagtagcttgacccgtgtggcgttcatggcggggccccggggttggatctgataagatccaccgtgccacagccggcgaatcagccagctatagctaccctcgccggcctctgcatcgcattcgctcgtggctacacgtgcggctgcggcctgcgctgcggcacaatatctggaacaaaccggccactcgcgtgctccgccgggcgccaataataatgcaaaatcacctcgatctttacttgcacccggagccccgcactagtggagaaaccatctttggtcgctagaccaaattccacaataatactggttccattaaaaaccgggactaaagatgatttttagtccggttcatcccctgtcagatgtatgtcaggggccgaggatctttagtagattaccactttagtccgggactaaagattgatctttagttccggttggagttatcaaccgggagtaaatatttctctcccacatctgatcggttaagtcccagacagatatttagataagattggatcatcccatctcttcctcttctcgatccaatccccttcctcctcccctcccccctcttcctccccccttcctcttctcctcctcccctctcctccctcccataagccggcccttcctcctcctcccctctactccctcttccatcagccggccggcggcgggcggtggcagcgcggccgcgcggggtaggatggcggcaggctgcgagcggtggccggctcgtttgtttttttatatataatttgtgtttcactatatgtatatttttttagattttgtgattcattgcatcgcatggatctgacatgtataatctgtgatgtatttaatttatgtgtagttttttaggatttatgatgtatttgatatgtgtgtaggatttgtgatgtatttgatctgtgtgtatgagtaacttaatatttaggatgttgatttgggatatgcatcccactcgatttgggaaaaatatagggattaactctagccattagcaaatcaacaatgaaaaaaaaagacctcaagggattgccgctacccctcttcagggactaaagattacccctctttactccaaccgggactacctggattcgtagtcccggttgaaaaaccgagggttctaaaccgggagtaaaaaatatttctccaccagtgccggacggcggatcacagtgatcggcatcaagaattaccatatccacgtattaattccagcgtccaaaattaccaaagccactcaaaagaattagttataattactatacctccatattaaaacataaagatttttggaagtagttatataatattcgatagttttttgaatgaaaaactttcaactgcaactactatataattacaattacaatgtagttgtaggagtaccatgtaactacaatataagctatctgtgactcaaatgtaacttggaagaatttgatggagcgattggttatttcaatgagcatgtagtctgtaggtctcgggttcaattcttgtagtgagcgtgtggttttttttttccattttttccaccacagcacaaagctcaaagcatatcggacggtttaaagtttgctgcaggtctcgggttcaattcttgccgtgagcgtgtggttttttttttcattttttcctccacagcacaaagctcaaagctaagcatatcggacggtttaaaatttgacagttttcacccctgaaaactgtggtgaaaactgtcgacagtaggatagcaaatccgtttttagattgtacaaagatatttttaaaatatgtataattaggggcagactcacacctcagatcactcgggccatggcccgaagactgcccattaattatgatggatatattttcaccatgtaatcattatgcataggctaattaattatgtggatatattttcaccatgtaatcattatgcataggctaatgtgccttaccaattttttggcaacttaaatagtacatgtgtttggattgagcacaaccaattggtagtgcccatgttttatttggccaaattatagaagtttttcactacgataccaaaatttggcttcatattgatcccaatcgaaacaagaaccatataactttaccttaacgaaatattagtagtgctaaaatttgcctagattttggcactagtaataaattgttagggtaggatccaaacatgcccttaactcttttataggctagccctgaccatggaccaatcctagatcacttcctaggtggaactaaatgaaaaagttatgatttgttaagaacataagtagatagagaagttatattttggtataaattttaggaactgcctatatgacttttgacatgaaaaaccccctcaaatgttgtaaattttgaactattggatcactttaagatttgtgcaacatagccaaaaccttttctttctccttcccttcctcagtcccgcttgcacatgcgcatgcacactcctcctgcgccggctgcagcccggtctcatcggatggtcggaattggttaacaataccaagtcctctctctccggccggcctccccccttctctttcgcaaagctatggtgcccccacccaaggtcttacccgtctctagccgccggatccttcatcaccagtcgttgcctcctctacagtctcgttgtttgcccccgtcttcaacgccggcccactgcccactgccaacccccatggctccaacgtcgttggcccgtgtccaccacccatcataggtcctctgctgtctatggcgatccctctgaaccccaaggaaatccttcctcttccccatctcccaacgctcctacccaacctaatcttaaacccaaaccctaatctatgtctcctctgtcagagttgggaaatatcgtcggggccggaaagagggggagctcactaaagtcggaggataaaaagcttagccacaaaaatttagtgcggatcggatggtccaaaatctataagattttatttctaaatttttatcgaatgatatgtagcaaatatgtaaattttaaatgctggaggtccggatggagcgagtacgagcttgattagtaggggtggtcccactgcacagttgatgagcctaacccaatgactaggatggtatctatagtattaaataagttgccatctaaaatgaaaaatgatatggcaagtgaataaatgaggaaagagaaggaaaccatgtcttgcatgagacatggtttctacacaacatctaagacatcatgtggaataagtagcattaaattaaagtatggaatagttgtgtttgcattggaagagtagtgtctagcactagtttcttgatgatgtggagtttatggaaactatgtctagtgtcatgtgttgggaatgacctaccattctcaatccaatgactaggatggtgtccatatcattaaataaactgtcacctagaatgaaaaatgatatggcaagtgaataaataaggaaagagaaataaaccatgtcttgcatgagacatgatttctacacaacatccaagacatcatgtgagataagtagcattaaatttaagtatggaatagtgatgcttgcattgaaatagtagtgtctagtagtactagtttcatgatgatgtgaaatttatgaaaattatgtgtagtgttatttaatgaggagttacaaaatcttttcttgtaatagatcttaacctctggtagataacctagaaatggttatattatttgtggatggaaggagtacaatacaaggttagcatcaggatttgccaggtatgtgaaaagagagagctgatgatccaaatcaaaaaacttaattaacttactccccggaattaatcagctgatggatcatcatcactcatgctccttttagtttcttttgaggaaggcatcactcatgctgtcatccaatattggttgctgtttcttgctaatatgaacaaaacagtcgctatattatatatgctcgtaaaatattgatgcgttgtgagtagaacgcaaagaaaaaacaataggaatcgataaggactcaaacacttatctaattgtaagcgtcttaaaaaaccgcactgttcttttcgtccctcgtatgcactagtaggattcagaacttcagatatatttaatcatgctctcatccctcgagctagaataatatacaatgatgaaaactaacttgtgcttgacatagacagagaatgcagaattttcagatcaaacttactgtaccatacaagattagccactcacagctcatcgatgcaataattgattctagtttatagcttaacacctgatttgtttatggtaaacatggatgttttcctgcaatggaagcaatcagtgtcgatcaagcaagattgccacaacaagatggcaggaacggaaagagcatatctaaggaagaatcttgatttagtcactcctcttcagattaaaatagagttggtccatccatatccacaagccttggaggtgttgttcacccgttctgcattttttttttcgcgaaacctgttctgtattttgcatgtccctctcttgaccacatataactgaagaacgttgcttaattatttcagttaaacatgtagtcaggcaagagcacattatgttattgagtaagtgagtcacctagttgacttgccacgagtcattttcatgtgtttttaagaaatggacataatggtacaattaggggtgcatagggaaattaactaatcagctatacatactaattagtatagtaacaaagcaagcctttggcgtccacaggagactaacagaatctagctagcaacagatcagatattatctatattggttgaagcagctcttgtctgagagcatgtcactgcgtcacatactcgcatgtattgtcgatcgatcgattgcaagaagccaagaactggtaaaaacggagtagaaatgaatgcctgactacagcctgagtaaccccctatttgtcccagctgtttggtgtgtgatactatatgtgtacttgaaagttctatctttccaagaattaatgaagctgcgaataccactgaccacataacgatctgataattaccttgctgggcactttgcctgttctgttcatgctgcaccataactgaaaagatatcacacaaaagcagcagaagaatgttatgacagtgctgagtgcttgcctcacaaactcgtcacccttacgatcgaaatcatgagctaattaaaacaagtccagcgacaaagcatgttgatctctactattattcttaatttggtactagtacaaaatgtgacgtataattttcctgaaccatatatgtatgcaacaataatctaattaacacgcgactgcaattccccctccccgggttcgtatcctctgcatttgggaccaaaggcaaagtttgccgttggttccatccaggacatccatacgtcaatcaacggttccatagtttagcagttagcacccttttagtgactaattagcagctaattaactaatagagttgttctctcttaaaaaaaaatcaaggaaatgatctccagcggtaaatcaaatacaactaatacctgccttgccttttggaaccaactcaaaaaataagataaaatcaagaagcaaacaatctcaggacaagaaaaatcctttatttatacagtagtaaaataattatgccacgtccgtatgaaacatctagcaattctaatgctaaaatcctcccaaaaaataaacatttattttgaaaaaactaatctgtctttattgtacaagagtattttatcataagaaaattaatagacagaaccgatcttgttaattaattggactaatatatagaaattattatattatattaattaattagctgttaatcatctttgaggtgctaaaccatgctaccgttcattgaagtacggatggtctggatggaacaacggcgaaccttgcctttcatcccaaaggcaagacgatactgaccccccagtattctttttagttcaaattttgtagaataatataaatattcgtagggaactgatcctaatgaacagaaattcatccatttaggcaatcatatcctcgagggggtaatctaaacaaatttaaaattggactactagtgtgtgttaatcttagtatttactactccctccatcccataatataagagattttaaatttttcttacaatgtttgatcactcgtcttattcaagaaatttgtgcaaatataaaaaacgaaaagttatgcttaaagtattttagataataaagtaaatcaaaaaaaataaataataattcctaaattttttgaataagacgaatggtcaaacagtgcaaacagaaacgcaaaataccttatattatgggacggagggagtaaataacttgcatatgttcgtatccatgggacggacatgcatgataggtgcacacttaagtacctgacttggatcgagttgttttatgcatcaaccttgcattatttgaggaaacttttttcataccttaatgcaatatcctcttatttttacatgcatttaatattttttagaaacatagtataaacacaaatacttacaatgcgcgcacattcaccctatgaacctatgagggccttcattgataaagtcgacacggacgcctcactatcgatgggtacgttgcctaccacggaaagaataattagctatcaacgcgagcagccatgtcaaatctataatttaaaccagatgagctagttccacaacaagaaacctacccagttgagttacactcacttcgctatatgcacctaaattgttattaattttttttaaaaaaaatgacatgatatattaatataagatatttcatgtcacaaacgtaccaatttaaaatcaatatatacaaatagaaataaaaaaacaataaatttgaatgtgaacagtgcgtaccattcgcaacgatatttattatttttttataattgtctaagttaaatttaaatttacatatttgtgaagtctatcttgttaatattttaatttttatcacttttaaagtgataagtacaaaacaagggaatatcctcatggaatggatatatgtctcccatcactgtagtgatatttggcatggtgagttggtgacatttctagccattcgatatttatttagtaggagtaatcacaaagtttgtttaatggtgtcgctaaatgcgtgacgcggtactaatatatagaatgacattatgttgcatcagctgggactccctgcccctgccctgataacctgatccgtatatctgatcattatctgaagatgtctagctgcagctatgcacacggaagaacttgcgtagactttcacaatcttcagctcctcagacaacctggattttcctatggatttcgaaaatcaatagctatagtatttaaaaattgaactaaaaactagaaacggaaaaacttctcacccgctaactactcatctcttaacaatgaatcctctaattcctgtttggcacaattccagctccagctccacctccatcctctactagaaaaaaaacacttttaccgacgttaggtatttattttcgcaggcggacatgaccctcggagccaaatagccgcctacagaaatacaaaccggggtgaagctcgttgtccgcctgcgaaaatagacttggaatataaatagagccaacctatagggcctattttttttcaaagtcctcattctccctcattcctctcccgcgttgtaatatcccggcctagggcttaatagaattaatagaatattcatatcaacaagttacaacttcttttccggaagccgatctcgaaagaactttgaacttgtgttggtttgtgagggtagtttatgacctatgaaagctgatagatgtaagcggacccgacctggaagaggcgggacgttacaagtggtatcagagccgactctcgcggttacacaggcgcgtgtgtcgcagttgcacaggcatggggctcatggctggtgtggactcggagtggtcatacagcatggcacatgcgctggcactggatgcacggacgtacgttacaagtggtatcagagccgactctcatggttacacgggcgcgtgtgtcgcagttgcgcaggcatagggcgcatggctggtgtggactcagagtggtcacacagcatggcacatgcgctggcactggatgcacggacgtacgttacaagtggtatcagagccgactctcgcggttacacgggcgcgtgtgtcgcagttgcgcaggcatagggcgcatggctggtgtggacccggagtggtcacacagtatggcacatgcgctggcactggatgcactgacgtagtcaagaggggacgttcctagcctggggttgaccgacgaggacgtcggtgtcttaagagggtgaggatgtaacatcccgccctagggcttgatagtattaatagaatactcatatcaacaagttgcaacttctttttcggaagcccatctcgaaagaactctaaggttaagcgtgtttggcttggagcaatttcaggatgggtgaccgatcgggaaattcttcctgagagtgcgcagaaaagacttgtgttggtttgtgagggtagtctatgacctatgaaggctgccagatgtaagcggccccagcctgggagaggcgggacattacacgcaccctccccttccccctcccctccacgacgttgggcggcggcggcgcggctcccctcccctcccggatccggccaggggagggcggcggtggcggcattgtttgtccagaggattttcgcaggcgggtgactaggccacctgcgaaaatttatatatgggtgacgggagcctgcgaaaatgatttttggttgcctgaaaaaaatgatttttctagtagtgatctctcctgaagctggagttcaatcaaacagttttagctccacctaaaatgggagcggaactgggtggagttctctcacaaaatgaactagagaggtggagctaggtttagacagctcaacaacttcactcgagacccaactcctgtagttatttagaagttggagctctacaaggccctagggtatgtttggcacggctccaactcgagttttagagctcagccaaacagttctagctccacctaaaataggagtgaagctgggtgaagcgttctcacaaaataaagtagaaatgtggagttgtgtttagggtgttctccaactccactccaaatccaatttctgagctaaatttaggagttggagctgtaccaagggcatgtttgatacagctccaactactaaatataactccaggagttgagtctggaatggagttatggagctgcataaacccagctccacaactccagtatattttgtgagagctccacccaattccactcctagttttggtgaagctgaaactgtttagctgagctccagctccggaaggggtggagctggagctagagctatgccaaacagaccccaaatactactactagctgcttttaaaaatctcaaaactcttcaaacagcgccgttgcggcatttgccagaggacttcatgaagcacacgatcgaacgagcgacaaattaaacaagggatacggaggaagaggtcgatccgccgatgccgttgcattggttggtgagcagcatcatgcgcgcgcccacgcccgcacgcgcacgagccccgcgtgagcgacgcagcgacggcgcgtggccgggctagctgtgggcgagcgcgcgccgagccgaccagccgcgccccgcggcgcgagcaccatgctccgcgcctacctagtattccgatcgtagacaattacacaggccgacgcgacgctagcctctgcacctgcatgggcgcgcacgcctcgctgccaaccggcgcatccgtgcatggtaatcacgtgcaccccacgccgcctcgcccccctgccccttctcccgcacccctaccaccaccgttcgtgtacgtgtcaccgccgcttccctctctcccccgtccttacgcgtgcccccccactctcgcgcgcgccgtttcaccccctcaaaactttcaccagcttgtgccatgcatctcgccaattcgtccggttgagaatcctctacgtgaattctactcttctactgctttacgtgtcactgcctataatagtactactattatgcccagttcgccacccaaaatatctcgtcttttcatctgccgaatcgccgttgaaatgaaaacagctagtagtactactactcgtagaagtgcgttaaactgtataccgtcgctcgcgtcgcgcgccgttgacgactttcccgcgcctataaaagccggcgcctcgtccgtcattccgcctgtgtcaagccgaagcgttgagctaacgaacgagagtcgtacgtctctagacagtcgagtcaacaatagtcatggcgactccggaggacactggcagctggctgctctacctctccttggcggctaaatgctccggcgatggcgacggccagcctcaccggcttcttgggttcgtcgtggtttgcgccgtcgctggtctggttacatgtctgctgcactggtccttccccggagggccggcgtgggggaggtggtggtggacgcggcggcggcgtcgggggtcgccgtgcggtgtggcggctgttcctgggctgagggggctgccggtgatcggcagcatgtggctcatgaccgggctggcgcaccggaagctcgccgcggcggcggaggcggcgggggcggggcggctgatggcgctgtcgctcggggagacgcgggtggtcgtggcggcgcacccggacgtggcgagggagatcctgcacggcgcggcgttcgccgaccgccccgtgaaggagtccgcgtacgggctgctgttccaccgcgccatcgggttcgcgccccacggcgcgtactggcgcgcgctgcggcgggtggcgtccacgcacctcttctccccgtggcaggtcgcggcgtccgcgccccagcgcgcggtcatcgcgcgccagatggtccgcgccatcaagctgcagcagcggagccggagcggcgattccgccgccggcgccgccgtcgaggtccgccgcgtcctgcgccgcgcgtcgctccacaacgtgatgtggtcggtgttcggccggcggtacgagctgcagctggaccccggcaaggagagcgacgaggtccgggagctgagggccctcgtcgacgaaggctacgacctgctcggccagctcaactggtccgaccacctcccatggctcgcccgcttcgacctgcagagcacccgcgcccgctgctcccgcctcgtcccccgcgtcaaccgcttcgtcacccgcatcatcgacgagcatcgctcatctgctcccgtcgcagccgccatcgacttcaccgacgtcttgctctccctgcagggcagcgacaagctcgccgactccgacatggtcgccgttctctgggtgcgtcacgtcaccgaagaacccaacctttctcgccggcgactacctctgcatgttttctcatcggttttctgatacgtgtgcaggagatggtgtttcgcgggacggacacggtggccgtgctgatcgagtgggtcttagcccggctcgtgctgcagcaggacgtgcaggctcgggtgcacgacgagctgggccgggtggttgggctggaccgggacgtgaccgagtccgacacggcctcactcgtctacctccacgccgtcatcaaggagacgctgaggctgcacccaccgggcccactcctctcatgggcccgcctggccacgtcggacgtacacgtggacgggtacctgatccccgctggcaccaccgcgatggtgaacatgtgggccatagcacacgaccccgacgtgtgggccgagccgatggagtttcggcccgagcggttcatcgggaaggcggcggagttcagtgtaatgggttcggatctcaggctcgcgccgttcggatcgggtcggcggagctgccccgggaagagcctcgccatggccacggtggcattctggcttgccacgctgttgcacgagttcgccctcctcccctcgcccgacccggcacacggcgtcgacttgtcggaggtgctaaggctgtcgtgcgagatggccaccccgctggcggtgacagcgtggcctcggcgtgtggtgtgatgacgtgtccaagctacgtcatcagagatgctccttacaaagactacttgatggtgccttgtactccctccgtcctaaaaaaaactcaacataggaggggatgtgaccccttctaagacaacgaatctggactgactaacgacgcttagtccagattcgttatgttaggaggggtcatattcccttctaggctgagttttttttggacggagggagtagttgtagcatatgctttagatgctcctgccactacatatataggatgtgaagtgctgatgctttttggacgcctggtcagcctgcaccggcacaaaggccacaagggtgtgtatgctggcgaaatgaggtgactgagtgtgatatttttgttttgtactgttctcttgctaaatattaccctcggcttgctctgtaaattagtctcaatggtatggaattgtacatctattttactgccaagactcgaaatctccatttccttgcaatgctaagctgaactgtaactgatttggctcacaaaggaaggaccaagaacaatccctgacaaaacatctcaaccataaaattcaggagttaacaaaagcatccgacaatctgaagcatgactagatccaagcatatcctgaagacctgaacactagattttattccttcagagttcagactgtaaactagctaaccagccacttattacaactggtctgaactctgaattattcccagcttctttctctgaagatggcaaccgtttggggctcttggcagatagcttcttgtaaccgcgctacctgccatgaaatctgaggacaacaacttggcatccattcctacccaagcgcgtgcctctcttatctcccaatttcactgccgaaagttgccaagttcactagcgggtcgcttttctctcgaggcacaagttgaggcgctaagctacaaaactgaaactggcatcttgggtagaaaccgatctgtgaatccgacgcatgatgttttctagtaggaggttcagtttaagtcgatcggcagaatgtatcactgtctttgcttcatttttggtttctttcatgataaaatccagccgatcgaattgccgcgcaatcgcagtctatccataatccttaatatagcagtcagtgtttatttgtcactgaaatgtggggttgaaatggccaaatgttacacaggaacagataaggatcatgtcaagcatatgatatgtagtttttgctatgcagcagtagttaaaattgttgcaaccaattactcaagtcagtttacttttcactcatgcatcatgcatgctactacatcaccaagacaggaagcactattaattggtaggaaaatcacatgataagtacagcatattattgatgagagagcacctagtgcatgctcaggattctttaacaactctgattagaagggttttaggctttcagcaagtgtataatgtatacgcagaggttctgatcgactgagtcacagacccataaatccataattaattctggaaagggattgctcaagcttttagaacagagattaaactcaccaaatcaatcatagtgcagcaattttgctgttgtcagacgatctgtgtccacttgctgtatctcagtccaagtttgtggtcagattagacagttaagcagccggactgattgattgtgtagcttagaacgactcagattgatttatgcaggcccccagctaagctacacaatttacatatatatcatcattagtatgcagctgtttcgattttgcccaaaagatgcatcatgatcacgcaggaacaacatggcttcacaacaaaggatagagcaccttacgatggtctgtactcctccctccgtcccataatataaggattttgaatttttacttgcactgtttgaccactcatcttattcaaaaaatttatgcaaatataaaaaataaaaagttgtgcttaaagtactttggataataaagtaagtcaaaaaaaataattctaaaattttttgaataaaataagtggtcaaacggtgtaagcaaaaactcaaaatcacttatattatgggacagagggagtattatttcactgcagtattatcaccagcagaagtgatctcaatcattcaattgtgagttttattactagtaaagaaacatatattttattataagtagttgagatggtagtacagatagaaataaatacgatatatggattaggaaagatgaagtcgaaattaattctaatactactataaaccatctccaaagggttattattatctttagaccttttatgaataagaaaatctacaggacggtgtttgtgcaagataaattaatgagatacttatcctttcctcttccctcgctccatcctcctccgccccctcctgtattttcccctcctcctcctatgctcctccttctagccgtagacaactacttcgtagaaatgcttagcgatggtggagcaggccaatgaagccagattataggctagacccttcccacctactggatccggccgagtgcacgtcaataacaagggcggttgccagcatcattctcgtggcctcctccagttcatactttgaggcataacggcatccatctaatctggcttccatggcgaaagggggcgaccaggaagaaggaatgacatcgagaaagatgccaatcagcgcattgtcgatggtgatgcaagggagaggccaataaagttgttggacttggagtttcgattcacaacaacatggtggtgagcccatcgtgctccttgccggtattttgtgcagttgcggtgcattatccttatctggtacctatggtatcacagctgatacctacggggtatcaagtctatcagactgtcactagcacctcctctcctcttctcccttccccttggctcaacccttgctccctgttattgttgtcgtgacgagcgtcattgccaatagggatgcaagtgggtagttccgctacccgcataaaaacccgcttgctagtttatttctcacacgatattacaaaatttagaagaaaaaatgaactaaaagtaagataagcgggctaaaaaacccacttgcccgccccacttgcatccctaattgccaacgtagccgctgttggctcaaggtgcggggcgtgagtgcgtggagtgagggtaggattatgctagactacgagtaggagcggatacatggaactacgtcaaccttcataaagtatcctgttcggacgatatcccatgctctagcagctctctttatgaacagaaccatttgttaaacatacggtttggtctatctgttggaattaatgaatgggccttagcccactcgaagattaattctttggaaaatcacaaaagcccacctcatgggatggcatgcatgtggagtttagtaccaccttgcttattctaggagagggggacctccttaaaagggaggatgccctcctagtcgcttgaagcatgtgtggtggagagaagaggggaaacacacgcgcgcgctcgctcgcctcgcctggcagggcagggcaggcggcgcgcgtgcacgacgtacgcgtcgaatggtccgaaaaattggctcctcacccttgcgcagatgcagcctccttttgcagttttgttttgttgcaaattcggattcgtttttgttttggaaacgttccgaaagatccggtgcgtgcaaacggcgtggagtccggataagttacgcgcgacttatccggttcggttacgcgcaatagagatcgtgcgggcgccctgatcaagcgacccttctctatataaaccgacctgccgtcttcacgcaacatacaaaaaaatcaatctagggtttgcttcctactctgtactgcgccgtcgctcgtagactactccatcccgctcgccggcgtgcaccggcgatcgggagagcaggtctccggaacctctgccttcgacgttctgcaccgggagaaggcggtaataaggtttttgggaagcgcttcgcgcgactgctccctgttcgttcgcgacggctcgccttcctcttcgctcgcgtgtttcgtgccttcgtagacacttgcgaaaagtttcgaccaagcagccggtctttccgtcacctcggtacgtgttcaatatgttgcgcatatttgatctattcatgttatactgtgtagtttacatgtgtagatctaatgatgcgttcatactagttttcatctgtaatgtcatgatttatttatggaatagattaaatcattatatgtctataatctcaacactatcaactacgagaaaaaaaagacctgcataaaaagcaagttgtgtaatcatattctaatagtcactaaaaaagggcagatataaacacaacactcagaaacagcaaacgcgagacagcacacttttctctgaaagtaaagaaaagctaggaaaactcttgaagctgttgctatcgttattaggtctcgacgtccatgtcgagccatcgagtgtcacacacacacgctttcctgtactatgttcagtgcatgcagtacacacttgccactgaaaatgcagcactaaaaacaaacagttacagtgtatttttaaactgaaatttcactggcgtaaattggtcacttatcgagttcaaaatttcagaagttttccaatttatccaaagtataaattttgaattgtatggtgtaagattagcggtagaagttctcacatttaggccaattttgaattggagcaaaagcaaagaaaaccaaggatttgctttcctatgtatttaaccactgtaacatcgtttggatcaacgtaattaatggcacaaaggaaaatcgaaggaaagcataaagaaagtttccttccctgtctattccagaggaaaagaagaattcactcagagctcttgattttcttttcatcccttaacttttcgcataatgtttgaccattaattttattgaaaaagttagtacaacgttcgcacaacattagcagcataaaatcctctaaaattcttaatttttcatatgttccattcaaatacatatttatatagaattattgtgtttttcaatattctgttttacacgggcgttcctatcggtttcatttctttttcttttctatcatgtatctaatcctccgatcatttcagtggaaagcatcgtcgacaagcctatccgtttggtgtttggagctcggacactagtattctgcagtcacaagtgcaaccttatgacagtgcaatgtaatcgagtgaggtcagctacactgtgaggagtatgtttggagcaaacaatttttcttttttgtagaaattaatttcacagtaagattctgtcgaaagcgcaggagaggtcccataagaatttgacagaaactaatttaatttagtgccaaatatatacacaaaggcggttacaaagtacacaaccatccaaaaatatagctactttagtgtttaaatgtccctagtatactccctccatgccatattaatcatcacataaaaaaaattcagaaatttcaaactgatcgtcacataacactgacatcttcatttgacgtgcagtattattgtctatacatgcaaattaagtttgcatgaaatgggggtaattaattagaacggtcccaaccctccacatgagctaatttctatagcattaaagagtaaattgcacccatagtacaacaatttagcgggtggctgtgatatagtacaagaacttaagaattaaacattcgagtgcaacaacttgacaagtgggtgtgttctagtaaaagaacttgacaatttagtattttggtgcatcaacttagctaagcatatgctaggtgagtttttttttcacgatgtcaatatgctgttacatagcaatcctacagatattatcttacaatattaaatttaatctttaagaattatactgcacatccaattaccttcaagaatttttgttttcttcaccttcccaaatctcaaccgaaatataataatttctacatccagtttaattgactttcagttattagttattagaataaaaatataaatatacttatatacaaacccacgctagtatattatcaaaataagtacttaaaaatctaatatgtgtaaaaatgtgctccaaataattaagttgttgaataacttcttaacttattgtatcaaaatcatacatatcttgtaagttgttgtatttatacgatcacttatgaagttcttatactaaattgtacttatctgccaagttgttgcactagaacgctcatttctcaagttcttgcaccaaattgcacccacctgctaagttgatgcatcatgggtgcaatttactcatcattaaatatattgtcacataagaaaaaaataaggtggcaaaagagttaatgagtagagagggaaaaaagatgaagaaaccatttttatgcaacaaactagttctacataaaaaaaagaacaaggggataggaggatgaggagagagaataaaggtgattggacaagaatattgtcagggttatggataagtcataccctctatccttagggtcatgagacatacggatacggtatatccataagtacacgaaaaggatctgtataaatcaaggaaatagtatttgtgaaatggaaagtaacagagtcctactcggagaggattaggatatagtttggtcgtacggggtccgttgtctccgacttctacttggagactaaggtgatctacggtataaatacaaaccccctaagggatacagggtatcaaatcttagtgcaagacacctgccaccatagacgcaatccggaggacttgaagcctactcgccgatagatctcgttgaacccctctcgacaaggatctcgtcagtaatctcagagttcagtcgttctcttctgtactctctgtggtttcttccataatcttatataaagtggattagcgctattaccttacgaggggtctgaactagtataatcattttcttcttgtatgcttgatgtcgtatcgtttagatcctcgtaccaacgtaccccaataccctccaaatacgatccgcgggtatcccccgtcgacaaatatattttgaagaaactacttattgggtacatagtttctatatatagtgtctatatgataaggtaagtatggaaatcactatatgatttctaggttgggattgcccttaagcactctttccttgtgcatatgaggaagtttaagtctatatgtttcttgattattctctaccactttttgtacaacaggtaagtctttcgttacccagcttggaaaccaagcccaagagacaacataagtgcatacatgaaaagcagacaagagaaccttgctgcactaaaagtgaaaaaaggcccaaaagggcagaaccatagtaaacaactacactggggctatgtcacaccccaaagttctttcccaagcctaaattgaagttataaatggtctcaaaaaaatacttgtgtaaatcaagagaaaaccttaataaattaatgcaaataataatcagaattggcatgtggaatttttcttgagttctacatgtcgaaatacgctaacaagatttttagtggaattttcagagccctagaaataattttaactaattaaaattgagcaagcaatattttaattccagggaaaatccttttcttcctttttctttttctttttcccccttttcttttcgagtgggccgccggcccattccccttcctcctctcccctccgctgggccagccgaaggccaaggcccagctaggccggccgcctccctcctcccacccaggacgccgacaggtgggccccacctgtcgggcccgtctcctacctcgcgcccgcgccgccgcgcccgcaaccgtcgccacgcccacgcctccgcctcctccgggccacgtcggtcacgcccgcgcatgcgccgcacctcccgcgcccactcccctctctctcccgcccgcgcccgcgcccgagatggctgggattcgattttcgaatcccgcctctctctctcctctcccactcccccacgttggccggcggaatctcgcccctaccggccacgtccgggactcccctcccctatttaagctccgccgtcgccccctctctctttttccccatttcgtcgaactccctcttgctccccatcgctcccgcgccgtgcacccacccgctgccgcctttcccgccgctccggccgccgctagccgccgctaggctcgccgccgcaccgcgccgtcgtcgccgttgggttcgcaaggacgaactccaccccgtccgcccttccttcgtcgggattcgtcgccggaattcgcatcccctcgcgctccggtaagttctacctctaccgccgccttcggccatggatgccggccgccgtggttcatctccctctctctaatctctctctcctccttccttagggcaccccgaagcccgtccgccggttgccgtcgtcctcccgtggcttgccgtcgccgttcgccgtcatcttcctccgcgccggccaccctcggtgaggcgtcctctcccctttactcccctccctctccctcctagtgccgcgccgccgcttcaagtcatgcgccgttgccttcggccgccaccgccgcctcccgtgccgccggtcgccgtcgccgtcggccgcgtgtcatcgccgctagccctggccggccggccggctttgatgctgagccgagcccggcggccacctctatcgccaccgcccgatcggctcggggccgatctgggccgtcggtcccgtggaccggcggtggatcaccctgtggtcccggtccacggtggaccgcccccccttgagccgctgccgagtggggcccacgtgccgccgccccttcccctctctcccgagccactgaccagtgggacccacccgtcggcgccgcccccttgatgatgtcagccctgggaattattgcgcaataaatgatttaaggactttttgttatagtaataaacacagtgaatcttctaaaattcataactaattcatccgagctccgtttaagcccattcaagtctcagtaaatcaagaaaaatgtgtagaatccattaaaaatggttttgttctctgtttcagtagtcttatagcctgtttgcaatgtttgccttgtatgtcgctagattccggttcttccgacgctccggtgtacttcgaaatagtcgccgaggtttctccagcagcagagcaaggcaagtcatgcttgtcacttgatcatgttgatactatattgcaaatgttctaatgttttctttcaaatactacatttgttttgcaatatcactatgggatgtttacctattgttacagccatgctattttggtaccctgctccttttttagcttgggttataacatgaatagacgttggactaggagttgcttagccatgcttagttcaactagtacacagtggggaaaatcctattaatgtttagactgtaggttcatatgataatgttggtttagtaccaccgctttggtgttggttaattaaaatgaatcacacggtgggctgtgggtgcatgattttgctagtcgcacccatggcagttaaggaccggttcgcgggatgccctggaagaacttatcgtacttaccacaagccagtgtgggcaacggctgggcttgtagtgtagctttcctctagctgacgcatccaggcaagggtgggcgtgatggagcggggcgggccctgcgacggcctctgtcgcttctggattcacctaggtacgagaggggactgcccgctgccttgcgaggagtgggggtgaaacctgaggtgtggtgtgcttggttagagggggttatgcaaagggtcctgtcacggcatctttccggtatgtcgtggtggcatgtcggcgcacggaaacgtgtcgtggggctgtgtcttgtgggtacagttgtacacctctgatcagagtaaaactattcgaatagccgtgcccgcggttatgggcggtcaaccagattcaccgtgattagtctcaccctagtttagtctaatgaaattggatagtataggtggatggttgggcctgttgcaacgtgggatggcgttggacagccgatgatcaatattaattaattattgcaactgtttaattctttcaacttctgtttataaatgctcgctttatgcaaatgaaccactttagctctcttttgataattccctacatcatacccctattccggtatgacttgctgagtacagtgggtagtactcagtcttgctctattttccccaaccccagagtacgagtatgtgtcagatggaggtttctccgaggagtaggcttcgtccgtgccatcgaggatgcctgtggagtggtgttcccgctgcagttctagtcaaggcttagctcctgttgtctttcgtttttccactgtatttatgtaagacttttatgatgtttgtaagatatggatctgaatgtcaacattgtcgtttgtgtaccccggccggtcctggacggggattttaatacacattctgcttggaattctattcgggaatttctgggcgtgaccacactggggctaccagctatccaggacaacatagaaacacaagaaaacatactcatattaaatgaaatgcatggaagttaagccatcctcatctttgatgaaaaaaacttctatgaagatcaaataggagcggagggagtagctacctagaattgtaaaaggtgattttttttttcacttactttttcaccctacccctagcaatctatatcaaaccaactacctagccttagaatataataaatttttaccttgcaccataatccttaatctctccaaaaacaagctagatacttatattttgagacaaaggaagtaggatttagagttataacatatgcaagataaaaaaatatagtctgactcttatcctaaactctcccttaatagagatacaaacacaatataactgcatggggacagtaacatatgcaagggaacaatggcaagtggttcaagcagattgagatttgttgataccttgatacactgtaattatgtcagattgggaaagagtgcttgcaattagtgtctcagggatgtatgttttacccagtattcacctagacgctaaacgctagacggacggtgacccatggtatagagtctagctagtctagacgatatgccgtacactatattatcgtcattttttttatacacttaacatgttccataaatattgaagaactagcagctttatataggtacaaccactcgagtaaagccatgggccggacaaatatgcagcaaggtccacaatgacgaatagcagagaagagacgacgtaagttaattgcagtgactggcttagagtagaggagaaaggtttggaatgaggtcaaaaccttaaaccatatgcactttggattgggctcgaagttttaactcctgccacacaaaaaatgcattggcccattgcctaggccatagtctaaaacgacaggtttacaatttacacttgtctatatattgtctaattatgtggtctagatagtgttcgaattggttttgactgactggacagtcgaacagtctaattccaagttaacccaacatttagggtctagaccgtctaaactatatggtctaggcgaacactaattttacgttaacctcagtaacaaatattatatgttagtatcttcatagagtcccactccggtgctttctactcggagtataaattaatctaaaccgttgatcgttttatatctaatgggtcagatctatttatactcctatcttaaatagcggtagtagaaacgttagagggtataatcgtccaaaaaatatggacgggatggttgaattcgtaattttgcatatcagttagaaacacttgagcatcgttgggccgtgctaggtttagggtgagtgtggcggagcagatgcgatgagcagatcggcggcgtgcttccatgagatcgttgcgggattacggcgggggatcagcctcgggaggctactccttgcccagcggctcaaatgctagagatcagtatgcgttccacgccaggcccgagaaggagacatataactagcgagcctgaagccctgaaccacgacaagaagtcagatcaattcaacgatttcaacgccatcgaagccaatcaatattacggtgttttgagcatcgctttgaactgagcaaatgaccactctgaacttaaatacttcggtaccatcttggacaaatttagcgatgttaatggcttaattctttaagaactgaaaacacaacatgtggagaaactaataaataggttttaaagataatcatggtgagtttataacagcacatttgctcttgctcctcgatttgactatatagctttgttcagtagttctttgtagtattatctgttcaacggaggagctcgcacatgccggagtgggcactgccgccggagtcgggcgcacgcgagaacgaaagaagcggtgacacagacgaactgatcctactattaagaaaaaaaagtaaaagttaaaaattacccttaaccataaattagtaaaatactaatttgcccttataaattaatggctcagattgcttctacttgtagtagaatactacaagtagagagcaccatagcagtgctcatcttcataacgattagatttccatggtatttttttcgcgtgcggctattgaggtctatatcggtgctggtttttatagaaaatgggaaaatgcgttgcaatccaaacaagagaagacatttttctggtgactcgtcagctcagcgcatgggcaaagccccctatctcgttacaatccaggagtactagtgtttccactcggaacatatgttgctgccgcacgatgcaaggtggaaacagacagagaataatcgaaacccaagctaatgcttggtcaccacctgcaaatattactttctccactctactaaagcctcagctaagctttgttcctactgcacttttgcagtgctgtatatagctgtgcactggcatatcactaccagggggtgatgcacaaaaaggtttctggctcaaatgatcagagaattgaagcgcacacacacgagaagagactccagtggtgagacacttctgatctctctgtcccccattgcaagtttgcaacctcaaatgcagttcaatccccacacgtgcaaatgcagattgatcgaccaggccagtgggtatgtaggtgtgtagccactgtgtagtgccagttgaagcaatgatatagctcatcagcattcagcaagatgaatgtttcttttcgaaatgtttatcagattgatgaaacgaatgatttgtttcatgctttaaaagatatatttttttataaaaaaaatttatcgtattgtttggatcatgtacttattttaagttatttattaagtttatttgttaaaatattcaatttgtccttataattaagtagatcagccgcagcaacaattcactcagggctcattcggttcacaggattttcaaaacgtaggaataggaaaaacgtaggaatactataggaatacatgtgcaaacctatggattgagaaacacaggaatttttcctatgttgttgagcaatccaaccaaaggaatgcaaacattaggttggagtggattattttttcctatgcttttcctttataaatggaggaatggaaaactttcctatagtttttctatggtgcattcctataaaacgaatggtagtttaaaacccattcctattcctatgcttttcctttgcaattcctttgaaacgaataagcccaatctttcaaatttaaagtattagtagacattagctcaccatgcatgccaatccacttatcagagaagcagataggtgatactgccgtatcttctgaaccgaacctctgatttgaagttgaacgaaccatcgatccaacccacctgctggtgccgattgcgcaagtgatcgaatcactcatcatctccaccatgcttgtgtctgtctagacagttaattactcccacattttaaattacttatcgctttaggattatcccaattcaagcattttaatctctttgaataatattttctgtaaactcatatagttttacaccataagatttatatttttaaattcaccatacaaatacttttatgcctataattcacatgttattgaatcacacgaataaaaattaatggttataaatatatttgatttaggataaattaaaatgataactataaataatttgaaacgtatggtgtagctaacttagacatgcatggcagcagctggatgttgttgctataacatgtttgaaggcatagccagattttcttgcctaagagcatgttggtgcagtactggcttcatcttcatctctcttgaagttggggcctaaccaaacaatttcagttccatctaaaatagtagtggagctaggtttagactgttctataactttactacatacctaacttttggagttaaatttaggaattggagttctaccaaacggaacttaagattcaactagtgtaatttacatatttttatctttatctcatactatatttggaggttttgaaatatatggtatgttcagattgtactcaaaataaactttatcaaaatttgacaataccaaaattttgacaatttagcaatattgccaggttttggcaggacttcttatatatttatcagagtttgataaaaaagaaactaaatagatgcacatattgaacaacttaaaaaaatggtatgatttgaaataatatcgatatgtacaacctcataatttgtaatggatatctaggctcaggaatatatagggtaatagggctacacagtagcaacggcatctagtgtttgaggggagagtcgatgaggcttccctgtcatacagttcacctgcagggagcccggacgcacggtggcttgccggctgtcgatctcgccgtcgccgtcgtgctcgcatgtcagccatgggagctgtagctagaggtagacgacgtacgaggtggcgaccgatagctaaagctatagctgtagctagctgcagatctcgatcagttgacgcatgagatgagatcgagagatcttcagtagcgcgcaggcttaggtgcagggtgactcgactgtgtcgcgatatgatcgctttggtcgtttgagctttgatgaagaagccgagacttgcaaagcggtgggcagtcgagaggtctcactatcgacggtgtgcgctccgtccttcgtacgtatgccatttgcagagggttcacgataaatccgaaatttcagaaattttggaatgtatatttcggtctgatataatttcaattttgagatatttaactatttgccatacaagtgataattaaggatttaccattagatccacatgtcataatctgaataaaattagctaaattcacggatatattagaatttcggatgctatagtttcgttcctgggggccgaaatgttgaaacaaaatttcgaaccctgatgcaatgaattgtattgcttgctgatccattttcgaataattgttagcgttgactatcacattttcatttcctatttttactgtaataaatggaagaagttttatgcctatgtttaagatatatgcaatatacatatacttcgataatatagtattttcttaaatatttgtattttttaagaaaaaaatgagagattaaagtttaagcatgaatagttcagctacaagttatttaaaaatggagatagtatttcctttatattttaaaaactaaactcttaaataacttgttttaaaaagtatcaataattgaaaaaaaatattatagaactattgttcatggcatggaatgacaacaatgatttgccatatcattggtctcttaagtgacgcaacaacattattctatctcaacattacagtaggcaaatggttcagatttataaatatgcttaagaggagtttattttaaaattatatttaaaaggttagaaaataaaatgaattgtacatgcatattttacatatttccatgtaacttggaaaaaaaatacgccatgaaattttgtacgccacattggaaagttgtttagaaatatgaatccgacaacaaagttatgccctacgacaacttgtggctaccccaacatggagagcttcatcatactacgatttgatatgttccttgtcttgtcactcagggcaatccaccatgcggcagaaagaagacaatcgaaacgtgtacgggatacccatatatatctgatagactgttagcagaatgctgtgggcttgttttgagatggttactacagtagtagctagtttgttttatcaaactcttagaaaagaaatgtaagataagctattactctccctgtcccagaaagattgatgttctaaggattataggataaattagctcatgtgtaaatttccaatttatcctccttcatcaaaggtggtttgagtggttgagaaataacaataaatacgcacatgcatttaattcaaacaagtggacaagaataattcaagtactatatgatccgacaaaactggtatgataatctatataggatattttgtgagtataaaacgatcgcctttacgggacagaggaagtagtgtattactaaattttattctccatctcaatataagtgcaacctatggtggatgaaacatatactagattcgtagcactacgatatgtcacgtttatcctaggttacacttatattaagacggggggagtaaataacttgtatgataccttggccaaattttgacactaacccatgtatgatatactaatttgtatccttgatttacggagta

SEQ ID NO: 8389 - DNA, 74561 bp, Oryza sativa
tacttgcagctcggtgcctattatggttatgttggatttgtctacatcaggtctggttcgtatgaggccatgcagaagcccgtttggttgccggcctgcgccagcccgagaaccaggacgagacgatgcaagatagccaccgagtcaggctgtgcagaaacttaagtgcctgtctgaatatcggacatatcaccactggggcatgtgcaacatctacaagaacctatgatgttgatgaaatctcgctatgttcagggttactataaaaaaagcttttcattggcggccatatcatattttcgctgacagccggaccaaccgccaacaaccaaatgccaataaaaatagatagagtattttcacaagcatgaattaatcgcgtgcgaaaatatatatccactgtcagatacctaaagagcacaaccagtaaaaatcatccttcctaggcaggacatttaatctacccgccatgaaaaaaaaatacttttggcacaaaaaaaattcagtagatccaaaattgttcgcccccaaaacaaaaatcccttgccaaattcatcacaaacatcatataatccatccaacatattcattcgcaaaactcataacccattcacaaattaaactctcaattcattaataaatcacaatttcatcacaaagagggagatcacatagaggagcacgaaaaaaaaatccatgaccagtgagagctgagctagatatggatctagatcgtcgaagaaggagtgagggaggtcggtggggagggggggaggggccgaagcttgatctggatcctccttgtcgccctacattaggtgtgcaataatctacaacttgttgttttgttatgcttaatacacgtgaaatgagaagctacccattgcaacctgatcaaccaatcaaattgttctgcatctagggatgagccaaaccgggttcatcggaggagtagtaagccccggtgcctcggccatatctagatcttgcacgtccatgccatcagggagctcccaatcgaagtggtacaacaagctagcgatcaccatctccaatcctggcaatgctaagatgatgccagggcacaacctccggccagccccaaatggtatgaacttatagtcgttgcccctgaaatccactgcactgcccataaaccgctctggtctaaactcatccggtgtgtcccacgccgcagggtccctcccgatcgcccacacgttgatgaaggcgatggtcttggccggaatgtggtagccttggatggtggtcggcatcgttgagtggtgtgggatgagaagcggcgctggtgggtgtagccggagtacctccttgatgactgcttttaggtagtccaatttggttaggtcctcttctgtgacggttggtttggagccagtgacttgtatgatctcgttttgtagcttggacatcacctgcgtgtttcgaatcagctccgtcatgatccattctagggtcacgaacgaggtatcggtagctgcacccataatgtcctgcaaaaagattaaaaagaattttgtattcagtttgaatttagaaaaaaaagacccttttttacctataaggtatcagaagtagattctctcacgttactattcactgtgactaccacatgttagccaccaaatcagtgggaagttacgtcaaaggatctcaatcctaaggtatcaacagctgcaccaaaacgtcggttcccaaacatttgttttccttaccaatcggggaaaaatatgacttttttattgtgcccgtaagtatcaacatctacaccaaaaatttgtaaactaaatgaaagtctaagatttgccatgttattatgataaagttcttactcctagtaataaagaatttactcacggttaaatttgaaaataaaatttttacttacagttttattactcgtgctgacgtagataatcttatgctttcaaattttacgatagttttcagttttgcactgtatatttcccccataatcctttacctgccacgtgggtttatcgccagtagcggaaagaaacaactcactatattgacttttaaaaattttaaattttagtaaaatttgttcggtctttctctcatccctacatatggcattcaaaaccctgggtttttgtaaaacaaaactcggacattcgatgctggacaatggatatatcttcaaaaaatggtggatttttttcgttaccttgataatagccttgacgttatcctccgcgagctcgaggccgccggcggcggcggcgccttgtctcctcagtcgcaggagcacgtcgacgaagtcctcctcctcgccctccgccttctcgtcgtcgtgcgccgccaggatctcgcccaggaacctgtccgactcgtcggccatgtcgtctagcttcttgttcaggcccgtcagcttcctcgccgcccaccccgccgcctccggcagccggtccacccactggaacccggcgagcagctccgacgtgtccgccatcatcttcctgaacctctccgccgtcgcgccgctgccgccggccgccacgcgggtgatgaccccgttcgtgtaggcgtacaggagctccctgagctggacggcccgcgccgcctccgcggcgcggcgagcgcgggcgacgagcgcggcggcctcggcggcgcgggcgggcgcggcgaggggagaggaggtgcgccacggccagcttcttggtgcggcgccacgcgtcgccgagcggcgcgaaggacatgttgcgcccgccgtagaagagcctctcggcgctgtgcgacggcggccgggaggcgaaggcgaggtcgtggcccctgtacaggtcggcggcggcggccgccgtggacacgaccagcgcccccgcacggcccaggcggaggaacatgaggcccccgtcgctgccgtagcggcggtgcagggcgtccaacgagcggtgcgggagctccccgacgaggtggaggtggccgacgaacggaagcgacggcggcgacggcggaagcttcccctttccaagattcttgatcgcggcgacgacgacgacgacgaacacgagcaacgctgcggcgacgacgacgtacgatgacatcttggtggattttgccacaaaggtttggatttttactctgaatagcttggtgcttataaatcaatcagagcacaatgcattccatgtccttgtaaccaatcaacacggtggctggtggtggctatcagatcgattgcgagtctggaatattctatgatagatgttttttttttctccaaattggatttttatagaaccacatgtttgatgaactcttttgccatgtagttggggatattttctgaagatcatcataaatcatctccagttggatggctgctttctggctatagtgcacgtatgtttgtgagttgtgtcaggttgatctagaattacattcagaaatacatgtcaaatatttgcgttatcaagcaccagcattttgtgctgtgaagttccaaaatactctgtactgtttacagtcaaacacctttcttataatttttcaggtaagagaacctttcatataaaacacaaagtacaggtttcttcaataccacctgtattagtgcagtaaaattgcactttgacacatccacacaaaattcagtgcaaacccaaaaacagaagagaaaagaagagaacatgggaagaagctctcattattgtatagacccccatgcttttcaatccaatcctatgaataggcagtgccatcttaacacaaacctacttcttacattttcccctatttataacttctgtccctcatctatatctagatgccaaattattcaatctcaatgcctgacatggccttggcctggatcaggattgccaacaaggtaagcaagaactcctaccaatggagcattgatgtaggtagttggttcagatttcctgaaatcggcacggtcatcctcataaacatcatcctccccaggccccccaacaactgcgccaattaacgggtttgggttcgggctagatgaattgtagtaaggcgtgccgtcgttgcacgcaatgcgctggggatggctcttgatcgaaggcaacgatgatcctcgatggtgtatccgttgaggataccgatcgccgtacccgaccatgtatgacattttcatcgggttatctcctaatatataatcagcctgcaaataagtaaataagtacaatataatgttcagagtttagttagtcaatgttcctgcatttcatatttggatgttatgtaggacaattcagtagtcgctccctccaatataattacttttggatcttgacataatctttgtgatgctactttgacaaaaagttattttaaataaaaagagttgcatattatgacagtttgtttaatgataagtctagtaacatcattcttacataatcagtttataatcttttttattaataattaaagtttaacatgcttgacttagcattatttcaaaagttagttatattttgggatggaggtactacctgctttctggctagctgctgaagagtggcaggaccaaccgaaacatttccacagttgacagtgcgcgaggaattggagaggtacttggcataagtcaggagcaggaacgaaatggatgtaacatgctgcatgttgctgcctccaggcttgtagatcatgcccccgggcgtgtacgtgatgtgcggagacgacgactccggaatcagtgtgcagatgaatccatctgcaaactccttgtaggattgcagagatagcacctcgccatctatgaactcctgtaaccaaatttggaacccattttctctttgtgtcagctactgatgtttctctgaatttgttgcagctgcagaaggtgtgttcagaaactggaggagattgatggaggcaaaccttggagacaaggacattgatgccggcatgcttgttgtcccagccgaattcgttggtgctatcctctgctccaagggtcttgccgttgttctgaatgtagtcgaggtaggtgccttccttggaggctctccgtagccatgctgctccccacagcagctcatcctgccaagaattttcagtcgtgtgaactttgagatttttattcacccccccccccccaaaacaaaaaaaaaaaaaactatgtgatcaattatgagcttctgatggttgtgaagttctaattctggagttcgtaacaacagcatttgacgggttcagttttttttttccagaaatactagaaaacgctattaccgttgtaacggtttagtttatgtttgatggataaggtatcaggtttgatacctctgtgtatcatgtatttgtgtaccagatatggaacgtaatagattatgatgacatcagcattgtaactatatactagaactcgagtatcattttttttagagaagggtttttacccggcctttacatccaatcggatatatgcaaccgattatgatgacatcagcattgtaactatttactagaactcgagtatcatttttttagagaagggtttttactcggcctctacatccaatcggatatatgcactcattttatattaggaacttagcctatcaaataagaaacttagcccttaaataactcaatctgaaattcgttcatatggagatttgaactcaagaccttggggtgctactcagatcaatacaaccactaggctacatgccctttcgcaactcgagcatcatgtcacactgttctccggccaacttgtttttcaggtgaaatgacggcttcagtttcacatatgcctattccatgaaaccatgtcgcaacagttgcttttgccccaaagctcataaatagattagccctgtgaacaacctgaatttgtggagtttcagaaatagaaactttaatgttcccggactagataattgtttaccccttcattttggaaagaaattatcgtgtattcctagtttaatatccctgtaaaatagcatttacatgtacaatggttatcaatagtggtctcttagcgttgctaattaggaatacttgttgacgtggaagaaagaggagagacaaaacattgttgtcatgcataacaacggcttaacaacgactcttaatcactacaatatggaaatatggttgcatgagggtaaaaaaatagaaagaatattaataaaataaatattttttgagttaatgattagagtttttatcgtttcaactgttgtaaagatacggtctctaaataatcttatattgtttaagaaactatactcgtctctaccattgaatatgcccttctttcttttttttttccttgaccttacctactggaattctcatgctaaacttataaagacgtgcaatgtcagctggtactccatgaagcaaggcaccaaagctgctttgtttcttctgaacagtttatttatcgtttatttttatatgcgagagatatctaagcagcgtttcagttttgatgccaactactgaattgccagagcagcagctagcattgcagcaacagcatgcaaagctttttgtttctagtgacaaattaaagcagcaaaacacaaaaaaactgaagaaatttaagaacaagacaagaattaccctgacctgatatccatcgaagtcgcagtagaacgggcagccgccggccctgagctccgggtcgtcgctgtacgcgcccttgtgttcgtccgcgaactcgaacgcgctcctggcgccggcgagcagccgcgcggcgtacgccgggtcgtcgtcgcggaacaccatcgacgccgcggccagcgccgccgccgtctccccggccacgtccgaccccggcctcgccgcgctgatgttgtacaccgtcctcgctgtgtccatgtcctccggccgctcccagcacccgtggtccttcgttgggtcgcccacctgcattgccatcgacgccgcgctcacatggtcgtcgccgtcgacgaggaagacgacggtgcgcagtgcaatgtgtttgtgtgtgtgcttgcctgaatgaagatgacgccggggtgggagatggtcttgaggaggtagtcggtggcccagcggacggcgtcggcggcgtgggcgcgctccgcgggcggcatggcgtcgccgaactcgacgacgccccacgccagcatcgtggcggtgaacgccatcgggaagccgaacttgacgttgtcgccggcgtcgtagtacccgccctccaggtcgacgcccgccgcgccgccgtccgacaccgccgagtcccctcgccacgccgcgcgctgccccgccgccggcagccgccccgaccgctgcccctcgaagaacaggatcgacttggccagcgcgtcgccgtagtcatgccccgccgccgccgccgccgccgacggcgccgcgagcgccagtagcaagcagcagcacactagcaggacacgcacgcgcgagcggcggcggcgcacgggagccgagaggagcgccatgtcgtcgaacactcgccgcctcactagagcatgcacgtgacgtgagcacactgagatagctatagctctcgtggggcttcgtatttatagcacgcattcttcactagccagcaaacggcaagcttagctcacggctggattatggctccagatatatacgtaattaacacagatactatattctgatatgcaattatgtacgggatttttatatagagaaataataaatgctttactaaattcgtctcaaaatataaattggaaatatatgtatatgtctagatatatatatgactaaaagttagaaatatatatgtctaaatacatagtaagaaattattacatttccaaatatatgtgtccagatacagaatgagaggcaaagtgagtgtaactcaactgactatgtttctagaggtggaaactgtctatccaactgttcaaattttatatctgacataggtgctcgcatttacagctattttttaaagaaaaatggtaactgacgtttctattgacaacaaatcgtctgtagtgagtagtgacttcatgaatcttaaaatttatcggaccaatatttgaaagcgctcacagggatagggcgtacgtgttgtgtgctcatatgagtggtgagcgtgcacatgcttatataagtgtatgcgttttgtactttgtttttttttaaaaatggaacaagaagtagttgtatcttcggatgggggtacaagttatgctgatatgtcctaattattactcccttcgtattataatgtatgacaccattgacttttcgaacaacgtttgaccattcgtcttatttaaattttttgtgcaaatataaaatatttatgtcatgcttaaagaataaatatgataaatcaagtcacgataaaataaatgataattacataaattttttaataaggtgaatgtttaagcattaataaaaagttaacggtttcatacattaggaggaagtagtacaattttggagggtaattagagagaggttatggtgggacaaaatgtaggggtcacgggagcggtggtaagacagaggtgaggccaaaggtatgttttgatgggttacacgggcaggcagacattcagaaacaccttctgtgctcggtgtggtgtggtcacatgcagcggttacccaagagcatgagagaaacaacaaggccactagaatgatacgtagcactaggacccaagatgtaagatccacgagtaggctgtgttctaaagttctcatggatgactgagtttatcgcaattatttgagggcagagatgcaaaagaattaaatattagaaagttaaacaatcaattttataaagttatctaagaaatactctctccgtactcataaaggaagtcgtttaggacaatgtttaagtcaaacattggaaatataaatcatgaataactcttaaggtgttgagtttaaaaatgtaaaaattatatgaatagatttgtcttgaaaaatactttcataaaagtatacatatatcatttttcaataaatatttttatagaaataaggagttaaagttgtgtttagagaccgtatcgctgtctaaaacaacttcctttactagtatgaagggagtactggtttaggagtttcagtaaatgtgcccgtgatgatttataatatgtaaaaaaaaaaaggaatgtgtcctgaattcccagttattgatagggattatgatttttctactagtaagagaaactgaaccggttgatcccggttactaattatctcgtcggttgatgaaagctgagcagaaaaaggaaagcattgatagtatttattccgaaatggtaaccagatagtgctctttttttggggaaaccagataatgctcttaacgctgatacttgctggttggatatccctttttgacagattttaatactccgtccatttcaaaataagacacaatcaccttacaaaggctaaagacaatctccctagtttagatcaccctaataaatattttctctgttttaggttatgagactttctagcattgcccatattcatatagatcaatagatgtctagattcattaacatctatatgaatgtggtcaacgctagaaagtattataacctaaaacggaggtagtataatacatgcacccaatataattagagatcttaaaagtagagaattttaaaagataataatttagtggagaagatgggctaattaattgcatttgtgtatgcacaccttatattataaaacatcttgaaaaaaaattgagttgtgcattatattatggaattgagggagtattgtatagggaaatcatctttttaaatgtgcacatcaagaaatttaagactaaataaaaaaaatgcaaatacttattagtccagttattacttggagaaatgagtatacctccagataaattatttaagactaaatcaatttcaaggatcaaaatcagtgcacatacgtatctggcgaccgatacactcaactgcaacaacgccctcttcatgccaatctagcaagaggacaacacaaaattctcctgtgatctgcctgaaagacagcatgttctcttcatttctctttctctctcattgtttgagacatgtcaaaaaaagccaaaatgtggcgaatctatgtgatcgagaccagtgactctaagtgagaagcttgagcaccgaccatactgatgcgtacagtttgctgtgtttccctggaaaaaaaggaagctgttattgattatcaacttttggattggtgagtcccctccggttcagagtttgaggctggtgtagaatggaaatgtgaagcaacaaatttgagagaattgctgtggatggggactcctgtctgttccatttaggaatgtgatgtgagcttcctgtgcagcacgcaaactgaattttgggagcattcagcaattttttgttccaaatataattatgtgtagtactaaataacttcaaaattatttccatatatattactcttaacgaatttggtcctttgctcctgagctaatggtagtaagatgcgcgcttcccgatgcaaaaagccagatttgcaatgcatgtctttttggttgattcatctaggggtggaacttcaaccaatattgtgaaaaaaaaaatgaaagttcccacattgttttgccaattttaggcgtacattcgtaaatcagttagatgaagtgtacattattactactcagcagggtttacaaaaaccaataaaaaccagtcggtttccctaaaaactaaatctccctggcttggctcgggaacacaaattaaaccgcttggttttccattcaagtttaacaaaaaaatatatattcaaactggattttaaatattttacaaaatttgatcatatttcatcggcagtcaacaaattttaaacggttttcacaaaataataataataataagcattgatccggtttttgtgagtggttttcccgctactcaatactactactagtagtataaacttcagagacctcgtactccaagtccaacctgcttgaaacctccattttgctcctcctgtaagctacccagtgagcagaggaatcacatgataggtctccttggacggatcaaatcaatcttcctccttttcattatacatttgaggccacagaaaaagatggcatgcaaaagcaacgatccgttgcactttctgctgcatactgtccctgttccattcttcagttacactgatctaaacctttttgcagaagtgatgaagtagtagtttttcagagttgtgtctctggcaagtgacaagacgataatctgtcgctaagtatctgtgaccgtggctagctgtagatggtgaagtttcaacaagttctcctgattttaaaaaatgttttagttttatagataatctgacccttgatttaaaagatgctatatccacctattataataattgtaaatcttcatctgaatttggcgaaaatttgtggattaaaacttgatgatacgaagtgattaatgtctcactcggattaacctgaacaataaataagatccaaagttgagcttagatacacttcggtgtgcacactgcagaaagtcaggaggacctgtaaatcgttagattgcaggatgcactttctcaaggaagatcacacaattttgcgagacatcatgcgtggcccggatttttctttcttcgacaagttgtgggcttgtggcagctctttgcgtgcgagagtccaaagcttaagatcccgataatgatgatgatcaagagcaaagccgaaaagaggttatgcgttcttcagatatcttcagagaggaaaaaaaggaatagtgcatgtattggaaggaatagtgatcgatcgattgataggtccagcagattaaaatgttgaaaagttttacactgtcacagatcatatagtcgatggcaccgacagagacatcacaggtccccttattttttaaattctctggagggaaggttctcttattatttccatataatttaaataattatatttttttgcaagaatttaataacataaactaatcgtaatacatcactccataaatatataaatttaattatgacttttacaagtcgagaacaaaagcaaatatgattttgaatatgcacatatactactccacgtttaatttgtttttttttacaatatcaagaggttgaatttaaatttacatgtttgagaggtgaattcatcatggcatgctgtgaataggggtgaaaacgagccgagccttgcagtggctcgcaacaaactagacttggatcggctcgacttagttagggaaacaagctaaaacttgagcttggctcgggtcgtttcttggctcaagccagctcaagctggcttgcaagtattcttgtcgaaacacctcttcatatatattttataattattaaaaaatgcaagaataaatcattaacatgtaaaatttaaataagtttatatatatatatatattcaattcttcaaaatcttaatgataaatttcaatttgataaataataacgccacaaaagataaaataatcgatataaatacatgatggcctaggctcgcgagccaaaacaagcggctagcgagctagctcggctcggctcatttcagcaacgagctgaaaaggaggcttgggcttggctcgtttggtttacgagccgagccgagccaaccaagctcgagccaagcctgagctgagctcacaagcctgagtttttttttccacccctagctgtgaacaagaccgcatgtccgcaccacgtggtgctgaaggggatccaacggctgcgagtgcgtcgcaaagtcgaatgggccgcaccgctgaaatcccgttccggcccaatttaagtaggcccacacgtaagtaggcctaatttaagctagatgggccacatgtacatcggaatcccaatccgtcccaaaccgtaacgggccgcatgtacttggcaaccacgttacagcccaatatggataggtcggggttccactgtggcccaaacgtatcggtcctgatgtgcgtggcaattttttttcctagaatgactgaaggaggtcaatcaatgtgattaagattgaagaaaaaaaggttacctgaaaagttttacatcggcagctggctgtcgataaaggaagtgcaccagagcacacaccccgaaccatgtgacaaccgcccaaacacacgttacagagagggaagccgagtactgaactgaccgtcgcactgtgcatggaaattgtattgacccattttgtattggcccgattttgatgttagagtattaaattttgggggttttgatggtttcaccattccggcagatgatgtcaatgagggtcggagttttaatctccgaaccccttgggccttggctaatgtctgctgcatgtccgtttgttcctacctttggggtcatgcaggtttcccgttcaattctcaattaagacactctgaagtgaagtgcttgtatgagacgatcatgccaaaatcttcaccttgattcttttgatgcatccaaaagaataactaatttgaggtgaaatcctcctcctggaatggcttaaatttacagcaccgaaacccatcttgttcaaaacattattctccgaatccccttgatcagtattatttgggatgaaattctaatcttcgaccaccctttgctgctgctgtatcatcgtcatgccagcagcagaatccggttgtctgtcatggctagcagctgtagatcagtaggcagtagatgataccagcagcaatctttggaagagttaacaggattaaaatcagaagaaattgttcgaccagtaaatcaaagtcagtaacgaggaggagtttgcgaaggagacgagcctgtacgaaccctctttgcaggaagagggaatatgctctgaatcatctcctgctaaacttcatggacaaactattttgtttcagcaatcgccttctccatcagagaagaaaaatgaataattacgcgtgcatgggatgggtgatcgatcgattgatacgtccagcagattgaatgttcagtaattttcgttcgtgtaatgtttttgtttcaacaaatcgattacacaatcatcgcagcttgcgctcttgtcgattttttttatattttttgtgagaagggtatttttgcccagcctctatatccaatcggatatatacaacctttttaaattaagaacttatcctatcgaacatgaaacttagctctcaaataatccaatctgaaattcgctcttataaagatttgaactcagaaccttggggtgctactgagatcaactttcactcttgtcgattataaagaaggattaggcatgtaaaacattgtaaattttggccttttaaacgggaggaagcagagagcgctcgaggacaattcgcgcctgcaacctgcgcatctttccccgcctccgctcgtactcacaaaccctggctaccactgcagtcatcgctagcacgagcaggcccccaaccaccgcgttcttgccgtcgccgtggtggtgttcgccggcggagaggatgccagccacgcccaggcacaggagcagcgcgcccacgacgacgtcgaacgccgcgaacgccatggcacccttggaccaggcgaaccccgagctcgggcgggacgtcgtcccggcggcggcgatgtccgccgcgatcttgtcgccgccgcgctcgtccagctgccccgacgccaccagcctccgccgccactccggcggcatcgccccggccgcgaacgccgcctcgatctcgtcgtcctcgaagatgttgctgctgctcatgacgatgacgatggtgagagatgctgctgctaaggtttggttgcgatacctccgccgcgaccgggttggaatatatgataactccgtgctgccagatcgaactcgggctcggactcgttacaactcagaaaggaaatgagatacttctactccggcaaggctagtaggctacagagattaatgggcaaaataagggcatgttcagattgtagccaaaataaattttatcaagttttaacaatatcaaaattttgataagatggcaatattgcctaaattttggcagaatttcttatatattaatcaaatttggcaacaaactaaatgtagagcatgttcactttgatgttattttcaaccttaccagctaaaattttggcaagaaactaaatatagccacttttttagcaactttaccaaaatttggtaagtttgaaaatgacatcaaagtgaacaggcttgtaaacattttttttgccaactttaccaaaaaaaaaatggtatagtagaaaatggcatcaaagtaaacatgccctaaacctaaccaaattttggctatgtcaaaattttgataagatggcaatattaccaaaaatttagcatgatttcttatgtaattatcaaatttggcaataaactaaacttagacattttttttagcaaatttgctaaaaaaatggtatggtttaaaatggtatcaaagtgaacaggccctaaatgccacgagaaatcttgcacatcttcgtatagaatttcagtctttcgcagtgaatgatccctgacgatgtcatttccatttcgaagatgtcgaaatgtcgatcaataggatttaggctctatttgattcagcttagaattattgtaatctgaattattaggagtaagctgaaacaaatagatagcttattatgatagattattacaatctataagccaaattactataatctggtaagccactataaaggtgctttttctagattattggatggctaacaactaacaaacagctaataatccagataaacaaacagctaacagcttattctatgtcgacttattataattcagcttatagtaatctaattctataatttagattataataatattaagctgaaacaaacagggccttaaatgccaaactcccttcgtttgtttgtgttcgtccagtgatcgcgggtgtaatccggagtctgacactgatacagcgtcatggccgtcagagctcgacgaggatggcaatggcggaggcagcggcagagctgacgaacgctttggaatatggaggggtggtgccgtggtaggtttctccgacgagcaccgcaccgagcacgtcgtgtcgtgggtgaccgatcgagacggagaaactccaatcgaggagcatatgtgccctctttgcacgaagaggggaatatactctgaatcatcttgctaattttcatcgccaaactgttctgtttgagcaatggcttctccattgtcaagatcaaagtcgaaattaaagaggttatacgttgttcagatatcttcagaggagcaaaaagaattgtgcgtgcatgggaagggtgattcacccttgcaaatttactcagggcgatcgattagcagaataagtttttagtaattttacattgttcacagatcagacaggagatcagatcacaagttgccgcttctagccttctacaccactgttttgttttgtttcagcaaggccgatttcagagttcagaagaggtgcagtgtgaaggaggtttcagaaattcagagttaagcctgatatagcatttgcactttgctgttctactcctattttgctatcggtggatttctgtagtcgctcgctgttctgctgttatctgtatcggatatttagatgacgagctagcactgtgcactcggcaaatgggacaaagctgtccttggattgatttttcctttttaagcagcaggtctctgccatgtccaacttcggcagaattggaaatgcaaactgctaccttctgaagaaaagagaagtatttctttggaagagtttacagtattaaattcagacaaagtattcgttcatcaacgaagaggaatttacaaggagatagccctgcgctctttgcaggaacgaagagggggataatctgaactgtcctgctaattttcatcgctaaattgtttcgtttcgtttcgtttcaacgacggcttattcatatgaagagaggtgcaatgcaacgtgggggaggtttcagagttaaagagtgatatactgcttggtaagagacaaagaccgagattggttccaacaaataagtatctggcattgactaagttttactgcttgacatcactgatggctggatcacaacatcatgttgtaaagttcatagtgcattccaagtccaagatccgagagaattgatgcttgttctaacatacttatctattttgtcaaatgggcatgctcaagtatcatacaccgacaagtcgacagcagcaggtcatgagaaatctaacacatcttcatataggcaggaggtccaaggaggcatatccttttgggaaaggaagaagaaaggatcaaactagtgcactatttatccgagaagatgcctcgttacaactcatcacacctccatgttcatgaatactgatgcactaattacaagtaatatgtcctaattgcttattcttctccttcaacagccggtaggccttccttgaaccatgtgtagagtcctccatccagatggaacacattcttgtaaccattcaggaccaacaagtaagctgctatcagggacctgccaaaatgaaacagatgagatgagttagctatgttccagaggcacaaacatagtcacctttgtaaaacaacataaaattcagagctaaggtgaagaaaggagtgtgggcagacaacaagtttatagttttacatgaaatgaaacaatacagatgttgggcaaacggggtaaattggaactcagatgaacgaatagtataatccccttctagtttgcatatggcactcggatgaactaccgctcagcaacatggtagaaatttcaagctggtaatatcattcaactgggaaacattgttgacaaaagaaatgtgaaacaaaaccaccagtagaaagaaacgaaagatatccatactacaaaataaaattccaccaattaagagatgatcatgacactacagaaataccttatgcaaatattaggaagaatatcaatgccacaatatgatagacccatttctgatttcaaggaatacagaaaagaaaaaaaacctcatttgcgacagtggtattaagagactgtatcagcgctttcgtgtcagttagaacatgaatgttaattggtaaaaattgaatcaagtttactgataaagaatactaaggtaacatggcatacctcgattgcttcccatcaggaaagttctgtgttggtttcaatgttcctcctgtcgaacatgccacaataatctttgcatctttaccaagtttctcatcaacaccttcgtaaagataatatatgtcactgattgtaaactcatactccctccgttttttaatagatgacgccgttgactttttctcacatgtttgaccattcgtcttattcaaaaattttatgcaaatatataagatataaatcacacttaaagtactatgaatgataaaacaactcataacaaaataaattataattacataaattttttgaataagacgaatggtcaaacatgtgagaaaaagtcaacggcgtcatctattaaaaaacggaggtagtatatgagtaaccatgaagcagaaaacagaataaactaccatactttgtatgaactcaggattctcttctgttccagaaaatatgccaaagaatgcaaatgctgcccgtcttgcaatatcccatgctgtccattcctttatcaatctatatatttgcacattaacggcaccaggtggatgagcctgcataagaatgaacccatatgatggcatttgcaacaaaatctaatgaatctaagtatcaaacaccacatagtatgacagcaacaaagtttgagatacacttgcacatcattggaaataattttgttaacaaaattatatccatttttcaccgactgcagacctttttttctcttccaaacaaaattactcctatttctcagacactctaaaattgcgtaaagtcagaacctttggttcaatatacgatatttctaagggaataaatgccacaaaagattataattacatattaatgtaaagcgtaacctcaagttattgtgttaaacctaagagctgcattatggtgcaaaaaccgaagataagtggagaacaattacaacattacctctttaaagtccgctactggcctgacatcaagaattgcaaaattgttttccttctgaagacgcagtgcttccttcacatcaacactacggacctgcaaaaccaaacaacagaaggaattctaatgtaaatggaagccgcttagcagagaaggctccccacgggtaattaacatatgaaatcaacaaacccagggaaaacaagtccataattccaaaacagagcaatatgacatggaatctatggcttatctactcatatatgtgcaatacacactctctgaagaactaaaaccaggtattcagtaagatacttcatatatggagttgataacaaaatagctaacatttggaaatggcaggaaattaggaattacccgcttttctactagcacttgcctcttgatcttccattcttcttcagctgtatataaaaataaaaaaaaatacagcaaattaatatcatgcccagagaattactagctgctccaaaccaagaaaatggagagcgtattcgcagtacctggtgactttgcaggctttgtggcagtacaggttatctgcagcgagcgcacagctcgtgtccggcagagttttgcagcctctataggacgccaggagtagccagatgtgaagtctgagcaggaggatatccttgatgagcaaggaaggttgctgttcactacagagctagctgcaagcattgtggtcatgagaaaaaaggagcagaaagaactatggaggactctgagagaattagaagaggggtttgcctctaacacctaaggatggatcctgtaactgagaagatttttttttctggatggggaaacgtccaaagaactcaatggttttggatgggaggtgccagcatatctgaactggtggtggaggttgagctagtgttgtgatagacaatctggattctgaacttgtagcttagcctgaccccacaacaccaacaatctagacaggaacacttaagagctgcactttttttccatgacataatttatgatgcttgactaaaagtaaatatactaggatgtgcaaataaagaaaaatagaggatactacagcgacataatttatgtaaaatccaaccttttctgaatgatataaaaatctggcttttattggtactcagaagttaccacctacaaatgggaatcctaagatgcccaaacatgatgttctcaaaatcgacctgacaactaaacaagagtacaccagaggcccctggaaaatggaaccacttagacctctcaatctgaattcagaagacaaacaaaagacaccatcaccacagttccttgatcatcttcagctcaactctgctcagtgctcactcactccagtacccgtcgtcttccttgtccttcttttcatcgtcctcctcgccttcctcctcgccgatttccatcactgcctccttgaaccgcttgacatcctccaacgccgccttccggaacatcccaatgtccactgcaccagacaccatgtggtaacccctcagcttgagctgctctgccgggtcgttcggcatggcgaatccgcctagatatgcgacattgccatctgaagctgtcacattcttcttcctggcatccaacaccttcttctcggcctccctcagcctggctcgcaccttcctgttccctgggtcccacaggtaccccatgctggctgacaagtcgagcggtcccatctggacgacgtcgacgccgtcgacggcggcaatggcgtcgacctccgcaatgccagcggcggtctcgacctggcagatgattagcgtctcgtcctcgcagcgggagaggtaggagtcgtcgaggccgtacgcggaggcgcggacgatggggtgggcggcgccgcgaacgcctcggggcgggtagcggcagtgcgacacggcggcggccgcggcggcgggggactcgacggcggggaccatgaggcccgcggggccgaggtcgagggccttcttggcccagatggggccggcctcggggaggcggatgacggctggggtacgggcggcgtcgagggcgcggaggcaggccagcgcctcgggaacgccgccggggccgtgctccatgtcgacgacgacgtagtcgtagccggcgagggcggcgagctcggcgagcgtgggggagaaggagaggaggaagagcccgtacagggtctccccggcggcgagccgggacttgagggagggtgcggcgtagaggaggtcggaggcggcggcggcggcggagatgggccgctgcccgcgccgccgcggcaaggggagcagggcgggggcgcggcgggaggggagaggcgcggggtctggcttgcgcgcgaggaggaggtgggagagggaggcggtggcggaggcggaggcggaggcggccatggcgcgcgaggcgagccggcgcggcggcggagaggtttggggatctgcggcgagtgagtcccagtcagtgtggggggacagcgtgaggcagtgacgtggcgttgctgcttcacgtgtcgctttgccacgggccttattgggcctcgcccactgacgttggtgggctctggcccgtctactttgtaaggcccaggaattgtatataacttaacttttaaattggaataagttcactttaaatcaccgccgagttcgattttcgttgttgtcctacaaccgtataataccagatataatgagattcaaagaagtatactgtatgtttttggctcacgtggcgagtgggttatgtttttggctgacgtggcgagtgggcctcacgtcaggcctatttattcttcctccaatctcctctctttttccatctcctattctccaaacctcctctctctcatccgttccacatcactgataggggagggcggatgtggccaacggcgggccgccatcgtcctagacaacactatatgcaccgcatcgccgtcattgtcgatgccctctgcatcgccaacctcctcttcactggacttgccctggatgctgccccaacaaccccgattgcacaaccactgggcggcatacgcctagctatagttgaggcaacattagctccatcaattatccccgcggcaaggctcctccggtgagaaggtgtccttctcatcatcgtaccccccaccatgtagaagtcttggtgcatgtcaaactcactaagcttgagcatgtgcttcatgccaaaactatttgctgacatgtcgaggctgttggatccatgctccaccatcgggaagaggttcagtcatcctaggatagggatgaccgctgacgagtgcatcgacgcaacgttccactcccagtggaggaagtcagtgctccgatacaccaaagcagagccagtggcaatgaccttgacatttgttcttcgatccaccccaacaaccccacatggcaccgcgcttggctgaccatcatggagacctcggatgtcattaggcctagggcagtgaccgcacactcaaggccacaaatggcatgggtgtaggtgacgatgaggtcagagaacatagcagtgaagcgcgcgtatgtgtagtcaaccgtcggtggcccaaccagagccatcttagatggtggttgtcaacgtagaagatgacggtggtgcgggtccaagagatgtgtaggagtgcgtggcgacgatggggtcgtcgaaggggaggaggtaccgaagtagtgttccttgcagctgcaagtgcggtgctgccgtcgcctccgtccctcccttagccgatgatgggaaatggaggagagagatgggaaatggggaatataggagatatagagggaggggaggttggaggaagaagacatatgcctgacatatggggcccactcgccgtgtgagccaaaaccggggaaccatactgcttgggaccttgggtacaccagttttgcacatgtcatatctggtattgctgttcaagaaaaaaaaatcgaacttggcgaaagacgagggaccttgaacttattcctttcaaatttcgttgtggatcagaaatttggtgggccttatccggattccagcccagcaaatgatgggccccgcagtggagagaccgtggcccaaacatcatcgcctctcgccgtcgtctcgtctcttcctctgcggctgaactagtcgccgatccagaggccgtcgtccactcgcggtcccaccggccaccgcctccgccgcctctcaccggcgccaccgctgctctgcctccaccgcgttcctcctctccacaagcctcggtcgcccagtacgcatcccatccgtcgccgtcgacctagctgcctggtggaggtggaggcgagggggattgactcggctccggcgctccgattgagcccgcagccgaccgatccggatacgatccgctccgctcctcgccggagcggaggctgtcgcgaacccaggtaacatccccgccctaacctcccacgccgcacgcacgcgaaggccgacggcggcagcgccatcccctgacggccgactgcgcagcggcgctccgccccgcgccccggcctgggcctgcccgccttcggccttccccgactcgcgccgctgctgcgccccgccgtgcagccgttgccttcgcccttcgcgtcggcgctgccgtgtcgtcgctccgtgcagcgccgtcgcgcgcggcgcgcccgctgcccggcatccggccctcccccaagccccagcccccttggactccggtgagcactgcctctcgccctctccggctctccctctacctcagtccctctcccccttctagtagaccacagtattatccccttcaataatcaatttctttgtatgattgtatctgtgattagccaattagggatatagtaatttgtatagattactacaaaattatgtgcaacaatgaacctcaaatgaaatttttgacttgtattgtaatatcctatttatctaagatgttatgttatgtttgaacaatttacattgtcctttaggtaagattcaaacttgtttgttattttctacttgtattgaaccatttagagttatataccgtatcacggtatcgtttataatttatcagatatcttatcgaatcataccgtattgcatttagatttttttttgctaggcctaccccgggttcaaatcctgggtccgccactgttagaacacacgcagagaactctggccacatcgaatcgatcgccgttcacgagatgtgctaattgattccatcggattttttatggaactgcagccaatttagactaggaagcatgaggaggcgaccgggaatcgcgggcttgcagaacgcagcggctactcgtgtatgtggacatcttgcttgaatagcttataatgttttttttttctttttctgtggattctgagatgagtgtgctcttggaaaatttaaggaccaattccggctggttggggaaaatgtggccaaggtcaggaccgatgtcatgaaggagcagcttgcgacgtttcggacacagctcgaagaatttgcacgcaagcataaggtgattcctactcctgtattctagttgagttttacagaaaatattaccgacgctattcgtatgtcacaaattgaattacacatagcatgctttcacaatcttcttaatcttggggatcaggatatatcagtcattcttgcagactgactgaattcttacattttttttcaactgcccagcgcaaatgaaatgaatgttctaacaaacatgaaaacagtgaagttactgctattcacttgattaaagttgtctatcgaactgggaaatagggaacctaagtagcatactagtccatggtcaagtgctcaacatatactaaaactgaggaacggtagttaaagatggaaaatgtaccaaagaaaaggtgttggagttaccaaggtgccaattgatcttgtttcttgtgatagatttcacttgtctcatggcatctagttccaactgggttgacatttgcaatgtaacactgatgttctaggtgatcacaatagagctcaaatggcacagcatattccaactcttaagtaactttgtgtacatggtgtgctagtgcagaatgatatccgtaaaaatccactatttagacaacagttccatgagatgtgtgcaaaagttggagtagacccgctggcttcgaataaaggagcttgggcagagcttctagggattggtgacttctactatgaattgggttggtatacttaatttaagctaccttgtatgttttgatcctggaattttctgttattattggaccatttacgttctgcttggcatctgtgtctattgcaccaggagttcagattgttgacatatgcatagcaaccagagcgaccaacggtggcttgattgacttgctagatctccgtaaactcctctgtcagaagaggaaagctgatcttggatcgttaacatcagatgattgtttgcgtgcgataagtaagctgaaggcaagtattttaaggaattctacagctacatttttttgggaatcctgtaattgcattcatgcaagttttacaagattgcattcgaatctatggccaataaaattttatttgatgtacttggacagatcgttaattcttctggtcctttgcctgtgaactctcaggtccttggtagtggttttgaagtaatttctgttgggaagaaaaagcttgtgcgttctgttcctacagaactgaataaagatcacaatgggatacttgagctagctcaggtttgtaatcagcttttaatagtgtataataccacagtacacttaacaagtatgtggatgctgtcataaccttatcatgcttacactgaacaagtatgtggatggtgtataacctttggttggaagtcataaagccccctatgttccacataaacgcttatttcagtcaacatagagacatagtacaaaactaagttaaaccgaagctttcaagttgctgccttgctcaatctgtcaccttgccacaatataaccgtacctgtccagttataacattatttcacatgcaggctgaaggttttgtcaccgtagagcaagtcgagagaaagttctcgtggtcaactggccgtgccattgacgtccttgaaactttgctcaaggtaaatcctgctcctgcatttccactctttaagcaacctttgtgcttcatttctgtgcccaaagaaaagaaaaccggcttcctttgatgcaagttatgtattggtgaatggtgattagatctctctgttgaatccacgcttaagccattgcaggattaccttctttttgagctatccataatccatatataaataaagtacttttcgtatgtgcatctgtattgacacttttatgaacgtcaaattttttggcatctatatccaactctggtctctattacataaacaggaagggcttgcgatgatcgacgatgggcacagggatggcaagcgcagatactggttcccgtgcgtcactctcagctctgactctactggtgcggatgccaagtcatgacctgtgccgtgcctgttccactccgttgttgtcacctgtatccttttccattggttcatttctgtaggcactgaagcacatatggcatgccatttaccagtacagctctggaagaatcatgagatagcaatacacttttcagggctgggctgccggcaaaatttttacattgtgattcgtgcatcaggattctggatgtatttgtactagtgatctatactatactagctcttctttcacgaaattactcgtaatcgtaaatgttcaatgctatttcctccgttttataatgtaagactttctagcatggcttatatttatgtagatataaatgaatatagacacatatatgtctagattcattaacatctatatgaattatctatattcatttatatctacatgaatataagcaatgctagaaagtcttacattatgaaacggagggagtaacttgctaatgtgagcaagagaaatgctcgcaataaatatgataaaaagagagagatgctaagtaacggtatcttattcggatgaaataataccttaaagatttcgtctctaatacctaatagcggctgataccctatttgaaatagggtatcacacgatacttatgacttatgatatattatttcatggaaaaagtacaccgaaggtcactcaacttgtcatcgggataaaaaacatcctcaaaccacaaaactagatatgtgaggtcccttaactatacaaaaccagtcacaataggtttcttagcggttttgatcctggttttgtcttacgtggctgctgagacagcgtgagccccatatgtcggcctctttctttcccttcttctctcccttcctcttctctctctcttctctggctctgggcaagccggcgccggggcgaggccgcgaggcgggggaggaggtccggcggggcgaggcgggagaggaggtccggcggccggcgacgtggcggcggcggcagcggagacgacgcgggatcaggggagcaaggcggcggcgacgacgacaacgcgggagcaggggagggcatcggcggcggcgagggtgaggagccgcctccgccaccatcagcgacctcaggacggcgctctgttcctccttcactctcgcgctggtttcccttgacttccacctcttcctcaagggcaccaagctcatggccgacgcccgaggtcggaaacctccccgtcggccccggcgagtccatctctttcatccctgtcaactccgctgcatcctcccgcttggaagccgacgtcgagctcgagcacgccgaatccatggagaaaacgcaagttttcttggcacgacggcggcggtgaagacgtccacgccaagaagccaacgagcccagcgctgccgccgccgctctcctgccatggatgtgtagttcggggatgtgaatgggaatggattggatcttgggattatggtgtccgccgctgttgccgatcttgatggcgccagggttgagctcaccagtgggaggatggtgaatgcctggatcgagtactcgcccaccttgtcgtcgccgtcgaagccatcgccacgtacgacggcgcctttgccgccgccggaagcgccagtttcatccgccgttccgcctcccgtgagttttaatccaatgcttccctcgcctccgcagctccccggcgtaaccacggcgccgtcgccgccggtgtccacggtttcgatgcctcccaccagctccgccttgctcccctcgccgccgccgacgcccctcacctgctcccgcgtcgtcttcgccgccgccaccgccgccacgtcgccggccgccggacctcctctcccgcctcgccccggtgccggcctgcccagagccagagaagagagagagagagaagaggaagggagagaagaggggaaagaaagaggaggctgacatgtggggcccacgtgggcccacgctgactcagcagccacgtaggacaaaatcaggatgaaaaccgccgagggatctactgtgactggttttgtatgtatagttaagggaactacgtggttttgcagttcgaggatgttttttattccgatgacaagttgagggacctttggtgtactttttccttatttcatccgaacggaatatcgtccttaagcattccaattcggcccacgggcctcaaggcttcaacccatgacaattgacaaccggacaggtgtgggcgttgactagtcttctttagttttccaccggacaggagtaattggcaagaagaaacaaaagggaaaaaaagtggcggaaaattcatttttgggaggggaaatggccaccgcagaggcgaagcgccggcgccaccactcaccgccggcctccatcgccgccggcggcgattcctccacccctacctcggcggcgcccgccgactcgtcgtccccgtcgctggatctcatccccgacatagcccgccgcctgacgtccctggaggatttcttctccctgcgcgcctcctgccgcgcctaccgcgcgctcctcccggcgtcgcgccgcctcctcgcctcgcagtccccgctcctcctcgtctccctctacccctccttcgccgaggcgctcttccacccgcgcctccgccgcctccaccgcttccgcctcccatgggggcaccacctgcccccctcgcgctacaccctcctctacgcccacggcttcctcgtcacctccaccaccgccgccaacaactacccgccaaggctcctcctcctccgcctcttcaccggcgagcagctccgcctccccagggtcttcgcgcccttctcccgcgtcatcctcaccgcggacctcctcgtcgtcatcttcttgcccggccgggccaccgtccagcactgccgccccggggacgcgctctggcgcgttgcctccgcccctgcaccccatgtgttcgacgatttgatctctgtcaatggcaccctctacgcgctggttggcctccgtcttgccacgctccagctgtcggagagttcgctggagctgtcatttctgggaggagagcatgatgacgcgaacaggccggagggggatcggttcatgctcggggagtgtggaggcgaggtgttgctcatcagcgtggagcatgaggagagggttgtgtaccgcgtgttccgttgggcatctgagaaaaggaagtgggagatgatcaccaacttgggcgggcggtcgctgtttcttggcttggatggattcgcagcttgcgttgatcaagatcatccaggggttcgaggggattgcttatatgcagctgggcgacgcttgggtgagtggcatgagtattccttggctgatggaacctgtgatgtctgcaatgctgactatccaggcgcgccacccctgaacaacagttcactgatcagaccatcagtttggatctttcccagcttgtgttgatgcaagcctgagtagggttcatcctagatcaatgttgaagccctattgctcagttgctcacatgagagaaaagaatggtaatgcttgatcactagcttgcttactaggtcatttatgtaaacaatatattcatacggcgatcagtacttgcatcttattcgaccagtcaattgttgttttggttgatatagtgaatacttttccttaggattttgaccacaggagcaaaataattttgttccctaaatgctgacagcattactttatgtgctatgcaacttgttgagatattatgaagcttcttttgcgtttattttcctctgatactgcagtaatagtgagtaaagcacataatacatcaaggaatatgctagtaccataatgttaattggttatatttgactatgtccctgaagttgcatggttgtaacttgtgtagggtaggcagtagcagaattcttaaccctgtttgctttgtgatttatacaatgctgcaaatcctgcggagttgtcacagttagtccagtgatagtgataaacaagaccaggaatgacacacatgtccaatggatgatatcataaattatagctgatcatgtttatgatttgtactcctaaaaatatgacatatgccaggtcttagaaccacttatttatatgattttccactcctataactgtaactttcattcctgaatcctgatagaacctgtggtgtatgacctccaaatggtctacccaatcagtagttggcagcaagcagatgtgaaggggttgggcatgctcttttctggtccatcagtttaggctttatatttaaagtgttcttcagttccgtgtttttggactacccttcagtttattcttttttcgggtctcctgtctctcccttccttgttcttgctgagtgctgacacgagacacaacttggttctcttgcggttgtccgttttgcttggtccgttgttgtttctctgtcttaatacaaagttaagccaggcttttgtgtgcttcctgtgtttcagaactcctcttattatctcaaaaaagaaaaactcttcttattgacttcagagggattggaacaatttcaagtttgaaagcatgattcgctgacatatggacctcaaacttatgtctgtgcaatgttacctggcatctcattttgttagcactcgtaaacatgaagtctggttacctgcaattctgaagaacactgtcttataacctctgacttgtgtgcaggttttcaagtttattttttgacctttggatggtatttgcaatgagattcagtcatatttccttatacatgtttccttattacttgaaagttgaaactaactttgagaatgttcaacccttcaaacacttgctctacctacttggtgtattgatatttgcatgtgttcccaagaatgttcaagtgctgcatcaatttgtgccaggatgccagcttagcgagtgcatatttgcgatctcaagtctgtcgatgacatacgcacattattcattttggatgcctactgaatttgttctgtaatcgcaaatactgtactcaatttcaggttgcatcactggctttcaggtgttctctttcttctgacatgttgctacttgcttgcaaatggatcgctgaataccaaccgtccattctggattctgccacttgcagttcttgctgatagccttgcagttctttctctgtgtagctcttttgttgatgtctgaattctgatgcttcaaaaattcagaaatgcagtaataaacagtagtagtagcactatttatttattgacacctggaagagaggtcctgtgcctctccagtcactgacatgtgggcccactttgcagtcattgaccaccctactgctacggaggtccacaggcggtctattgtggggtccacctgcagtgggtcaaacgggccttcgctaactcctcgccgtcctcttcccatccaaacctccgcagcagagctcgctgccgcggcgaacgcacacaatgcaacacctcgccctcctccgtccgctcatccatccctctccccttccggccgcgagtcccctcgctgcgcgatgccgcggcggccggggccgaggccgaggccgaggcgtccgctggagatgcgcgacggggggaggcgcgggcggcggcgaggttgaggagggggagggggaggggaagcgggaggcggcggcgtggctgagctcggcggtgggggagaaggtggacgagctgctgctgcgcgaggagaaccgcgcgctggtggaaggggtcgaggccgccgagcggcgggtggagcgggcgcgcgccgcgctcgccgacatcgagcgccaggaggccgccgcccgcctcgccagcgaggaggtccgccgcctcgagaggcgccgcgacgaggtatggtgactgctgcccgcgttcaacctgtttgatgctttgcctgctctgcattcgcctcaatcaacgagcagagtgcctgccctagcgagtagtgggtctctcatggcctcatggtggagagcgacgtggcctcacctagctatagtgctgtacagtgtacacacgcgcggtccaatccccaccccgacgcggtgatgcacgcatctggtggcaatagacgtagcatgaaccagcaatatggcaccaccagggtgttgcggtgcaatggcgtgctagtatggttgtggttgtactgtactactgtgtcggtgtggccctagatgttctgtgactgccgcctttgtgtttgagttaatgtggcaccgacgagcttgaggaatgctctttaattagccgaacagtagtacctcaccacgggtgcatgtgatttacgaaatgtaaatatgtaatgcacggaaacagaaaattgcgtattgaagactattgtcagagaatatgaaaaagctccagttattttctcctatctatatactgcctaacctattactccttgagcgttttctacaagcaggcaaaaaatgctatttctgaaagcaaaccctgatatgcattgcaccgccttacattgaaccgacttttccatgccatttcgctggattcgattctttgaaatgccttttggatagaagtgccaagcacaatatccctacagtcgataaattgtagtttatatattcttgctttgtcatggcttgttatgcatatccagttggagatgtactgtagaaatcagctcatttgatctatgctgaacagtttgttagatttagaaaactagatgaatttcccctacaaacgcttagctggatactgaaacaaatacgaaatatccttatgtttgaagctggtcgcgttaatatatcaatctagtacctgaggctgaaaataactgtatttgtacactaatgtagtctgtaaaggtgcaatatctgtccacagttttgctaattctatgccattataatctgaccttagcaaatcatctgtgtagtttccatcattttttctctaggatttttttattttacaaattaacaattgaatatcttgccttcttagcatatcagatgctttgaatccttccaactgtttatattctccatttctgtataggagatggttccatgtcttttgagaaaacataaagtactagtagcatgtgtcagattcatgtggtcccatgacgataaaggcagaatgattattagttgtgatatcaattgtatgacaattcatttctgtaatcatcaaattatctttccttcaatatacatgggaaggacatgaattatttgtagcttggtgtttcctatgtgctatttcctcttaataatgttgtttacaatgctgcattacataaacaagatcacagagtcccaacgtgaattgctacaagcaagagaaatgattgatgaagcacaacgttccttgtcttctagtcttgaggatcaaagctttggagatgtaccaagtggagatattgatgaagatagtgaaagactggaatctgtaaaagctgcagcagtttcctctgtagttggtgttctagctagtttacccatatctttttatgaagcccatgattttccacaattatttgttcagttgtcagttattttcataagttgtgctttgtttggagtaacattccggtatgccattaggagagatctggacaatgtccaactaaaaacaggggctgctgctgcatttgcttttgtaagaggtaaaactcgataatgctatttcataaaacttctcagcacatattcaagcacattgtcattttgtttatttgaactaaattatttgcaggccttgctatggtggaatctgggaggccctttgagctgagcactgatgccttaatatcacttgcccttgatggtgcagttagtgtggttgagaacattttgacatttctacctgctgcaattgcactggactattgttttaagatgagatttttgagtccatttcctacaagaaaacagtagttcctgcaaataatctgtaaggtccataatgccatttgttggtccaatgattgtagtaaatataccatactgcttatgtcttatattcatcatgccaaatactcgtggaatcaaaaaatcatgttgtttatcaaatagttgctttaatgtaacagctggatcttgtcctgtttctcagatattctgagatcgataactcatagctccactatgtgcttgaatagacatccttcttaagtgccctacactttgccaggactgaggcatatggacttatctgtttgtgtttctcctgtactattgatgttcactcccaggaattttttatttccacttgaatcaatgctttgggctatctgtttcatatcagcttttggtgaaatgctgcaatctgcgtaaactgatatgtgcttcatcagtccttgcccttatgcaaagagaattctttactctccatgaccatccattctttctacacaataatctatattctaatgtgcaagcacaagaaacatggtacatatctttcttcggtatgttgtatctgtcatctacattgatttatgcctgctgtaccttgcttgtctattagtgttcttccctttatttcagtattgctgtgaagcaactagctgctgaactgtgctataacctgatacagtattattctggtcattcataatgcgccaaaccggatggaactggatgacatatcattgcatcacaaatatgggtccgctggaaggtcggtactgttgagaggtggatgcagagcatgtatttctgttcttgtgagcctcagctgtcattcttcatccgtcaagccagatggaactggacacagcttgatctgttgaagctttcggtgtcatgaagaagatgaagtgcacaggtcttttttgcatactgaatgatggtggtgggggattgtgcagtgaaagagcttcatgaaccatcatctggacaaggttaccttctcaatagtctatttttattaggttattgagatgattacatgatcagcccagcattattttgctcatccccactggtttgttggtgttggctggtgctttagttctggcacaaacaactgcacgaggtctgtcatagcaacatctttggatacattgtatgtagggagctaatcaaggatgagagaactaatgaaaaccacttctatgtttgcatcctgttattatatctagaacatattttgttccaaagcagtccgctagaattttccaagctatttcagccagctgtctttactgatgtgttgaattgctcgtctggatttgcttgcttgagtaagaaagaatgtagttttgaacattttagttcctaaacaatattttgaacatattaggaatatgtgatgaaggtctagaaatcattaacaaattcttgtggttcattagtctaggacgtagggatggagtgtcaagcttgtgattctgactcagtatcatccagttggcctacaaaattgattcgaagtaatcaaatgagaaacttttatacaaataaaacaggattgaactaatggtctttggtgtagacaacatggtctaatgatataggcatctaaaagtttaaatattagtaagcagatacagggaaccttcaactgaacttttgctactacaggattaaattgcatgcctgtccctctgccagctaatagttactctgtacacctggagtcactacttgctgatggcattagataccataatacattgctgttaattgcaaacatgcaggctactgcctgttgccagctgctactggcctatgaaatcgcagcccactgtcagtgactagtctgctatggataatgtgcaagatcactagacaccaagagcaaataagcatgtgcaacttactgttgaatgataaacttggtgctacaggcctgcagtgctcaagaatctttagagcaagaacagattgagaattccatctctttggaaagctggaataatgaccatatttgcacagatgtcgagtatctcataaagtaatggctttcaatttaagcctgagtcttgatacttgcttaatctggaacaaatcttggcactcggtctaatcatgtctatatgggaatgcacatactcttccatgctatttgatataagtttgcccaatattacacaccaatttgacctgatccgttctgtcagtggggccccaacttgcacatgtaataggccacatttcggtggttggaatttttctgaatcattccctacctggtgtgattagtgactgatgtttgctgactttgaacagaatgtagcatatggctgtcgaaagtgtgcttatctaccttggtgaaagaatttacttcagtgagtcaggccaagccagttgcaaccaaaagtccattcttctgtctcctggaccattcaatcatgagactagtgtctttttataaaaccatgccatgcatttgaggatctgagctactgtctggctttctcttctggtttcatattggttctagagagatggctctaaaggtacacagttagttcatgctgatacaccatttgtccgtgtatagtgtatgctgtaaagtacaggtctttgcagtttctgtctctcttaaacaagtgcgttggattcaactcactgttcttatatctaatgagattactggtgatttatgtttttatggcactaccaggtgttcaattggctgaatcggaagaagcattctaatgtcgagtattgcaccatcaatgagaacaagggtaaggataccaggatatctctcttttatgtaccacatgttttgttgttctcatgttgtcaactcttgtttcttctcttctattttttttcctgatggagtagccatggaagagaaggaagactctctgcgtgcaagtgtgactgagcaagacactgaggccctgctgctccgtgatgtgcttattaatggtatacttgcaattggcacgctgggccacaatgtaaactcactctgtcctgagtcctgtattgaacaagatgagcccatcatcatgtgtgatgagaaagtggaacaagagaagtgcgaagaagaaaaggctgaggctaaacaggacacaccagttacagcaccaagtgaaccggcatctgctcttgagcctgccaagatgcactcatcatcgatgaaagaagacaacttcatgtgctttgtgaaggaggaaatcctaatgcatggcatggaagtggaagatgttcctaacatccaggaacgaccacttctgatgttagagaaggtggagaaagtgagaactacacttgccgatctatttgctgcagaagcattctcatcaagtgatgcagaggataagtgttacccgaaaatcgtcattgttgctggggcatccacttcaaagcctacgtcgtgcatggagaagatgcatcacaagaagccaacaaaaccaacgtcaaagccgctgaaggctacaagaaaattaagtcgagtatggttttcttcgtctctgctttatttgttaagccttgttacattatattttactagtctggaatttattacactttgttccatggtcagtgcgccacatcttacacatatgttttaccatatagctacaactggagtaagcattatgcatctagccagtctttagtggtaaatgatcactgacctggaatgcacctttttggtttttgtcatctgtaaaataagtaggtcatgaggaagatgttggggaagaagatccacccagagcagctcaatggacgtagcaatgcagagggccctgtcactgcataatgctaggtttgtggacaaaagtttcctttctctatctggcaatttattacctagagtttttttaaagctgtctgttgaactatacagggctcaaggcccttgtgttttgcatacgattttgtacctttccaaattttcttgatttttacttggattccattgtttgtaataaaattaggttaatatctgaggtagtatttgcatagaatggataccttctaccaaagttatatttgtttgtgggtcctagagctagcatgacccacgaatcacattcaagaatatagtaattcgtttaggctacatttcactaggaatagaacatatgaatattctcaggtttaataaggcagatgcaaaaaagaactgaatagcacaggaaagtaatttttccatttcaagcttctcacagtcaaaaacaagtaatggttcaaaaattgaatattctatcacctgttgcctccatttatgtggaactcacaagagggtctaagtgctgcttgacactctgacctgtatttaaataaaatgttatcacctattgcctctgcttattattgggatctcaaaacacaatctattactgtgtatgccttggcattttttaaaatctgagctgcccccttattcttcacattttctcagaaaaccatataaacttttagataaatgaagcttttattgatctcagacaattacatcaagttgatagaaccaaactaagaacacttctggcctctgataatggaactgctgtttgtttaagtagaaagaatggtgtgtgtattttaacggttggtgattgggaattgggatgcagtgaccatggagactgtgttcttcagaatatttttaagaaatagtgttttcggtggatcctatcatggaactgcctatggtggaaagagcaatacgagttgaaacatatagggattaggaagcatgggttcggactaaaatgcattcgttcctgccatgatgcaaagcttcattcgaagcaaaatgagcacatgccatggtacagtggcgtgcaacgagcactgcaattgcacacgacgtgcatgttctgaaaaaggccagtggacactagacatgcagctaatcctcttttgatgaattctatcatgaaaccaatggattcgttgaaaatctgaacaaattgatggatttggtcccagctgtagaaaggttggcaaactcttctcgctcctgtattattgtaggctggagctatgatggaccaaatcatcagaagcaaatttcaccatatataagcatctacttttatctttttctctattttaaaatgtgatcatagtgaagttatatacattctatctgcttaacgctccacattatccaaaaaaatgcatcacactccatattgggaacacgttggtggttctgaaccaaagtcgatctcttgatgccaattttttttttgagctggttgagtagtcgaactgggaacaattactgcttgaggctacaaaatttctggccgacaatacgtcttgatcaggaactgactaaagaaattccctttcaccttttgcgggatttgttggatccatcctcacgcttcggattccttgctcaagagaaacatccatgcatatcgtcgacagcgttcgttcagtcctcttccttttgttgttggtgctgttgttattattgttattgttattgctgcctattcgctcgccagtgatgaagaatagtcctgcctatatttgcctgtagtacattgtaaagctacagttgacgtgtcttgtaagacccttattattattgtccataccacgacgtctcatcatcgtgttcctgtcgagattaataaacctctatcctatccgttctgctacctctcctaccctttaactgtgtactcgtttactaatccactcaatccctgtctcgtccatggtccatggctggattggctgcagcagctgcaactgctgtgaataaataaataaactagacgagtggttgcagtggtgctctgcaccaaagcagttcagtgtttatacaacaaaacaaggcgaaactgccaaagcagcagcttagctagcggaatggcagctgatgattgtaagcgtaaaggtaagcatcggcgcgtgaagctcataccctcatgcttgcttgctgctgctgcacgttgctgttcccgtctcgccatcggttcgatctagacgggtcgacggcgagacgggaggcgatcgattatcgataccaccagcagcaatactggtgctctccatcggtgggcgccgtgtcggacttcggttggtcgccctcatcatgccggatctgaaacctgacgcccacgccttcttcttcctcgtctcctcttcttcttctagcggggccttcttatgtcggcctagtctgacagagatggagaatttcagttgagatgcgcttgatattacagtgataactgacaagagtatgtgatttcaaccttaagatcatgtttaattcttaagacgctcacagtttcttcttatttatttgacaactaagtttcacgcgaagtagtttaatttttgttgtctaacaaaggcggataatttcatataacacgttcttgtagtgatcaaaagttacctcctcttgaagctgcaaaggggtgcagccgatggcaatggaggctggtaaggagtgagaggcgcggctaacggcgggaggccggactgcacgatagacgtgtccggtggtggagaaggccgacgtggcgcgatgaggcgtagccagcggtaaaggtggcgaccacgatgtgaggaggagctgtcggtgagtgtggcgctgtcttcgacgcacgaaggctagccggcggggggcgttcccacatgtcggcagaggatgagtggtggtggagcatcggtgcgacagccgtggactcgcaggtgatgagcagcgggtgaaaacccagcccggccttggccggaccgacaacgatgattctttcccccctcctaagggcgttgtcgtgccgtctcgtccttcaagggtggttgctgggtaaaagcccagtcgtggctcctttaagttcctgacggacggcgcggcggttttccgtcgcttctatccttggagacgtcgtttaggcatccccttgctgaaaccactcgaacgattggtgcaagcacgctctagatagagttgggctttgtgttggttgtaagggcgttttttggcattctcggctgtgttcctttattggcctagcggcaattggtccgttgctagctttctcctggacctgtgtgttgacgttgtctgtgtatgtggtggtttatttttgtccttttttctggttacgaccttccaggattgtaatcttgtaatttttttcgctttatcaatagaactttgcaccgtctcgtgcaagtcgttaaaaaaaaagttacctcctcatatttcacgtgaaacaattcaattctcgtagcgatcgaaagttacttccgttgcaaacggagatttgtgagttgtatgttgagtgccgcactgatcgacagtcactgccactaaactgattgatgatggggtgtcttctcaaattctgggcgttgtgctcatagcctttgcgacgcactgatgatggattctgtttctatggtaacagaggggtgacgatgatgcagcactgctttgtgcgcttcccaaaagcaaagatacactctgtcacgaaacagattaaaatctcttcatgtgttatctctcttatgtgcgaaatctctccatgtttatctaatttatgtgccagtagtgcctgaacgttcatagttttcgagcaaacggttcagaacttcatatcgacttctcctaagaaattgttcaaaactgtactacgttcttcgcatacagtagagttgagctaagtgttagttgggctgcatataagcccaattacatcaaacaaattgctggctgggccaatcttaaattggagcagaagaacatgaacctaaggttgaatgcacggattatggggatttttcgtctctctctctcctcatttgtcttttgatttatcgactacagttaaatttaaattttaaaacttaattttagagctgattttgaggggttttttaaatatatttttcttgcctttggcttttagaccacgaatgatatagatataaagttctggctataaattagttttcgtgttgcttgacttgcttgctttgttcatatttctacactttatcagtcgtaactcagatgatcagagccatactaaccccttcaaacatatatcttgagtgaattttatattataaagtacctgaattttcctcttccattagtacacatgttgagccgcccatatagagtaaaaaaaatcatgagcatataagggatgaggaaagactcaaaaaatatcgaaggttcgtcaagtcaaggactggggtccaaaccgtttaatcctctttttttttttgggagactgctatacagcagaatcccgtttaggtgagacaataccggttaggtatcatgttctggtattagtaccagattctagatgttaatacttgttgatatcacctgatacttgttgatatcatagcgatacctaccagatataaggagtcaagcaccgaagcgtcatcgccggtggccgtatcttctgcgttgaccagatccttcactgtcacgccttacgccggagctcgtcaccggcggccctactattcacaccccacgtcggagctcattgccagcggccgcgtcctcctttcactgagcaggtcctcttccccgacacacgacggaggtcctcacaagcggccacctcctcctcgctgctcagcttgtcgggacaaggggatcccgtctcgccgaagctcgtcgccgatggccatgtcctcctcccgctgagcaagccctcttccttggcccgcgttgaaagtcttcgcaggcggccaccttctcctcgctgctcagctcgtcgggacaaggggatctcgtcccgataggatcccggcatgtagcatttccaagtgctaattttttcccttatatttacctgaattaaattgattcttataaaaaaaatctacaagattatataaaatcaatgtatttcaaacgatggttgaaattgaaagcctttttaagaaattcaaggatcaaaattgccgtcccgcgaaaattgtaaatgcaattacttagttgaaaaatccacaacaatgttgtgctaaatattcatttcattcttgaacaagaagcctattatattattcttggaagctttggcatatttacactttctcgagatccccgcatccaagccgtccatctcgatctggacggtacagaaacgtgtcacgcctctccatccacctgtcgcatctaccattagcccccacctcctccccccctcttataacgcgtcgccttcccttcgccatgtccgtctccgccgccgtcgccgccgcctccacctcccgtaccctcgtcctcgcccgccaccgctcgccgccggcgtctagggtcgcggcgacaagccgcgggcgtccgttctcctccggcccccatcccctcgccgtctctcccgccacccgcgcccccgccatggccaccgacggcgccgccgccgccgccgcggcagggtcgaagaagaagaaggaggtgctcatcttcgacgccgaggaggacctcgcggtgtccctggcgaagtacacggcggagctgtccgcgaagctcgccgccgagaggggcgccttcaccgtcgtgctctccggcggatccctcatcaagaacatcaggtgattttgattgcttggaccccagagatcgcgcgtttcttgggttgcttcctcttcctccgggtgttctcggatcgcgtaaggaatctctcgccgttttggttggtggtggcgcaggaagctcgcggagccaccgtacctggattcggtggattggagcaagtggcatgtgttctgggtggacgagagggtggtgcccaaggaccatgaggatagcaactacaagctcgccttggatgggtttctctccaaggtattccctcgcgagctctggatttcttctttccgaaactgcttgtcctagtcgtcgtttcggcctggatgcatgatctgctcggggcatgatcaggctatttagggatcataatatttttgtggtttagagtgatggaaattcattcaggaatagaattctggtaatgcttgggttaactgaagatgaaaacaaagaaccgtgatgaagaacagattcaggttttcagacttagagcatctccaatagcctctttattccactctccaagccaaatgttagcaactttggacaaaaaatacactccaacttagggcctgcttggcaacttcgaaaaattttgcaccggtaaagatattacacttgtatttttcggggtcccgaaaattcccttttggttacggaggaaaagtttttccaggcaaatgatgtttgggcaaagagcaatgggtatatcacaatatttccattactgcagcaataggtacccattctgaaacatctttttctataaactgaaatcaaatagaaaaccaactgattataaagaattttcattacaaatcaggaagaactgcaatcgatacttgcaatttataaaagaaataagaggcaacaaatttgaatgagaaaacaatgatcttgaggaatttcaatcttgcctgctaagatctgaaataacaaagaaactcaaaagctgacaaaccagaactcaatctttcatcttgtgaaaataacaccaagcttctccttccaatccctcggtgtggcaccgggcgtagcgctgtgaaacgagcttgaggctgaccttgcccatcaccggataggagagaagcagggggaactgttgcgccagcctccgaagagggctaggtgagggtgcagagtgctgctagagctagaggaaagcctgctggccactggtaagaagctgatcgagctagaggcggcggccatgggatagaggggagaggagcgcagcacgagcacaaggagaggcgaagcggcgagcctgacttctgtcattttatttgtgtggcctgaggaggtgttactgttcttccgggtgtaatgggcattttccggcggattttaatccgataacagcccatccaagcagtcctttccagcccgtccagtaaaaactcatggaccggtattttacaccggttttgaaccaaaaaccgggcttccaagcaggcccttgtgggaagcggttgattgatatgttttctgcagtgtactagatctgtaacaaaaacacttgtgcttctcatccagtttacagaacctctactgctctctgtgagttatcggcataagcattttgattgaccaatgatgaaacgctttattcgactgtgggcagtgggattttataatctgcttgcctgtatccatgctcaattgtttgaaattgtgccaaccatttgaaatataccgtgaaatgaactatagtggttttttgtggataatggataatgaatcattagtatccgcaactgtgaatatttaggaaataagttgttgaagtggtgatccgagatgcattcttgtgtctacttattgcattttcatcagttttctggtgtgcgtgtaaatttctttgctgtgtattcagaagtactccttaactaggttcttcctttcgaatttctaggtcccaattcctactggccaagtttatgctataaatgatgccttgtcagctgagggagcagcggatgactatgaaacttgcttgaagcaacttgtcaagaatggtgtgattgcaatgtcgcaatcgactgggtttcctaggtttgatgtcatgctcctgggaatgggccctgatggccatattgcatctcttttcccaggccaccctcttgttaatgaaaacaagaagtgggtcacctacatcaaggattctccaaagccaccacctgagagaattacgtttacatttcctgtgatcaactcatctgcgtatgtcgcaatggtggtcactggagctgggaaagctggtgcagtgcagaaagcactttcagataagcagacttcgtctgatttgctgcctgtagaaatggctgtacttcaagatggggaattcacttggttcactgacaagccagcagtgtcaatgttacagaacaaatgaggtccatgcctggatattgtttaagctttcatcttaaataaagatccaggggctaatcccagcctggatactgcttaagctttcaatccaaagctgggttgtaatgatcttctgtctaaaaaaggatccaggtgactgcatagttgcattcctcttttatgcatcacttgtaaggaaaacatgagcatgtatgttgtatgttgttcagagtgatgtatctgagacactcctggtttcgacttagtaaataacctttcctggcccttgctcaagtgtctatgtttgttaaatttgcgcggttaataaaccggcgatcaacttatctacatattttgcaaattcagatagagaactcattttgtgcatgttattcaaatggtttcaattcaagacacaattctttttgtttactgattgaagtgatgccaatgctgcttgacaaagtgaggtaaactgtgatacaagcttggagacctgcatgattctgcattattcactattaagaggagtcttattcagagtgtattgcgagtaccttcagtttccagtttagtaaatcacctcttttgggcgttgcattggaaatatttagatgttcagctgccacttgtcaatacctgtaattgttagtttattgtgtatactgttccatccacagacaatccatatctttttactgcatttgcacttcagaacggcaccaatttcgctcgctttcagctgcctgtacatcgcaaggggctagtgattattcaatttttagagccatgcataggtagtgtacaggttgatctgtaagatttatattttcaggcagtactgcacgaggatgaatttacttaggcagcagcctaaatggctgtacgttcaaggcagggaactcagaactgattagcaacatggcctttctacccaacataaatcgcgcattagttgtgctgtctgacactgacctcggtacatttctggcatctaaattttcatagacattcacattttgggcaataatagcatgttgacccgttgacaaattatttcacatatttaaccgtaaggaattttggaggaatttcataagaatcgaactactcgttaataatatttgacgttaggagtactagtactcttagcatattttgaagttgggagcactaattgtaatactggaagtagtgaattttatgaaaagttctataaattccatactcctatgttccaaagaagccttaatcatatgataattgaacttattcctaaggccgagtttagttccaaagtttttcttcaaactttcaatttttccatcacatcaaaactgtcctacacacacaaactttcaatttttgcgtgaactgaacacgccctaaaagaaattataaattccatccatttcaaagaagccttaattggataattgaacaccacgttttcgacatgatttggcaggccaaccgtggtggacacatccagagtgaatgcagggagacgagacgatggaccatggctgcattcccctcgtgctgccacgggctctcggccggccaagccaagccgccgcaccgcccatttcggccatttgcaccggcatttgcagccatggtcctccatccatctgcaacgcactccaaaaatcccaacaaacaagcagcagcaacacatgattccatgagctgctccagtgaaagcttctgctgccactcgatctccagtttgcagcaagatattactaatccagtacctaacctctcacccaggttcatgtgaggtgtgaccctatctcctctcaagactcacatgagctttggagcaaaagaacatggcctagaatctagggcactcttaaaaatctaacctattagtttcaaaagaaaaaaaaatctaaccttggccatgttagaggctcatcatggtgtggcatggaattctttttttgttcggataaataaaactgaaagattcagaagcctgatcttggggacacgttgctcgtcactacatgaggagagctccatcgttgctgctgttggtttccccacaaaactactccgcatgttcaactgtctcatgtaagatcatattaaaattcttggtgttgcaacttgcaaattgtgactttgtgactgaactcatctgtccaaattttgtgtgtgatcgaattaagaaggatactggatatatagagaattgttaattaacatgtggtagcagaatagatgataggatctttcattttttttgccgcagcaattgataaagagaagagaaaggtaaaggtgttcgtcaaaggtgcgaccagtgcagaaaaaaatttggggtggttatgattgccggacagacctgaccgatcgatttgcttttgtcttaaggttttgtgcttttttttgggcctgctttattctaaccatgcgtattgaattaaatcaaaatttagctggagtacgtaataacttgaatacgaaatacatacgaatttctgaagaaatttgcagccattacatgagaaaacacgcgcgttattgtcatgtatgattgcgtatggttgttaatttggcttggctgcatccacaaaagattttgatgactcgttcaatgagtcggtccacgcgaaatattctccaattttttcttcgttttttttcgagcatatttgatccgttgacaaggtgaggatttccatgagctaaacgtgtcaggtcacaagtcaatcagtgttgatcacgcccatgccattttatagttcacacgtacattgacctacctgaaattagtgcaggattaggttagaaaaaaaagttaattagtggttgggattttcatgggcttcttctcctggataaaaccgtgtggatttggtccactctgaatggttcattcaaaatttagcattgcaagtacacaccttttagacaaacatttagacctattataagcctaccaaatctcgcatgaattgagttaaaatacactcaagtagatgcatataaaaaaatcagaaaaacaaacacgctattaaagtatgaacaaattttcaggtcaaccaacccagtctccttttgtccttacaacctaagcttagttattcagacaaacataaaattgccaaagaaagagttcaagaatgtatccccactttgaatatttttttaaaaaattaaaaaaaaaatcaaagaactaaccgaattcaaaccaaaggtacatcggttctattcgtaccaaaaattcctttgaaactactagtatatgattctcatcctctacttgttttgtttataagctgcaactaatatcgaaacgtaaccttagagttgatttaagatttttttcttttattctactaaagctattatccagtcttaataacctctataatataatttttactatacagacataaaaagttttacctaaactaataacctaataacatgttctttttccaatggtttatcaaccgacaagagcccaagatttaccaaaccgtttggattgggactactatcaccttatgatataacgattatcacgaaaaccacgtggttaccacgaagtatatcgtggttaaaaaactgaaaatgttatttcacacgataactgcacggttttatagacatttcgggagcccaaaagtttcagaacagatccacaaatgtggtgggcccacaccgccagcctctcccactgacacctaggccccacaagaaggacagggccggtgggtcccacgtggcaggccggaacaaagacccgtttaaacgcgcacggcacccacccactcctctctccctcttcttgtgtgtgtgtgggtgtggctttattggcgtcacatgcgccctcttttcctctctctgtttttcttctttttctctctctatctcttcgcttacgagcttaaagagacaacgagttaaagccgaggaagaaaaaaaaaaccaaccgatttttttttaattaaccggcgcctcctccttgcgcggcgtgcgttcgccggcggcgagatcctgcggcggcggaggaggaggaggaggaggaggaggagggggatggagtggtgggggccgggggagtggtggcgctggtagtggcggggacggggagtggttggttgggtttggggagtttggtgggtgagagagggggagagggagaggggacatgaaggcgctgcggcgatccagcacctcgtcctccccgtcgtcgtcgtcctcgtcgccgacggccgcgtcgtccccgccgtcctcgtcgtggatccacctccggtcgctgctcgtcgccgcggcgtcgtcgtcttcgtcggcgtcgtcgtcggcggcggcgggaagctccgtggccatggtgtccgcttcggcgcccgccgcgtcgtcgtcgccgtcgccgtcgccagcgcccgcccccgcgccgtcctcgccgcactcggatcggtgggttttctccctctccttcggattggtgaaaaggaggagtaaaaatgactccttttttagtcctttccttttgggggcgtcttgatctgcttcccgtggagtctagcctcacatgttctgatctaattggtggtctggaggctgcttaggtgctcatgttatggtttttttgtgcgcctcaatccaaccaagtctttggatttcagcttaagagtgcagtaaaacgttagagtgacagcctggcttaattgtgtgcctagcaattcctgcctcgtgcaggaaggttgcggggcctgcaatccaaactgaggacaccggatttttaagagcgaatcgattatgtgttcaatctgttgacatgatagtgggggagattcggtttgttgattcagagagatcatggattctgttgcagagtggtttgcttactctaaaggtgccttccgtctaagttctagtgtgataagattttgtcatagtttagtggcagcgttagtgctgaatgcagcttgcacaattgcctcaagatatgttgatgatgtgatgctgttggtggtttgaacaagggacagcttgctgctatcttgaattatgtgctttaggttgttggatggcatggtatttaagaccttggaggtgatcctgtcccctaaggtagcaaatttagtttctaagaataatagggggggtgcttgatgtttccttttggtttgggagtgaagctgtggcactgtaaatgctacctaaaagtttggatcttccatgagttgaacaattttgctgacctgaataggtatcaccgtaaatcacaagagtttttagatgatacacctccagttttcctgtgatctgctcttgttccgtagttatctcttgtcaagtttgctttcaacttatttgttcactgatctaggtattatattgaactgcatgttgactataacgattcctttttgtagcccaggtcctcagataactcataactatgaatcattgcctagaaaatcgttttatgtggtcatcttttcttaatccaattaccaagttcaataccatcaatttttttcactagcgtatggtgttagggaccctgtttcatccacagattccatagtattgtctgatttatgcctcttgatcgatgtatgtattattcagctatgtagttttgtttagataatggataaaattgtatggttagttcaaaatatggtagaccatactgcttgattaagaatcagttcatgctgcgcataacgaatgtatccttgacgctgcacaattatgttcttaacagcactttgaaacaataactaggaggaagtttttcagtatcacgtttgtttcgtaaactaattaataccttaatatctgtctattttatgaatttgttttatatccaaccttttcgtgtgcatacaaattatatgtgaagttggatttatgaggactcaaagcattccctcttcggatgctgtagcttagagagtgtgttaaagatggtactattagttagtctgtcagttggtatggcagtgttatcttttattgatccatatcttccttgttgctccactttctaaaactattctttaatcttctttcaggggtggaataaagtctccatggtctcgaaggaaaagaaaacgagtactttctcgtcaacaatgggaaggtctgttttctgctaatgggaaacttcgtgatcgaggaaagaagtttctgaagaaagttcgcagcggggtaagtttgattatctatttgtttagatgtcctgcatatgtttacaagaatacttgcctattgttttgtttgttcaaagatttagacatatatagtagtgatattgaaagcatgttctgcatcttactccgtacagtctaattaatatactggccttttttttctgttgtgtcagggcattgaaccaggaatcagggctgaagtttggcccttcctgctaggagtgtgagttttttaatctcttctatgcatctagtaattcataagctttcgtttctttgaccaagtttgaggtcgcaactacatacacgtagacttcctatagcacctaattggttatgtgaccacatggagtgtgcatgttttgtgtagctctacgggacggctccgattcatggactagggtccttccttactgtttcccataatgaaaaggtttaggattatcagttagagaagatagttcttcatggcaatataatacaccattcttagtatttgaatccaggataattaataccttcatactacctctgtcccaaaaagacttcatttctcagttcttgtccaggtgcatagccagaaatgaagtctttgtggggcagaggtagtaacatcttttccagtttggttttggttgatgtgataaattgtatggttgttgtcataaagtctgttcggattgttgtgttgtgtttaatgtattctgtcttcaaaccaagagagattgacgctgtcaattcttatgtgcagctatgatttaaatagcacagaagacgaaaggaataccatcaaaatcaagaaaaggtattatattcattgctctgaaaggctgttcaatttaagtaggattgaaacattttgctcaatgtgctgtgtttccatcaagctacactaaaagcccaaccactaatatgtaacatagcagaagatccccaagtagtttcagaacatcaatattgttattttgcaatggcctaaagaaaatgagactatgatattctaaatgcgaccaatataatttctaatctgataagaacttgttgattgatgtggcttttggttcaggaaagagtatgaaaagttgaggcgacagtgccagcaaattctgaattgttacaagggcaatgggctgaaagtaataaatgaaaataatgaggagtgttctggtatagagtttagtgctgaaggatcagaatcaccttgttttgaagatgtcaatattgcaagggcttctgtgtcacatgaggagctgaaacctgaatccgagcctgagcaaccagataactcaatgtgtgctgttacagaatgtatggaagaagacacgggtgaattaatttgtttagatccttgcatagcagagtcagaatcttctgattctgaatcatctgatgaagatgaccctggaaggatatcgatgtctggtgaggaaaattgtgatccagatcctaaatttaccaggactacttcattcaaggcagacttttttaagtctagcaagacttcagaggattttgccacgtggcaacgcattataaggttggatgctatccgagcaaacacagaatggattctgttctctcgcaaccaggccgaaatttctagagagagagctttgcagtgtgcagaatctgttgggttaagagattatgaccatttagatcccagtatgatttatcatgctgctcgattagtggggcttcttgaagcatatgcggtctatgatccagaaatcggttactgtcaaggtatgagtgatcttttatctccaataattgcagtgatggaggaggacgatgaagcattttggtgctttgtgggtttcatgaggaaagccaggcacaacttcaggcttgatgaggttggaataagaaggcagttgaagattgtctctcagattatcaagcgaaaagattcgcacctgtacaagcacctgcagaagctgcaagctgaggactgcttctttgtgtacagaatggtagtggttctcttcaggagggagctcacctttgagcagaccgtatgcctttgggaggttatgtgggctgatcaggcggcgattcgcgctggtattgggagatccacctgggcaaaaataaggttgcgtgctccaccaaccgacgacttgttgctttatgccattgcggcttgcgtcctccagaggaggaagctgataatcgagaagtatagtagcatggacgagatattgcgagaatgcaatagcatggctgggcaactggacgtctggaggctactcgacgacgcacacgacctggttgttaacttccacgacaaaatctgatctgagggatgcgtttctctttgttcttgcggtagaacaaatatagacctcgacattttttttttttgggggggggggggggggtttctttgctgcttgcagaaaagtgttatgttccctgtagctcgtaccggcatagaacattagaacccacttctaagtatagagattgttgtaacttaaaaagagtgaggactcgagtgttcctcacacacgaagatcagcaatactgcttgatgttactgaggctctgcagactactactattcattgtttaacctgttataggcacggacagatttttcattgaaaggtatatctgtgtatgcctgtatggtctgtcatattgttttctccaataatttgggcttcgtttgggatttgggagaagtttcttgttcatgtgggaatcaaattgtatcgtctgaaatcgatgcctctaaacatttggcttcaaaacgcacccttctgtttcttgtttgattgatacctgggacttgggagcagcatggcaagcgaattctagcctgacaatcgtaatcctttatgcaggaaaataaaggtaacaaaaccaagcaaatttgagttggccgatgacgtattttgctttgaatcctattattctggagtgctttcagcatgttcaattatatactctctctctctctgatttatattataaaatattttgatttttttctaagccaacttctttaattttaattaaatttgtagaaaaatgtagaactacttttagcactaaacagatagtctcataataccctgcaaaaaatatagtctcaaaatacatttaatattagatttagtgaaattaattttttgttatagattttggtatgattttttcaaaaatatggttaaagtcaagaaaaattgacatagaaatgaaacaggagagtacttttttgaaagcccaaaacatgcatacaaagttcttaaaacgaaacagaaagcaaaacatactggggaattggggataccggtttctatcacgaaaccaagctggggcagttcaattatatacttaaaaagacatttaccagttctccttttactgtgattaacagaacgattttcaatattactattagaccttgttcggtttagagggagttgaagatgattgaaggggattgagggggaataatttcacaccacaataggtgtgaaataaatcatctccaatccctccctcacagagattaaatgaacaaggccttagtgagtaaaactacaacgctatggagaagtactactccgtaaatcaaggatacaaattagtatatcatacatgggttagtgtcaaaatttggccaaggtatcatacaagttatttactccccccgtcttaatataagtgtaacctaggataaacgtgacatatcgtagtgctacgaatctagtatatgtttcatccaccataggttgcacttatattgagatggagaataaaatttagtaatacactacttcctctgtcccgtaaaggcgatcgttttatactcacaaaatatcctatatagattatcataccagttttgtcggatcatatagtacttgaattattcttgtccacttgtttgaattaaatgcatgtgcgtatttattgttatttctcaaccactcaaaccacctttgatgaaggaggataaattggaaatttacacatgagctaatttatcctataatccttagaacatcaatctttctgggacagggagagtaatagcttatcttacatttcttttctaagagtttgataaaacaaactagctactactgtagtaaccatctcaaaacaagcccacagcattctgctaacagtctatcagatatatatgggtatcccgtacacgtttcgattgtcttctttctgccgcatggtggattgccctgagtgacaagacaaggaacatatcaaatcgtagtatgatgaagctctccatgttggggtagccacaagttgtcgtagggcataactttgttgtcggattcatatttctaaacaactttccaatgtggcgtacaaaatttcatggcgtattttttttccaagttacatggaaatatgtaaaatatgcatgtacaattcattttattttctaaccttttaaatataattttaaaataaactcctcttaagcatatttataaatctgaaccatttgcctactgtaatgttgagatagaataatgttgttgcgtcacttaagagaccaatgatatggcaaatcattgttgtcattccatgccatgaacaatagttctataatattttttttcaattattgatactttttaaaacaagttatttaagagtttagtttttaaaatataaaggaaatactatctccatttttaaataacttgtagctgaactattcatgcttaaactttaatctctcatttttttcttaaaaaatacaaatatttaagaaaatactatattatcgaagtatatgtatattgcatatatcttaaacataggcataaaacttcttccatttattacagtaaaaataggaaatgaaaatgtgatagtcaacgctaacaattattcgaaaatggatcagcaagcaatacaattcattgcatcagggttcgaaattttgtttcaacatttcggcccccaggaacgaaactatagcatccgaaattctaatatatccgtgaatttagctaattttattcagattatgacatgtggatctaatggtaaatccttaattatcacttgtatggcaaatagttaaatatctcaaaattgaaattatatcagaccgaaatatacattccaaaatttctgaaatttcggatttatcgtgaaccctctgcaaatggcatacgtacgaaggacggagcgcacaccgtcgatagtgagacctctcgactgcccaccgctttgcaagtctcggcttcttcatcaaagctcaaacgaccaaagcgatcatatcgcgacacagtcgagtcaccctgcacctaagcctgcgcgctactgaagatctctcgatctcatctcatgcgtcaactgatcgagatctgcagctagctacagctatagctttagctatcggtcgccacctcgtacgtcgtctacctctagctacagctcccatggctgacatgcgagcacgacggcgacggcgagatcgacagccggcaagccaccgtgcgtccgggctccctgcaggtgaactgtatgacagggaagcctcatcgactctcccctcaaacactagatgccgttgctactgtgtagccctattaccctatatattcctgagcctagatatccattacaaattatgaggttgtacatatcgatattatttcaaatcataccatttttttaagttgttcaatatgtgcatctatttagtttcttttttatcaaactctgataaatatataagaagtcctgccaaaacctggcaatattgctaaattgtcaaaattttggtattgtcaaattttgataaagtttattttgagtacaatctgaacataccatatatttcaaaacctccaaatatagtatgagataaagataaaaatatgtaaattacactagttgaatcttaagttccgtttggtagaactccaattcctaaatttaactccaaaagttaggtatgtagtaaagttatagaacagtctaaacctagctccactactattttagatggaactgaaattgtttggttaggccccaacttcaagagagatgaagatgaagccagtactgcaccaacatgctcttaggcaagaaaattctggctatgccttcaaacatgttatagcaacaacatccagctgctgccatgcatgtctaagttagctacaccatacgtttcaaattatttatagttatcattttaatttatcctaaatcaaatatatttataaccattaatttttattcgtgtgattcaataacatgtgaattatacgcataaaagtatttctcatggtgaatttaaaaatataaatcttatggtgtaaaactatatgagtttacagaaaatattattcaaagagattaaaatgcttgaattgggataatcctaaagcgataagtaatttaaaatgtgggagtaattaactgtctagacagacacaagcatggtggagatgatgagtgattcgatcacttgcgcaatcggcaccagcaggtgggttggatcgatggttcgttcaacttcaaatcagaggttcggttcagaagatacggcagtatcacctatctgcttctctgataagtggattggcatgcatggtgagctaatgtctactaatactttaaatttgaaagattgggcttattcgtttcaaaggaattgcaaaggaaaagcataggaataggaatgggttttaaactaccattcgttttataggaatgcaccatagaaaaactataggaaagttttccattcctccatttataaaggaaaagcataggaaaaaataatccactccaacctaatgtttgcattcctttggttggattgctcaacaacataggaaaaattcctgtgtttctcaatccataggtttgcacatgtattcctatagtattcctacgtttttcctattcctacgttttgaaaatcctgtgaaccgaatgagccctgagtgaattgttgctgcggctgatctacttaattataaggacaaattgaatattttaacaaataaacttaataaataacttaaaataagtacatgatccaaacaatacgataaattttttttataaaaaaatatatcttttaaagcatgaaacaaatcattcgtttcatcaatctgataaacatttcgaaaagaaacattcatcttgctgaatgctgatgagctatatcattgcttcaactggcactacacagtggctacacacctacatacccactggcctggtcgatcaatctgcatttgcacgtgtggggattgaactgcatttgaggttgcaaacttgcaatgggggacagagagatcagaagtgtctcaccactggagtctcttctcgtgtgtgtgcgcttcaattctctgatcatttgagccagaaacctttttgtgcatcaccccctggtagtgatatgccagtgcacagctatatacagcactgcaaaagtgcagtaggaacaaagcttagctgaggctttagtagagtggagaaagtaatatttgcaggtggtgaccaagcattagcttgggtttcgattattctctgtctgtttccaccttgcatcgtgcggcagcaacatatgttccgagtggaaacactagtactcctggattgtaacgagatagggggctttgcccatgcgctgagctgacgagtcaccagaaaaatgtcttctcttgtttggattgcaacgcattttcccattttctataaaaaccagcaccgatatagacctcaatagccgcacgcgaaaaaaataccatggaaatctaatcgttatgaagatgagcactgctatggtgctctctacttgtagtattctactacaagtagaagcaatctgagccattaatttataagggcaaattagtattttactaatttatggttaagggtaatttttaacttttacttttttttcttaatagtaggatcagttcgtctgtgtcaccgcttctttcgttctcgcgtgcgcccgactccggcggcagtgcccactccggcatgtgcgagctcctccgttgaacagataatactacaaagaactactgaacaaagctatatagtcaaatcgaggagcaagagcaaatgtgctgttataaactcaccatgattatctttaaaacctatttattagtttctccacatgttgtgttttcagttcttaaagaattaagccattaacatcgctaaatttgtccaagatggtaccgaagtatttaagttcagagtggtcatttgctcagttcaaagcgatgctcaaaacaccgtaatattgattggcttcgatggcgttgaaatcgttgaattgatctgacttcttgtcgtggttcagggcttcaggctcgctagttatatgtctccttctcgggcctggcgtggaacgcatactgatctctagcatttgagccgctgggcaaggagtagcctcccgaggctgatcccccgccgtaatcccgcaacgatctcatggaagcacgccgccgatctgctcatcgcatctgctccgccacactcaccctaaacctagcacggcccaacgatgctcaagtgtttctaactgatatgcaaaattacgaattcaaccatcccgtccatattttttggacgattataccctctaacgtttctactaccgctatttaagataggagtataaatagatctgacccattagatataaaacgatcaacggtttagattaatttatactccgagtagaaagcaccggagtgggactctatgaagatactaacatataatatttgttactgaggttaacgtaaaattagtgttcgcctagaccatatagtttagacggtctagaccctaaatgttgggttaacttggaattagactgttcgactgtccagtcagtcaaaaccaattcgaacactatctagaccacataattagacaatatatagacaagtgtaaattgtaaacctgtcgttttagactatggcctaggcaatgggccaatgcattttttgtgtggcaggagttaaaacttcgagcccaatccaaagtgcatatggtttaaggttttgacctcattccaaacctttctcctctactctaagccagtcactgcaattaacttacgtcgtctcttctctgctattcgtcattgtggaccttgctgcatatttgtccggcccatggctttactcgagtggttgtacctatataaagctgctagttcttcaatatttatggaacatgttaagtgtataaaaaaaatgacgataatatagtgtacggcatatcgtctagactagctagactctataccatgggtcaccgtccgtctagcgtttagcgtctaggtgaatactgggtaaaacatacatccctgagacactaattgcaagcactctttcccaatctgacataattacagtgtatcaaggtatcaacaaatctcaatctgcttgaaccacttgccattgttcccttgcatatgttactgtccccatgcagttatattgtgtttgtatctctattaagggagagtttaggataagagtcagactatatttttttatcttgcatatgttataactctaaatcctacttcctttgtctcaaaatataagtatctagcttgtttttggagagattaaggattatggtgcaaggtaaaaatttattatattctaaggctaggtagttggtttgatatagattgctaggggtagggtgaaaaagtaagtgaaaaaaaaaatcaccttttacaattctaggtagctactccctccgctcctatttgatcttcatagaagtttttttcatcaaagatgaggatggcttaacttccatgcatttcatttaatatgagtatgttttcttgtgtttctatgttgtcctggatagctggtagccccagtgtggtcacgcccagaaattcccgaatagaattccaagcagaatgtgtattaaaatccccgtccaggaccggccggggtacacaaacgacaatgttgacattcagatccatatcttacaaacatcataaaagtcttacataaatacagtggaaaaacgaaagacaacaggagctaagccttgactagaactgcagcgggaacaccactccacaggcatcctcgatggcacggacgaagcctactcctcggagaaacctccatctgacacatactcgtactctggggttggggaaaatagagcaagactgagtactacccactgtactcagcaagtcataccggaataggggtatgatgtagggaattatcaaaagagagctaaagtggttcatttgcataaagcgagcatttataaacagaagttgaaagaattaaacagttgcaataattaattaatattgatcatcggctgtccaacgccatcccacgttgcaacaggcccaaccatccacctatactatccaatttcattagactaaactagggtgagactaatcacggtgaatctggttgaccgcccataaccgcgggcacggctattcgaatagttttactctgatcagaggtgtacaactgtacccacaagacacagccccacgacacgtttccgtgcgccgacatgccaccacgacataccggaaagatgccgtgacaggaccctttgcataaccccctctaaccaagcacaccacacctcaggtttcacccccactcctcgcaaggcagcgggcagtcccctctcgtacctaggtgaatccagaagcgacagaggccgtcgcagggcccgccccgctccatcacgcccacccttgcctggatgcgtcagctagaggaaagctacactacaagcccagccgttgcccacactggcttgtggtaagtacgataagttcttccagggcatcccgcgaaccggtccttaactgccatgggtgcgactagcaaaatcatgcacccacagcccaccgtgtgattcattttaattaaccaacaccaaagcggtggtactaaaccaacattatcatatgaacctacagtctaaacattaataggattttccccactgtgtactagttgaactaagcatggctaagcaactcctagtccaacgtctattcatgttataacccaagctaaaaaaggagcagggtaccaaaatagcatggctgtaacaataggtaaacatcccatagtgatattgcaaaacaaatgtagtatttgaaagaaaacattagaacatttgcaatatagtatcaacatgatcaagtgacaagcatgacttgccttgctctgctgctggagaaacctcggcgactatttcgaagtacaccggagcgtcggaagaaccggaatctagcgacatacaaggcaaacattgcaaacaggctataagactactgaaacagagaacaaaaccatttttaatggattctacacatttttcttgatttactgagacttgaatgggcttaaacggagctcggatgaattagttatgaattttagaagattcactgtgtttattactataacaaaaagtccttaaatcatttattgcgcaataattcccagggctgacatcatcaagggggcggcgccgacgggtgggtcccactggtcagtggctcgggagagaggggaaggggcggcggcacgtgggccccactcggcagcggctcaagggggggcggtccaccgtggaccgggaccacagggtgatccaccgccggtccacgggaccgacggcccagatcggccccgagccgatcgggcggtggcgatagaggtggccgccgggctcggctcagcatcaaagccggccggccggccagggctagcggcgatgacacgcggccgacggcgacggcgaccggcggcacgggaggcggcggtggcggccgaaggcaacggcgcatgacttgaagcggcggcgcggcactaggagggagagggaggggagtaaaggggagaggacgcctcaccgagggtggccggcgcggaggaagatgacggcgaacggcgacggcaagccacgggaggacgacggcaaccggcggacgggcttcggggtgccctaaggaaggaggagagagagattagagagagggagatgaaccacggcggccggcatccatggccgaaggcggcggtagaggtagaacttaccggagcgcgaggggatgcgaattccggcgacgaatcccgacgaaggaagggcggacggggtggagttcgtccttgcgaacccaacggcgacgacggcgcggtgcggcggcgagcctagcggcggctagcggcggccggagcggcgggaaaggcggcagcgggtgggtgcacggcgcgggagcgatggggagcaagagggagttcgacgaaatggggaaaaagagagagggggcgacggcggagcttaaataggggaggggagtcccggacgtggccggtaggggcgagattccgccggccaacgtgggggagtgggagaggagagagagaggcgggattcgaaaatcgaatcccagccatctcgggcgcgggcgcgggcgggagagagaggggagtgggcgcgggaggtgcggcgcatgcgcgggcgtgaccgacgtggcccggaggaggcggaggcgtgggcgtggcgacggttgcgggcgcggcggcgcgggcgcgaggtaggagacgggcccgacaggtggggcccacctgtcggcgtcctgggtgggaggagggaggcggccggcctagctgggccttggccttcggctggcccagcggaggggagaggaggaaggggaatgggccggcggcccactcgaaaagaaaagggggaaaaagaaaaagaaaaaggaagaaaaggattttccctggaattaaaatattgcttgctcaattttaattagttaaaattatttctagggctctgaaaattccactaaaaatcttgttagcgtatttcgacatgtagaactcaagaaaaattccacatgccaattctgattattatttgcattaatttattaaggttttctcttgatttacacaagtatttttttgagaccatttataacttcaatttaggcttgggaaagaactttggggtgtgacatagccccagtgtagttgtttactatggttctgcccttttgggccttttttcacttttagtgcagcaaggttctcttgtctgcttttcatgtatgcacttatgttgtctcttgggcttggtttccaagctgggtaacgaaagacttacctgttgtacaaaaagtggtagagaataatcaagaaacatatagacttaaacttcctcatatgcacaaggaaagagtgcttaagggcaatcccaacctagaaatcatatagtgatttccatacttaccttatcatatagacactatatatagaaactatgtacccaataagtagtttcttcaaaatatatttgtcgacgggggatacccgcggatcgtatttggagggtattggggtacgttggtacgaggatctaaacgatacgacatcaagcatacaagaagaaaatgattatactagttcagacccctcgtaaggtaatagcgctaatccactttatataagattatggaagaaaccacagagagtacagaagagaacgactgaactctgagattactgacgagatccttgtcgagaggggttcaacgagatctatcggcgagtaggcttcaagtcctccggattgcgtctatggtggcaggtgtcttgcactaagatttgataccctgtatcccttagggggtttgtatttataccgtagatcaccttagtctccaagtagaagtcggagacaacggaccccgtacgaccaaactatatcctaatcctctccgagtaggactctgttactttccatttcacaaatactatttccttgatttatacagatccttttcgtgtacttatggatataccgtatccgtatgtctcatgaccctaaggatagagggtatgacttatccataaccctgacaatattcttgtccaatcacctttattctctctcctcatcctcctatccccttgttcttttttttatgtagaactagtttgttgcataaaaatggtttcttcatcttttttccctctctactcattaactcttttgccaccttatttttttcttatgtgacaatatatttaatgatgagtaaattgcacccatgatgcatcaacttagcaggtgggtgcaatttggtgcaagaacttgagaaatgagcgttctagtgcaacaacttggcagataagtacaatttagtataagaacttcataagtgatcgtataaatacaacaacttacaagatatgtatgattttgatacaataagttaagaagttattcaacaacttaattatttggagcacatttttacacatattagatttttaagtacttattttgataatatactagcgtgggtttgtatataagtatatttatatttttattctaataactaataactgaaagtcaattaaactggatgtagaaattattatatttcggttgagatttgggaaggtgaagaaaacaaaaattcttgaaggtaattggatgtgcagtataattcttaaagattaaatttaatattgtaagataatatctgtaggattgctatgtaacagcatattgacatcgtgaaaaaaaaactcacctagcatatgcttagctaagttgatgcaccaaaatactaaattgtcaagttcttttactagaacacacccacttgtcaagttgttgcactcgaatgtttaattcttaagttcttgtactatatcacagccacccgctaaattgttgtactatgggtgcaatttactctttaatgctatagaaattagctcatgtggagggttgggaccgttctaattaattacccccatttcatgcaaacttaatttgcatgtatagacaataatactgcacgtcaaatgaagatgtcagtgttatgtgacgatcagtttgaaatttctgaattttttttatgtgatgattaatatggcatggagggagtatactagggacatttaaacactaaagtagctatatttttggatggttgtgtactttgtaaccgcctttgtgtatatatttggcactaaattaaattagtttctgtcaaattcttatgggacctctcctgcgcttccgacagaatcttactgtgaaattaatttctacaaaaaagaaaaattgtttgctccaaacaaactcctcacagtgtagctgacctcactcgattacattgcactgtcagaaggttgcacttgtgacttgacagaatactagtgtccgagctccaaacaccaaacggataggcttgtcgacgatgctttccactgaaatgatcggaggattagatacatgatagaaaagaaaaagaaatgaaaccgataggaacgcccgtgtaaaacagaatattgaaaaacacaataattctatataaatatgtatttgaatggaacatatgaaaaattaagaattttagaggattttatgctgctaatgttgtgcgaacgttgtactaactttttcaataaaattaatggtcaaacattatgcgaaaagttaagggatgaaaagaaaatcaagagctctgagtgaattcttcttttcctctggaatagacagggaaggaaactttctttatgctttccttcgattttcctttgtgccattaattacgttgatccaaacgatgttacagtggttaaatacataggaaagcaaatccttggttttctttgcttttgctccaattcaaaattggcctaaatgtgagaacttctaccgctaatcttacaccatacaattcaaaatttatactttggataaattggaaaacttctgaaattttgaactcgataagtgaccaatttacgccagtgaaatttcagtttaaaaatacactgtaactgtttgtttttagtgctgcattttcagtggcaagtgtgtactgcatgcactgaacatagtacaggaaagcgtgtgtgtgtgacactcgatggctcgacatggacgtcgagacctaataacgatagcaacagcttcaagagttttcctagcttttctttactttcagagaaaagtgtgctgtctcgcgtttgctgtttctgagtgttgtgtttatatctgcccttttttagtgactattagaatatgattacacaacttgctttttatgcaggtcttttttttctcgtagttgatagtgttgagattatagacatataatgatttaatctattccataaataaatcatgacattacagatgaaaactagtatgaacgcatcattagatctacacatgtaaactacacagtataacatgaatagatcaaatatgcgcaacatattgaacacgtaccgaggtgacggaaagaccggctgcttggtcgaaacttttcgcaagtgtctacgaaggcacgaaacacgcgagcgaagaggaaggcgagccgtcgcgaacgaacagggagcagtcgcgcgaagcgcttcccaaaaaccttattaccgccttctcccggtgcagaacgtcgaaggcagaggttccggagacctgctctcccgatcgccggtgcacgccggcgagcgggatggagtagtctacgagcgacggcgcagtacagagtaggaagcaaaccctagattgatttttttgtatgttgcgtgaagacggcaggtcggtttatatagagaagggtcgcttgatcagggcgcccgcacaatctctactgcgcgtaaccgaaccggataagtcgcgcgtaacttatccggactccacgccgtttgcacgcaccggatctttcggaacgtttccaaaacaaaaacgaatccgaatttgcaacgaaacaaaactgcaaaaggaggctgcatctgcgcaagggtgaggagccaatttttcggaccattcgacgcgtacgtcgtgcacgcgcgccgcctgccctgccctgccaggcgaggcgagcgagcgcgcgcgtgtgtttcccctcttctctccaccacacatgcttcaagcgactaggagggcatcctcccttttaaggaggtccccctctcctagaataagcaaggtagtactaaactccacatgcatgccatcccatgaggtgggcttttgtgattttccaaagaattaatcttcgagtgggctaaggcccattcattaattccaacaatcccccaccaaatctcaaaatcccactgagatttgccttttccaatgtattgtttatataccagcggttcgatggagaccaattaaggttgaacatccacctagaactccaagctacacttactcacaacttgaacaatggactacgccttgaattgcaagtcttgtgcaagcaagtttcactcaaagtcttatctggtactagaccgtctgtagactacccctcgggtggagcgtataagtcatactcctaggtctttagtaagcttcctagaagattcacccaaaatcttcatagactgcgaccaacagtcaagctcacaaaggtgagttctttcaagaatgctctgcaggacaacatctttgctaattaaagccaacagaactcattaaggcatagccaacctgccttgcagctcacgagagtatatgcatcttcacttggagagggtatatatattggtactctcctctagtttattaatggtttgttcttcccaggatctaattcacgggatctccgatcacatagactgggttaccaccatagtataactcacatgggtctcaaacccatctccttcgatgcattgtctatcacatttcgtgatagtcccttcgtgaagggatctgccaggtttctcgctgtttggatgtaatccaacgttataactccggagtttcttaatttcctgacagacttcaatcgtcttttcacatgtctagacgatttcatattatccttagaattattcactttgacaattaccgtttgattgtcacagttcataaggatagccggcaccggtttttcaacaacaggcagatccattaatagatcacgcagccattctgcctcaacagtagcagtatccagtgccgttagctctgcttccatggttgacctcgtcaaaattgtctgtttgcaagacctccatgaaacagcaccaccacccagtgtgaaaacatatccactagtggctttgatctcatccacatcagagatccagttagaatcactataaccctccagtaccgcaggatacccagtatagtgaagccccaattccacagtacctttcagatagcgcattactcgctcaagcgcacgccagtgatcatctcccggattagaggtaaatcggctcaacttgctcacagcaaaggagatatcaggcctagttgcactagccaggtacatcaacgagccaatgatttgggagtattccagttgattcctagcaattctcttgttcttgcgaagcaacaagctaggatcataaggtgttggagaaggcttactatcaatgtagccaaagcgattcaagatcttctccacataatgggactgcaagagtgtaatcccattctcacctctaattagcttaatgtttaagataacatcagctactcccaaatctttcatatcaaaattttgagacaagaatgatttaacctcatttatcacctcaaggtttgtcccaaatatcagtatgtcgtcaacatacaagcacaaaataactccctcacccccaccatggcgatagtacacacatttatctgcctcattgactgcaaagcctgcagatgtcaatgttttgtcaaatttctcatgccattgcttaggaacttgtttcagaccatacaaagacttcaacaatttgcacactttgccttcttgaccttcaactacaaacccatcaggttgatccatatagatctcctcatccagctctccattaagaaaagctgtcttaacgtccatttgatgaacgagaagaccatgtgaggctgctagggaaagtagcacacgaattgtggtcaatctagcaacaggtgagtaagtgtcaaagaaatcttcgccttctttctgagtatagcccttagcaacaagccgagccttgtacttttcaatagtaccgtcaggcctaagcttcttcttgaacacccacttgcaccccacaggtttacacccatagggtcgctctgtcacctcccaagtcccgttagcgataatggaatccatttcactacggacagcctccttccagtagtctgcatcaggagatgcatatgcttctgaaattgacttaggagtgtcatccacgaggtacacagtgaaatcatcaccaaaagacttagccgtcctttgtctcttactccttcgaggagcttcactgacatcctcctcagagacaagttcatgtgtatgttcagtttgttctggtggtgtgattgaactgggaattatttcagagggttggttcgaaccactatgtgtatccttcattgggaaaaagctctcaaagaaggtagcatcacgagactccataattgtaccaacatgcatgtccggtacctcggatttaactattaaaaatctataggcaatgctatgatgagcatatcccagaaaaacacagtccacagtcttaggtccaagtttgcgcttcttcgttattggtacattgactttcgccaagcacccccatgtgcgcaaataagaaagtgatggttttctaccaatccatatctcatatggtgttttgtccttatttctgttaggaactctgtttaacacatgatttgaggtcaacaatgcctcccccccaccatgccttaggcagtcccgcggtgtccaacatggcattcaccaagtcagtcagtgtgcggttcttcctttcagcaatcccattagactcgggagaatagggaggcgtcctctcatgtatgatgccatgttcctcacagaataagtcaaactcgttcgagaaaaactctccaccacgattagacctaagcctttttatctttctgtcaagttgattttcaacttctgccttataaattttaaaatagtctagagcctcgtctttcgttttcaacaagtacacatagcaaaatctagtagcatcatcaatcaatgtcatgaaatatcgttttccacccttcgtcaacaccccattcatttcacaaagatctgaatgtaggagttctagtggtgccaagtttctctcctcggcagccttgtgaggcttgcgaggttgcttcgattgcacacaactatggcacttagaacctttgacaatggaaaacttaggaattaaacacatgctggaaagccgagacatcaagccaaaattaatatgacataaacgtgaatgccaaacattagcctcatcatccacactgccacaaatatggttcacagacttattgcagaaatcagaaagggaaaagcggaacaggcctccgcactcataacctttaccaataaaatatccatgtttagacacgactactttattagactcaaaaaccaacttaaatccgtctctagtcagacgggagccactaacaagattcctgtcgatagaagggacatgctgcacgttcttcagctgcacgatctttcccgaagtaaacttcagatctaccgtgccaacaccatgaacagaagcatgtgacccattccccattaggacggtggaaccccgtgcgacctgataagaagaaaacaatgagatgtcagcacaaacatgtacattggccccagtatcaacccaccaattagtagattgattaactgaaaaaacagtaggtaaattaccatacccgcttccatctccagtgttgccaatggtcacattagcagacttagaagtctgccctgcaggtgccttcatccccttgcgctgtggacacttcctagccagatgaccaacttggccacacacaaagcaagtcctctcatcctgattaggattgttgttgttcttcttctgcttcttgaagttggtggtctgctgagctttgtatttccccttgctcttgttctgggccttgtgcacaacattggcactggactgcccaccatcgcccttagacgcggcatctttttcccgagctttctcctcaacatcaagagacgcaatcaacccctcaacggagtattcctgtctcttgtgtttgagtgcagtaccgaaactcctccaagatggaggtagttttgcaataatgcacccggccacaaatttgtcgggtaagacacacttaaggagttcgagttccttagccatggtttgtatctcatgagcctgttcgactacagaacggttgtcagccattttgtagtcatgaaactgctccatgatatacagatcattgctagcatcagtagcaccgaatttagtattcagtgcatcccacaactccttagcgtcggtcatatgcatatacacctcgaccagacgatcgccaagaacgctaagaatgcatcccacaaagagagtagtggcttcctcgaattgcttctgctgttcagcagtaagaactccttcaggtttgccagtactcacccagaagcatttcatagctgtcaaccacagagtgaccctgatctgccatctcttaaaatgcacaccggtgaatttatccggtctcagtgcatcggcaaaaccagccatagtaaaatcacagtgcctataataaggtttttggattgttgagattatagacatataatgatttaatctattccataaataaatcatgacattacagatgaaaactagcatgaacgcatcattagatctacacatgtaaactacacagtataacatgaacagattaaatatgcgcaacatattgaacacgtaccgaggtgacggaaagaccggctgcttggtcgaaacttttcgcaagtgtctacgaaggcacgaaacacgcgagcgaa

SEQ ID NO: 8390 - DNA, 2517 bp, Oryza sativa
aaatgaaaaagtggttaactcaaagttgtagtctcagttgagctctacaattttaatataaagttttatttcatctgactttatataatataattttaaattgtaaaatcatagagctaacaagttgtgttggaaaatttgcatttagatcccttgccgccctttggccctcccagagggcggcacgcgattagatttgtaaatttttgaaatataaaaattatttttgtaaatattttaataaaaaaaatgtataaataaaaaaatttcgtgaagtgtgtacctgcactacatgggttgacaaattcgtacgagggtgtgagattgtattctagtggggaagaaagattaacatgtgaaatagattctgtttagttatctaccagcataaggacgatgtttagttatccaccagcataaggacgaccattggtagcggttcctaaacggttactgatgacttattagccgtttagggaagtccctcccttcgtcgaatacatgcaagaaatgaatggcaaagcctcttgttccaaaagaaaagatgaacatagaattggtatgtatggttgtctgagctactgacgttcttcaatccaaaagaaaagatgatgaaagaattatgcccgtctcaactagatcaacggactcctcgtcagtcctaaagagaaaattaaacaattacctatgcaatatctaaaaaattgcacttaacacttttcaactaagtgattttttccgacagcgtcttgacaagtgacaactcgtgtgaattcataaacaaaataacgcaaatactgaaatagataaagcacctatcatttgcatcgaataccattagcaattacttcatcacattatttgaagctgcagccacctctatgtaccaaaataccggacatcgcaccatacctcgacagtagatttaactcatagttaggcagcacagaaggccaacaatcacacacatcataggtaatcatcattttgtgctttcatgtgacaatgagtgtgcagcaggacggatcatttcccaggaagtttgaaaaagtactcgattttccacaactgaatgtgatataatagcatcagatgcagtggagcaagtacaaaactaacggaagcaattcaaaagaacaatcagttattctttgtttgcatcatttgaaccctcctccataggcactgcttctgctgcatctcctttcttacctgtagatgacaaaatggtagttaggtgagttgaaggttccatccaggtgaggcaacttaaatacaaaaaaaccagtaaaattgtgttacaaagaacaggacaaacctttcttcttttttgcaccacttttcttctttgtttttgtccccaaagcaagccatgccttgatctcagcgttgtcttcaatggatttagtgggctgcaactcctgaagtgaatgcgatgttaccctctgtgaaccagatggcagcagaagcacagtaaacttgatgtgtgcaacaaggtcgcctgcacaaacaaccaactattaatacaaccactagaaacgagaaatatggcatgtagcagtaatcaacagaagcggtttgtacaaataaacacaaataatctcaaaaggaggatacagatttgtactcgccccaaggcttatctcataaaaacaaggcagaacaattgccaaaattctacagtattcaacacctagagcgatgatatgtgtacctggcttctcgtgaaggacagggtacggctgcaataattcatgattcatgcattccaccaaacctaagcgtgcacgcttctcttccaatgccctgtgacaattcaaaatgcatgttacaatatagtaaacaaaaaggtgcgtctgaagtaagcgttattgtagcaacctagcagtgaagggcatgataggaaacttctggcttatctcactgaaaatgaacctagatgctttcatcttcaagtgataattcttgtctacagctctcttgtagatggtggtctgcttctcatccaataacttgggctgtgcgtcgtaattaaaaaaaaatgtaaaaaaaaaaagcaaacagaagacaatccttcaaataaaagcagctattctcaccttcccttctccagtgctggtgacaatatcaattgcatacacttcattttcctcaaattcagcatcatccaccttcgtatcagcattggacacactaagtacaactttgttaccgtcaatgacaaactgtttcagctgatggctgagaactccttccacaattttgcagtcataagcagcagcaactttctgaatcgcttcggtgacatccttgttctgcaaaagaaaaattgttactggcaagatcagcattctaatacaaaccaaaggcatgcaactgaattaattcattgcagagaagacatacaggttagctcactaccaaacagtttttgtgtgtctagcaaaacataatagcatagtaagagaaacaagcacaacatttgtgtgcacagttgacctagacactaaatgtgaa

SEQ ID NO: 8391 - DNA, 8634 bp, Oryza sativa
taaaaaaaaaaagcaaacagaagacaatccttcaaataaaagcagctattctcaccttcccttctccagtgctggtgacaatatcaattgcatacacttcattttcctcaaattcagcatcatccaccttcgtatcagcattggacacactaagtacaactttgttaccgtcaatgacaaactgtttcagctgatggctgagaactccttccacaattttgcagtcataagcagcagcaactttctgaatcgcttcggtgacatccttgttctgcaaaagaaaaattgttactggcaagatcagcattctaatacaaaccaaaggcatgcaactgaattaattcattgcagagaagacatacaggttagctcactaccaaacagtttttgtgtgtctagcaaaacataatagcatagtaagagaaacaagcacaacatttgtgtgcacagttgacctagacactaaatgtgaacagcataaattgcaaaaagagagcaagtaaataaagcaacgcttttcaatgcaccttcttcccaggtctaacaagcctcagagcaacttctgccgctgtgttggcagcagcaagaacatctgctgctttcccagtgactgctccatcatggataacatgtgtatgagccaccacggcaataaaaccatcaatatgacatcccatatcactgtcaaatgaaaatagaatcattaaggctcaaagtagactaagaacaagttgaaaaggtcagaacagcacaatacattttgaccatatcattttcctccaggactgcctcatcagtggctagcggagagaaatggcagactgtgttgttcacagatacacatgttggaaaagcaacacctctttcaatcttcctcttcacattcttgtagatgttgccagtttgcctgatatcaataaagaaaaaaaataagtaatcagtaaaacgagagagagagagagagagagagagagagagagagagagagagagcattaagacaaagttagatgcattactctcttatgtaagaatcgcccttctcacagatgtcaacaatcttggctttcggcttgcacaaagacactaccaacttaagagcatctgttcaccaataaaaatcaatttagcactacaattctagtatcaccatagaagacaacatatttggcattcaggcacaatcgcagaacaaaatgatattggcactgtgccagcataattgaatggacaaaggaaagaagggaactatcttaacacatattactcacaactcctctctacttgtgatatctgaaacttatattgagttgatactacctaactacgaacatcacatatcagacttgcaaactgggcaaaaacaaatatcttagcaaaaaacaacctttttggctcaactaaatagctaaagacggctacgctaacaaaacaaaacaaagcctgtggcaaatctaccctggataacagagcaccattttcccctcaacaaaacatagaataatcacctcatacatgtaagagcaacaatagcggagtgagggacgggagaacgtagaggaggaactagtgattctgacaacaccagacatcagaacacaaggctaaacacaaatgcacatccctgtgcaatccagtgagtggctctgtggctatgcacatgatttctcgacaggcagagactcagacataatattgcactcattgaatagaaagccagtgacaatacagaagaagagcatgctactaacctagaaagaaagcatattactcttcaacgaagctgctaaaactaacactagaatccaaaccgtgtaaatcgtctacatcacagaaattcttcccttaccaaaacatagtccataaataaaacagctaaactcccgtagctaatctttcccaagctaatctttcccaagtaagacaaggtaacgctaacaacacagagcataaacttccctagcgtgcttacggataacaaaaccaccgccattacccagcaaaaagcagacaataatgaactcgagcacgacagtaatagcaaaggtaaaatcgagaggcgtttattactgttgatgatatcggcggcgtccttgtacttggtgacgacgtcggaggaggagaggtcgagctccttctcctctctgacctcatcgtccgacgacatctgcaaaacgagagcgccaaaaaccggaaaaaaatcagagaacgcgaagggaaacgcacgagacggcccgaatcgaaggcgagaacgcgaggaggaggagacgcgcgaatcctcaccgcttcgatccgaacaggcgaccggaggctggacgtggcggtggcggtggcggtggcggcggcggcggaggaaggggaggtcgtagtagggttagggtttggagggggtttgggggggattagaattgaagcgagggggagtgaggttgtgaggcggcggcgggggtggcttctgtacttggctagggcttcgaagtgcgcgggggatcacgtgacactgacaggtgggtccatgctgagacgcttggatgacgagcggggccctcctcttgcccggcaaccgtgggtgggccacgggagaaaagctttggcgcggcccgggcgagccacgtgaacgggtattgcggaagctgccggagttcgctgtgatccgtccgatgagacgattggtagatccaacggcgtgcgttggttttaatcgtttgtgcctgaactggtgggctgcatttcggcctgttttgggtgttggcgtgatcaaaccgcggcccatcaagacgggtgcttctctgcttccgtatcaccggcccagctagtaggattgcagtgttcatactgggaataagtccattttgactccctcacaatatagctccaacctcattcatatccctaaaccacaaaaccggatatcttgacacccttaactataaaaaccggtgtaatttaactcctctaacggtttttaatagtggtttcactgacgtggtgctttgacatgatctatcctaataagacatcatgtgggacccacatgtcattctctcactcatttttttctttctcttcctctctctctccttcctcttcccgtagaaagcacggtccggcacagcccgtaaattggccgggctggcacagcctgtatgtgggccgtgcctggtcctagacaacgggcacgacgagcggcatagcacggcacagcacgactagtgggccgtgcttgggccgacacgacacgcgaacggcccgtaggcacgacgaccgatggcccatggcaacgataatggcctatcaggcctagccactagggcgcaagcacattggcgtcaaaggcttagcggcgtcccttcgtcttcgttgcacccgtgacccgtgcctccgtcgtcgcgcatgctcggtgcctcctcccgcttcgcatctcgttccaggccccggcaacaagctcggcaccgcagtttgcaggtctaggacgcatctgagcatctctggccgcccgtcacacgcgcgtatgagtctacatctctatgagatgctcagagcttctcctgcaagaatgcgatggtgtccggcgattcccttccgcattggcgcaatgaatcgaggcgtcgctaccactagtccattactgtcatggtgaggtcgactggtcgagtaccggggatggggatggctgatggccgaacggacgcagccatagcgtcgcgcggcgtcggacaccacctgcgatgtaccgctggacaaacagagagctcggactagtacttgtgattcccttgctcggttgtccttgccctgccccgctgctgtccgttcgtatcctggcatcaccgtttgccgcctcgccacgagcccacaaccgcaagacgccgtggcagggtagcgcccgccttggattgagatggagatgggacgcctggtggcagagaagcatgggcatggcgcatggccattggttgtgcgtctatgtctccatggagccagcaggcagcaagtgtgttttgtggtgtgtctatgtgcaagtgtaactagaaacaactagctcatgaaggcaatttgttctataaattcctcctcctcctcttcttcccagcaaataaaaaatgcagcacaaataaacagaacaaaagcaatatagttatttccctcccacaacaaaaatgtggggtgatactcgtcggaggtcgacctcatcgagacccccgcaaaggctcgcctgatccttcccgtaggtcggtcgatcatcgccaactatccccgggtatggacgattaagggatggatgaccgccatatggatggtctggagggacatggggatgatcctacggaatagcccattcccgaggccaacgacgacacggtcttgcccatgccgggaggcgaggccaagctatccacaccatctgcacggagagtggagtgttggcggcacttcgaaaaaatgaaggtaatggtggacgatcaacttgtaacacgtgctacttgtaaacattatgggaaaactttgtctgcatcttctagttcaggaacaggacatctcaaccgacaatatttggcgcaccttaaggataaagcaatggtgggagcaaggtagacgcaactgagcttctgacccgacggttctataagtacatggacctatgagccatgagtagctcaagatgaaaattgctcgttacatagttttggaggacctaccaattaggatgggtgaaagcaaaaatttgagaggatggtctggaatgctttttgtccaccgtacacccaagtttcaaggaaaaccaccaaaaacgatattgttgtgttatatcgttctaggttggatgagttgaaacactcgttcagtactcttcgtttttcttttgttgtgacatctgacatttgaacatccaagcaccaaagaacctcttatgttactattgtcatgcattatcttgacaataatcgcacactaaataagaaggttatagggtttaaaatgatgttgtcacatactagacaagccactgctaccatactactagatgtactgcaagaattcaatttaaaatctagggttatttctattactcttgacaatgcatcagcaaatacaacggccatgacgattttggagccaaatctacaaagtacattggaggttatgttatccattagagatgcatctaccatatcatcaacctgattgtgcaagcaggtattaggagtcgttgagaatttatagattttttagtgcaaataatttatcaattttaatgcatccgtgacaaggaatttattgtctatgcaggatttagtattattactaatttactcaaaaagattcgtcaagttgtttctatcattgagggtcaatcagtgatgaaggagagattccgggactattcttgagcaaagaataaacttgtgaggatgcttggcattgacgtgaaacataggtggaacacaacatacctcatgttgcgtcaaccgaaagggtatgaggaaataatttctgttttcatcaattcattgcactttagaaacaatgatattgataaggatggtgatggtgagattttgcttcttactgaggaagaatggaacatagcaacacgtctgcgtatattcctaaagcctttttataaagctacagtcctactatctagaatttactatcgtacttcttgtaaggtgcttgaatgtctttggaaattgtcccttgtgtttcaaaaaaaccgacatgatagagttttagcttctgttgttcaacccatggaagaaaaatttctcaaattcttcactgctattccacacctttattattttgctttgatacttgatcaccgtaaaaagttggaggttgtggagactgctttctatcaataggtgatgcaatgagtcttgattattttgaagcttatcaacatgctaaagatgagttgttcaaggttttccgtctgtaccaaactaagctaagtgttgctcgtcaggtgcctgaggaaaccccacaaaaaaagcaaagcaaatcaagtgcaatgaatatgtggaagaagatcaggggcaagaaacaagcctcctcatcaggtagtaggtcaaattggaatccagatgcagagcttaaccattacctcaacaccaatcacacaaaacatgatcgaacattggatggtgaaaatttcgatctccttgagcggtggaaagagaaagaacgaactcttcatgtgctagctcactttgcacagggcgttctattggttccggtttcctctatctcttcggagcatgcatttagcgaggttggaagaattattgaagaacagaggtcatgccttgcacctgacacagttgaggcaatattttgccttaaagactggattaaagcatattaagcaaggacacaataccggttagaggatccaaagattactgatgcagcggcagacgcattgatggaatttggcatcaccacttatggcagcggtgccaatcgaaattaataatgcaatttctgtaatagtgtaagaaagttgtactcttttccttacagggggaaccctactctagggtgtaaggtttttaatgaggcaacaactttgtatccttattataaataaatttgtttcctgcccccaatttttacgtctcaagttatttgtagtcggtttgagaacaaaaaaagtagtgcatatttttatacgagataaatcaattattacagagccggctgggcaaaaaagagtgtggccatatcgttttccatactctatccactgcacggctacagcacgaggtcatcacccacccacacacacgaggtcgcaatttcccatatgcaggtatctagcaagtagcagcaggtgaacgcctccagcgtcatcggcctctcatctggtcgctcctcgctcgtcttaatccacatgaggcagcgacgggcgacctacatggcacgggctatggcagtgtcgtgcggccagcaccagcagcatcggcgctaccacgccggtggaccacgtcgtcagatgagccaacgaggaggagcgggatgggcgtggccgtcattgccacatcgccgtgacgagacgacgaagccacacaacaccattgccacctacccgcctccatcgccatcactgctgccgacggagtgtcttctcgggcccttggcactgcaaagatgcacttcaccgtgagtgcttttttattgtgataagctgacgaagcttacttcattgtgagtgtttttttatcttgataaatccattgaattgttatgctaactttgtgctgcaaattaaataagaaatttcacctgtgcagcaatgtttgcatgaatttcctgataggaacaataccatctgatggttcacttgtgaattttaatgaaacttcgtgagttatgttctctatgtttttcattcctgtctaattcaatatatatatatatttcagcaagcagagtgggggatgtcgtgtgatagagtgcttttgtttacctctccatgatgccctatactacttcatacttgtaatatatcatactaggacttcatgcacgcttcacggtgccctaccgttcattaagaggtatatactttacgaaccattattcaataatcttacagagcaaaaaataggaggtttatagtaggaacatatagtaaatttagagcacaatgttcggttaaatataggtaatgaacgtgctagcacaaccgcatttagcttgctttaagttaacggatcgtacaatagataagataggcatgtatgttctagtttgtttttgtccacagtacatataactatgtattttcttacttagagggatgcaactatcgtcgacgcctacgaagttcgagaggaagacggcgtggtggcaccgatgatgatccgccttcaacaaccccaaacatcagagttgagctggccttgcgcccattggaatgtttttatgattggcagtcgagggtggttcttctcatattcacttagcgcctctctattgttttcacttccactgtcttcatcgcagtagtcaaacaacttctcgatgtgaatcagtactgtagatgaatatgtgttttgcttccaatcgagattagtgtttgttggttctcttcaattatgtcgatgttccagtctatcagcttagggataagatcacagtttgttgtccatgcagctagcctgaaaaacgaaagatcttctatatgatgctctacatacaatccttcaatcttgcagcaattatccagcaattctgctatgccttccttgttccacgcttctagagcaagtatcaccctttgacgcaatgggttcacagtactatggaaattcattttgaaaggctcaaattcaagcttcgttgtttgatatgtgaaggattcttgtttaagcgccttctcagatttttcttcttgtttgtctggacccatgaatataacaatgtacattctacgccagaagggaagcaaggtaaaatcatcaacctcacagttgcatacagtgttatcattgttgatattttggttgtagttggattgccagctccaaacactttgacaacaactagatcacggtatattatatctgcaagtagctgtgaaacttcctttcctttggaaaactttgatgctgttgttggccgg

SEQ ID NO: 8392 - DNA, 21929 bp, Oryza sativa
aaaaaagttgaaagttcaaagaaaaagtttggaactaaactctccatagaaactagaataaattgattgaaaaaaaaacagtaaccgaacatatatatagcctattaaaatagaaactagaatgtggtcaagttaagacatggcatattttagaaaaataaaaattctagcaatgttgtaacccattgtcataaaaatttggataagagtaaaaaaacttattacaaatacaatgaacaagtaaaatgagggaaaaaaaagaaatgccattacaaaataaaaacatagcaaaatacttagacataatggtgaggacattgggacaggatcctaatatcctatgggacaggatcctaatatcctataccttcaacgttagagacatatgggttttgaaggtaggatcctaatcactatgggcacttttggaacataggatttataaaaaattaggaatagtatagaaacgcatatgaaaaaaaaagagggtttaaaaatatggggaggtgggatgtgatgtttgtagcttcgagcattggtttattttagatttggcaaaggaaaataataaatactccctctgttcagattgaattctttttgggacagagagagtaggttgcaagagcatctccaaccgattgactattttgagctctcaaaatgctcatttggccagtcatctaaaaaattagtgagccaaatttgcctttcactccaacattctctccattctagcaatgggatacacacatcagccctatctcctttttttctcccttctttgcacaacctctcccctcacctatcaccgacgctccaagacagcatgggagagcaggcgacagttggcggttgacgagctcgatggcggcaagcggatccaggcggcagccggcgacatgggtgggaagcggcgacgtgaacgtccctcatcgattcccccgtgccgtcggtgggcgggcaggtaggcaaatctgacgaaggtgttggcggcgacggaaatcggcggcaacggtgacaacgttgctgctgctcgcactaatgagaggcggaggcgatgccgtgggctgcggctactcacgccgacaagggaggcagcgggtgggcgggcgggtggatctgacggcggcggaggtggcagtggaaattggcaactacggcagaaatcggcgatgacaacgacgttgttactactgctgctcacaccatcgagatgtagtggcgacgccaatgccaacggtggatcctcagctccatccctgtccgccgccgctgctccaaaccgatgcctttgctgtgctcggatgaggaggcggagacacaaagtggtgtggggcccgccatttggccagtgagtttgcctctccacatttggccaggcagtggggacgtttggccagtcgaatggcttagccatccggttagcaactctattggagtattcctttttgcttgacttgctaaaatttagcttggagaggcatttggagagaccgctggagatgctctaatagatgttgaaatttaaacttttttctagtaatggattctattctcttgaggacatgtcttcttgtgtaccattttcttttaaattcaatgcaaatagttatttttttaaaaaaattgacaatgtagagtgtagtaacgtctagcactccgcgaaaaaaccaagttcaaattcaatctaaacaatgataaaaaaaagacaaattcgaatataaatagtactactattcatttgctgaatttgtttttcttttcgtgtatcaatgtgtaagtttggacctataagattttgtggagcactatcaccttgtttagttccaaactttttcttcaaactttcaacttttccatcacatcaaaactttcctacacacataaccttaaaactttttcgtcacatcgttccaatttcaaccaaactttcaattttggcgtgaactaaacacacccataataatataagggattattctcttttgggaaagattaaggatgagaagaaaagactacaatacccatattaaatgtgattctggttgtggtgactgggtagttgagggttaaaataggtagaaatttaaattagaattgatggatgtgacaagcagtgaagcaaaatctcttatattatgagactagtagaagggataaaatctcttatattatgggacggaaggagtatatatatacattgtatgactattgtcagtcttttttttagatttttttcataactacttgaatgattttcagacaagtactcaagggtttaaaacaattttcctgtttttcaattggaatctatggcaaaggagaattttctccagttctccctaaacgaatagtgtgaatttctataggaatctgatcgtctatttctccaacaaaatccttcaaaccaaacgaaacgacccttaaagcggtactcctacatattattgccgggaaaaaaaaagaatgtgatgaacgaaacgaaatgataacggcgagtgctgcgcgcgcgacgaggtttcggttcagttgggaaacgccgctgccactgaatgcacgcacgcacaacgcctttgttcaaggaagggatgatacacaggagtactatccacccaaccaaacctgaaccgcccaactgaaaaaccaaacggctcaatacccacatcaaaccggctctaactaatttaatcacacgagaaaaaaaaaaccgagccttacaaaattctcaagtaattacatgagattaataagctaactaagctaataaactatatattattatttgagtaacaaaaggatggaaatggagtaattgatgaactaaccaacagcaacaagtttgttttgagttggaaatggaaaaggctttgcaatgtaaatgcaatgcaacaactacaagaagatgaatcaagattagagatctatgatcggttgatcaatcaatcctgaccgttggatgggcggccgtcgggccctttccggccgacgccgccggcgttgcccgtctgtgccgccatcgccgcggaggatgccaccagcgagtacaccacgctcacctgccgctgcacctcctcggtgatcatctgccgcatcatcgccatcagccacgggtcctgctccatcctcgccttctccctcgccacggcctcctcctccgcgcgcgccgccgacgacccgccgaccacggtggaggctgagatggcggcggcggcggcgcccggcgggctgagcgacagcgacgtaggcgggtcgggcggcggagcccggtgctccacgccggtgggcggcgccacgcacagcctcttggccgggggcggcggcggcggaagcacagggacaccagcgacgaccgccgccggcgacgactgcgcagggatcgccaccgagtcgtcgctggtgccctcgtcgtcgttgtcggcctcctcggtgagatccatggactggtacgacacggatgcagccgccgcggcggccgcggcggcggccctgcggttgcggcggagcgaggagttccagtggttcttgacggagttgtcggtgcggccgtcgaggaggcgcgcgatggtggcccacttgttgccgtacttggcgtgggcggcgacgatgagcgcgttctcgtcgggggtgaaggggcggcggtgcaccccggggctgagctggttgcaccaccgcagccggcacgacttccccgacctcccgggcacctcctcgctgatcgtcgtccagttcctcggcccgtgcctcgccaccgcccctctcagctgctcgtcctcctccgggctccacgaccccttgatcttcccccccgcgcgccgccgacgacgacgagccctccccgtgaatcagcatctcgtcgatcggcgacggccgcgcgatggggactcgcgctcgcgggaggatataaagcccgcggcgcgtgcgtcgtctgttcgcgttaggtggacggggcgggggcgggggcgcgcgagaggcgtttccggcgcgaggttttcttgggcgttttcgcggtggtttttccattcccccgcatgcgttgcgttggacgacacgggacgatcgaggtcgtggtccaccaaccgccaggcgcgcgcgcgggcggcacgcacgcacggttggatggggacgagctccaactcctcgctctctctctctctctttcctcgtcggagtccggtgttggagcatgcggttctcatccccgccgttacgggcgcacgctcgcgcatgtacggggggtgatgtgggtgtgtgtgtgtgcggggggaggggatttgctgggccttttcgggacgtgtcgttggaagtggaactggagcgcgcgcggctgcgctgctggctgttacgtcttctttctctcaaagaaacggaagtcgtggtgtgcgtgtgttgtgggatctttttatcgtgttgatctgtttaggtgtgtcgtgtgtgaggaccggcagtgatacataggtttataggtttatagtgagagtagatttcttttccttttacttatatatacatatatttttattattaaatgtgtacatgttgtaattgtaattttttaatatatatatttttttatctatgtgtccacaaaatatgtaataatagattggtcgattttggtttggctgtagtgtatgaaggtgatatattttgacttacacgaaaacccatatcttgtatttaatatacatttaatatagtaacaagtatttggtcgtgtcatataacctatgaaacttcatttctagatcccaaaagtaaaccattctagagacgggggctgaatcgtcttgtatagtaaaagggatgtaaaactttttgatggttaccgggggaaaatatgttacttgcgaaatgctggagcggtttaaccgtcatttaagtacgggcaggagcatcgtgtgtcttgccatgtttgggctggtagtgttgatggggactacaagtcaagtgatcagcacttccccggccagcgttggcacatgcagttctcgctgttacagccgcacgcatgcctatgcatgggatgatgtgggggtggaggatttgctggcctttttcaggacgagcgtgtcgctggcgtgagacgtgtcatgggagatggaactgcggagcgcggctatctgttacgtcttccttctgttaaaagggtttggcaccttgcgttgggtgtgtgatgtcgtaatgtatgtgattgttgtggggaccaatagcaaaaaaaagtgagtttataattatagatagcttgtttttaattttacatttttatattatatatcttttattgttgaatatgtacttcgtgtaattgtagttttttctgaaatatgttttgttatcggtgtgtcaacatgtatgcaatagtgaattggtccattatttagcttgttttagctcgagtctatgatggcgataggttttaacttaaatgaaacttcatttgatcttgtaaaattaaggtggtttattgtgtcatatagcttcatgaaacttcatttctaacttttcaaaagtaaactattccggagatgggttaaactgttgtgtatggtcaaaagggtgtataacttttgatggttatttggagaagatgttactacttgtgaaatactagagttatttactgttatttaagggcggacaaggacgttgtatgtatggatggacctggactttggacgggtcccgcccagcccatagtgattttagcccaaacatctaatacatgatgaaactagatgggtttaaatgagaccttcacgcctcggatggcagcctgggtggtccggggcctaggtccactcctaaggacttgtataacccgtttacatcgtcttattgtactcgctcttatgttttgattgaacgaaacctgaactttctattcgatctggtggcaagtgatttatcgtgtcgatcgtatagtttaatggaattctatttctatcttacaattaaagtaaatgagtttagatattcctttaaaacacgaatagttaaaaaaattcaactgcattatataattttgaacataggcaataacttgtatcattaacgtaaaaaagggggaaatatactgctataaatcttaagcatgactaatagttgtatttcatgctagcttactgaggttgcattgtatgaacaactacttggggcggctattgcatcattctccactaatacagaatggatttttgtggatgaggctccctccaggctccaggcggtccgtaatggcattcgcatgggccaaggaggatttggagagattataaatatgataagtcattcttaccgtggcaccttttagaggaactaccatgatagatgaggacgctacatgaattttatatgaaggcatttagaaagggcctcggttttattagtgtcaaggtcccgcttgatgctttcatgtgtggactcaataggatattcataatcgatttgtgtcacctacatgcattgttcaaactagagaaaatggatgtcaatctcgctaccacattttgtttgtaagtgtttactcttgtatgttccacataaatgtaggaaacaaatgtccgttgatttaagttgtattctataggacgaggcaaccggttggctatgtcaacccaactaattaagatttgcaagacgcaacatactatagagctgcatgtgaattgcatggaactaaaggtaagatagccaaggaaaaggaatcatatatcaaaaaaatgcacaagcgaaagaagtacgaggtagtggtatacttggaacgagcaatgcgctcacaccaagacaaaagatgtcataattttcccatacaactttaagtaagcagcaactcttctatttcattacgtggttagtgttcaatactacataattactagcaaatatcgcctctaattcatctatcttatttgcagtgaccactacattttatttctagtatatctggtggtgtttttacttggtcatagtgctcgacccatcaaactataacaagaatagctacatagagttccttactattttgactttggaagtaaataccccctgagtaccttaatgttattctgaaaattttgaagtaactcaacaagaaataattttatcggcacgatgcacataggatatacgttaaagaaggaatggcaataaaggagcaaaagccaaagctatacatcaaaacgggttggctggtacttacacatgacatgtacaagaaattttcaaatgattacttatttgtaccgagcaatgttattattatgttcgcagtgtttcaaacaacccccaagcaccctactatgtactatgtatatattatgtgtgcaagatgcttagggtcaatgagaagtacaaatcaaaccctgataatgtaagtcccgagattattctctatacagagtatttcatccgtagttcatttcctaacatgtattgttagtttttagcaaattcatcaaatcccttatgttgcaaacaagttcaacatggcaacggtttggaacattcgcattggcttgtgttacttcatctgccatgactgttgcaatgcactaggtcttttttttacaacaatgagagccaactgaatgcagaagacaaaatgaatcaccttcgagagcggggaatagaatatgtgaactgaaaatatactatttcataaacgagatcgatcatttgtaatatagttcacaaacatatgtttatatgtacaaatatataaatattttctgttttatatattgaaacatatttatttgtgcatgcaggattttaattactatgcattactatttgctaagaacgacctcttggataggtcctatgtgtagtgcaaaatattaccactataaaacagaaattttaaaaaacattttaaaatttgattaaaaattacagaaaatatttaattaggtagtgggcactattttccaaatggccaatgtattgtaggccatatgggaaaatgattatcacaggcggggctcttaacgtgactgactacgataatgtatattcgcaagtggacaccttaagagggtagcttgcgatattttgttttcgcacgtggttagaccatccgtatgtgaaaaatccgtgtatccgcagacacatagaagacatgttttgacggcatgaaaaaaagattctgtagtagtgctcggtgagcacattttccgaacggtttaaggtttactcctattttgtataaaatttttttctacccaataaaccgattaatcatataatatgacttgtatcgttttacgtgccaacgaaaatcccagcccaatagctagcgcaccatccattcggaacgaagccttaatcctcttgtcatgacaaggttcgaagaaaccacgcatgagaatgccatgagaggaatcactcgcgcgcatatttctggcgataggcatcgatcgatcgatccttttgctgtagacggacaggcacagatatatcgagatggagacgtacgccatgtatgtgacctgtgaactgtcagggttagtttagcagcatgcatggacgagatggcccaaagcatgagcttcactgtcacatctatatcggttcggtttggctcagtatgtaccgccggccggtggttcatggaaagcgcatcaaacaaaagtgtaacaaaccttctgctagctagcttggttacttggacaactggcaaactctactgcttctgcccatgcatgccatgtcacttcttgtcatgtaccggcaaggaaagtgattgtcattagtagttgttgcttaattaactggaaattggaatatgcattattcttcttttagcaaacatgcataaacctttagcgtgtgcttaatttgattgtagggataatgttggttggatggctagaaattatgaggcaatatcgattgatccctatgtttgatataattactcggaatgtaggtaggagtatacagttaattaattccgttctcgtaactaaaattagctagctaggagtagttatcttgggtaatcctacatagaaatttcatatatcgcaaacttcctgtgataaatatacgctagagattaatgatgcgttcatatctctagtccccacggttaattaggattatgcggtgatattaatattaactttaatcctctttattacctatatagtaacaaaacaaacacaccatacgttagcttttcgtagaaaagaaaattaaactaacaagatagataatacaagcaaaacagagaaacacaagagacgaaaaaaggggccgggtttcacatttttcgatcgggtcgggaccgggaataatcgtgtgcggcagcagcagcaaccggtatacgacgacgcgccgcgcgcggcagacggacgggtgcgtgcgtgcgtgcgtgggcgggcaggcgggcggtggcgcgcgcggccggtgagacatcagctggctgcgcgggggagggtggacgcgacggctgatcagccgacgggcgggcgacgacgcgcgcggcgcgcggcggttgggctcgctgtgctgcctgcctgcctgggacggacggggcaccaaaccgttggcgtttggcgttttggtcgcgtacaactcctacgtgtgttacgtcgtacgaggcgactaggcgtgcaggtgtttgcaggcgacgcgcgtggtgtcaacggctgcatcggccgttacggcaggggcagtcaattcgtcagtcagtcagtcagatcaggtggggtcggtttaattggtggtggtgatggtggagtcggagaaaagaaagaagaatttcatcgttggttacagccggatcggaactgagatccatagctgccagccttggcccacaccgactcttgttagatttcaggtcagccgctcgctgctcacaagtcagagctgcgtcggctcaaggaggacgtcctaccttacgcacggtgcgctatggctaactacctctacttttgcgaaacacagccgcactcatctcatatttgtcatataaaggtagagatacatcgtatccctatgcactgtcgcactgacgcccttgagctttaacgcctaataacgttgtcaagtgggcgaccacttcttagagcatctccaagactccaacattctattcaaaatatatagactctccaaacatccatataatcagctatccaattaatttggcaagtcgaactcattgcctcctccaataacctctccatctatattatctattctaagcctattacattgggacccatatatcagtctctacgaccccttcttctttctcctcctctttctccccctcttcctcttctaatcttcagcaatgacagcgcagacgacggcggctggccatggcacagacaacggcggcgacgactgatgtcggtgaccaaggcgacgacggcagctgcagcggatggttagcaatcggagccgcggttgtggcagatggcaacgacgacggcaaccgcagccccgcgcagaggcgatggaggctgtggaggtcgtgccctccctgaatccatgccgcgccggccaaatccggcgagcacggaggggcagaggtcgcgtgtgcccccctggatccatgctgctcaggtcgaatccaacgcggatgaaggtggcggaggctggcgatagtggatggcgacggcgtagatggcggcggctgtggctagcaacgaagacctcggcagcatcgacggatgacggatggtggatggtgatggcgacctcgacgacgaccggtgattgcgatgctcctctgtgtgggtgcgggaagagagaggggaagaagggtgtctgacggcttggggcccatggttggaaatctgatttggccagtcgtgcaggatggctaagtttggctagctagggaaccaatttgctcagctggatggctcggccatccagttggcaaagctgttggagtgcactttttcatcaaactggctaaattttatattggagagtctgttagaaatgcccttacgatatcttgtgactgaatgacataatgttttctattggactaccgttctttaagtggtgaaccatgttttacatgcatcgacaatagttagcatagtagttagtagtggagacgcatagaaggaatcttgatgacttgttcgggagttgggttatatcgaccattactatcactatgagcaactctgtgagactaaatcgatatattttgagatagacaaagtcaccgcatgcgtcttactgtccatcgttgtttgtaattaccaatttttacatgcagatgattaaaccgcctgctaatgaagatgacatcattttcatgggtggcttaagcttccacatgtgaaaatttattcttttatgtgggcggcctaagccactcttgtgtgaaaatcaatgaaaaaacacatatctacacctattattttcatataaagttggacgaagacaaagtttatatctggacaagatctataacattatacttgacaaccttttcatttgaaattatttataggctcaaatacttcttacaagatcatagatctatttttacaaaatctcatatctatgtttcaaataaccttagataaatattgtagaaggagatttggatcaaccgtaactttcattgatcaatggagcttatatttatacatgtacaacaaggcttgggagttgcctgggcctaactaatcccctgatctaagggacgtgcagcggtgcgagcggtgcgagaggagcgcggcgtcgtgcgcggggtgcgcgtcgtgcgcgtggagcgcgccgcgagagtctgacgaagccgttcgccaacacccccccgcagtcgcagccgtcgtatcaccgacgcagagactggctcggaactcgttgaacatgcttgaaggaagcccttttgtgaacacatccgcgaactgatgggcactcggtatcggtaggacgcggagttcaccgagcgcgaccttctccctgacgaagtggatgtcgagctcgatgtgtttggtccgcttgtggtgcaccggattcttggacatgtagacgctggagatgttgtcacagtaagcgatcgtcgcctgtggaacgcggcagtggagttcaccgagcagctggcgcaaccaagtgcactccgccaccgcgttcgccacacctctgtactcggcttccgcacttgacctcgagacggtcgtctgccgcttggacgaccaggagatgagggagtcgccgaggaagatgcaaaagccggacgtggaacgccgggtgtcggggcagccggcccaatctgcgtcgctgaaggcggtgagcgtcggcgacgtcgaggcgcgaaggtgtaagccaaacgcggccgttcccttgatgtagcgcaggatccgcttcagcagggtgacgtgagcttcgcgcggagcatgcatgtgcaagcacacctgctggacggcgtaggcgatgtcgggccgcgtcaaggtcaggtactggagagcgccggcaatgctgcggtaccaggaggagtcctggaagagaggcccctcgtcgcttgacagcttgggtttagcgtccgccggagtggccacggccttgcagttcgccatgcctgcacgttcgaggacatcggtggcgtacttggactggctgaggacgaacccgtcggcagtgcgctgaacttcgatgccgaggaagtacttcaggggccccatgtccttgaccttgaactccgcttgaaggcgatcgatgatgcgctgcagcaagctcgacgaggacgcggagaggatcatgtcgtcgacgtagaggaggaggtaggccgtgtcggagccacggcgcagcacgaacagggaggggtcggcgcgggactggacgaagccgaggctggttgcatgatcggcgaagcgcttgaaccaagcgcgcggggcttgacgaagaccttacagcgaacgggagaggaggcacacgtccgccgggcgagcagcatcctcaaagcctgtgggctgctggcacaggacacgttcctgaagatggccgtgcaggaacgcgtttgaaacgtccagttgatgcgccggccattgcttggaggaaatcagcgtcagcacggtgcgaatggtcgctggtttgacgacgggcgagaatgtctcgccaaagtcgacgcccgggcgctggttaaacccgcgaaccacccaacgtgccttgtacttgtcgagtgagccgtcagcatgaagcttggtcttgaagacccacttgccggtgatgatccgagcaccgggaggccggggaaccagagtccacgtcctgttcgcgagcagggcgtcaaactcagcctgcatcgccgcgcgccagttgggatcccggagcgccgcgcgaacagacgaaggtgtcggcgacagggtcgacgtggcagtcatggcgtaccgcgggttgggtttgctgtgtgtgtgcataagcaaagaaggaacgaacagtatgaaacacctcagatgccggaggaagagccggaagcaggtgctgcgcggtcatggcctgttgggcctggaacggcgggcgagggcccaacacacccgcgccgggagcccggaacgggaaaggccaggcctggacaaagcctgtccaggggttgtagccccaaggcgcaggagggcgaggctggccgtcgtgcccggcaccagcgccgccgccaggagtcgaaggagcgccgccaggtggggcgccgccgccccggccacgacgcttgccccgtcccttgggacgaggctggccggtggtgtcggaggtgccggaggaagacccggtgccggcgtagagggcctccccggcttcagccttggcgtcgtgctgcatctggagctccgccagcagcaggtaggagcgcgcggtcatgaaagtgtgtggcggattccggtcggcgatgctggcgcggagggagcggaacttggtgttgaggccgcgcaggaggttgagcacctggctgggctcagacacgggcatgttgatgtcgcggaggccgtcggcgagttgcttcagcttggcggtgtactgcgtgatggtcatgtcaccttgattgatcgagcggaactcggtctcaaggtagacagaccgttggacggcgttgtcacggaagacgccttcgatgtcgctccacacggtgaaggcagaggcgcggggcttgtagacgacgtcgaagacgttcttggcgatgaagttgtgcagccaattgaccacgcagtgatccgcacggcgccactcggcagtgcggaggtcgagagcgggcggctcctgaacatgggcctcaaggccgaacttgccgaggaccgattcgaagctgcagcgccactggctgtagttggagacgtcgagatcgaggacgaccgggacgtgggagcggatgttgacggtttgaagaacagaggtggaaggcgccggcacaggctcttcgtcagaggtggacgaggcgtcggaagcgccggagctgtgcgacatggctagcaagggagaggtagcggaagactaagatcagagggtcactgataccatgtagaaggagatttggatcaaccgtaactttcattgatcaatggagcttatatttatacatgtacaacaaggcttgggagttgcctgggcctaactaatcccctgatctaagggacgtgcagcggtgcgagtggtgcgagaggagcgcggcgtcgtgcgcggggtgcgcgtcgtgcgcgtggagcgcgccgcgagagtctgacgaagccgttcgccaacaaatatgtatcacaatcaattgtagagcttaactaaataagaagtacaattaatgacctttttatttaagaacatttggaggatcaaataagaagtacaatttttggagaggtgaaattaaaacaatggcatgttaattccaaacaacaacgagcaaacctacctgtattaaaaaaaatgttaattctaagaatttatctggacaagcacttgtctatttttagaattggactttttctacaaaagaggggagtatgtgtatctcggcccaattccagagttattttatcgttctcgttgaaaatggtagaactccttcttgtaactttatttacaagtacgcgaattacaaagatataaaaattatcaattctctaccttaatccgtctcaagataaaaagaacaaacagaactttttgataagatgtggacaggagcggtcctatagagctagggctggggcccgataattgggactacatgctcatgggccgaaatgaattttttgggaataagttcactctaggtcccttaatttgtcaccgagtctgaatttaatctataatccgcaatagcagatatgacgcgtccctcagctcccaaaacgtgcaagcactgttgcctcagccttctcatccatcaccgtcatgtctccctcgcaggcactgccgtcgtacttgttggcgctttttctgaccaacacagactcacttaaagatttgcggtgttaacggagtcgccaatcatctcgatctagaaaactctaaaccaagatggattttgaagatttaaccagctagtagagctgatcgatttgaagataaccacccgtctcgtaggcgaaacagaaggtttacaagacaaagctacaaaggggtatcgcactcatgtagtgaaggcgaaaaatttatggcacaaatcaacaaagatggactaaactaggatagtgtagaagatatgctgcaaagtaaaggtaaaaaaaacgattcgattaattttagaggttgtggttgggagtttagaatccaacttgccatagcccttataaaaaggttattcttgcctcacagggtttttcccacgtcctattatgatgagagatcatttttaggattaaaacaaacctcaggcccaaacaaggaaacccgagacccgacaaaatttggattcagagtcatcagccgatctgatcattgccattgggccaatcagatcggcggtgtgtggccggtcagaccggccttccataggaaacctgatcttctcccaaatttggcaatgtttttctatttcgtgtctagatgtcaaatttaggcgttaacacatacccctgcctttttggcgaacttgtgagccgaaaagcataggacatgtggtcttagggcaataatttttatcggccatatgaggttctaagtgtttagtaaatcaatctctttgtaatatcctaacaaatcaataatttcttacgaacgattcacacaacttggtatagatatttccaactagataattactcaccgagcaccttgcacttagacccaacaaatggcgacttcaagatgtgaggtcgtacctatcatcgttcgtgtctcctaatttccttagaagcatattaacattttgcccccgagcaaaatcggctttgttgaatgcacgatttcgaaggtaagataaacattgtgttaacccctatagaatcatgtggaagagattcatctctaatgaccgatggttcttttctcaacgaattggtttcatcactactcttggaaatcaccggtcactcaacttttccttctttgggtctcctcactcgcctaggtattttttgaggctttaattgttgtacgtttcgttcctcacgtcttcggcttttgtcttcatttaatctttggctcgaatacattgtagcctccttttttgaaagcgagataagccaaaagatatccatttcggctctagttgtgttccaggagataaatgatgattcttgattttctttttttcaaattagaagctcctgtgttgccctcaagtttcctgattgtctttggtgcatcacaaaaccagagaggggttgtcgttgggggtttagaaacgaaccagccatagcccttataaatgggttggtcttgcctcctctggaccttttccacgttctattaggcttgtccttggtgcatcacaaaactagagaggggttgtcgtcggtggtttagaatcgaaccagccatagcccttataaatgggttggtcttgcctccactggaccttttccatgtcctattaggcttagagatcaattaggactaaaaaagcctcagtcctaaacatggaagcctgagacctgacgaaattggactcagagtcgaactcaaccgatctaaccgaccatatgctgctggtcaaaccaactccaaccgccagtctgaccgtctcgatggtggcagtcagaccggccttccataagaaacccagtcctctcgcaaatttggctatgtttccctatttcgtgcctaggtgccaaattaggtgttaacaacactgtaacaaccctccctctataagcgtgtagccagcccatccgataggcgggcccactttacacataccaccccatttacactttcgttattacttcgtgtaaaaggattaacctgggagtggcatggttggagggaatagaccttgtaagttggttccacccttgttaaactagcaagttggtactaaacatgtccgtaaagccctcatgggccacacatgccaaatactaattgggccaggatgttacatccccttttggtgccatccaagaagcccaagaagcgctggagagtgtcctgccgaccacccaactttgtgctcatcaccaacacctccaacatccgtgtcaaggtgtaggagttcaccggcttcctagtctcgccctttatcactgcgcccttcgacgactacgaggcggaaagtgataaggtgcatgacaccgccaccgccaaccatggcggcttcttctcccccttgggtgctcatggacgaggaaagggagagagaggaggatgggagagaagagggaaaaaagagggaatgttgatgtgggtcccattgcaattttttttttatttttaaccaacacttacatacatgtgggttatactgtttttggtactttaagtgccacgtcaatgccatatcatgttagccgaaatcaccgttctaaccatcttgagattttatttgcactagttttaagaattgagggacgcgtcatgtctcgtattacgattcatggatgaatttcaggctcactgataaattaagagacctttccttttttcgcagtgttgagatatatgtgggccagaagggcggccggtgcctcgtaccatcggatactctaactggcaagcaatatatgcaaatattaattgccaagtggcggtgtttttatgattcactataaaaaaaccattttaataggtggctaaaatggtttctgacagatgtttagccaaccgcttctgatcggcgatcgcttgtgttgaaaacttgaaatgttaatttttcatatctgggagagcaaccgcgtatggaaatgcctttcaaacagtcagaaagatgtagaagatgaagctcgggttggatttgaatgagtgaaacgtgaggattgagcagattggcgtggcaacgcacgtcggattcacttgaccgatcgacaaccgccagcatgtcatcccccaccacgtcatatcagggattgcaattccggaacagaattatgaaatttcagttatttcgccctccccccacccaccagaaagcacgtatttccacccaaaaaaattccctttttaaaatattttttatgaatttgatcaaaatttatttaaattcattcaatttattaatttttcaaataattttggctaaaaataccaaaattcttgaaactttggtggcaaccgaaattccaattttttgctgaaaaatggaggtgtaaaccatgccctacattacatacaccactgtagtgtggaggagttgtttctacaagcgggtttggatggttagggaaaaaggtacggtcttgaaaataaaatatattactaagatttatttttgagtttttatttaatactagaaaaaaaatatccgtgcgttgcatcgggtgacagctattttaatcttgttattattatatggtttagctaagttgaaattcactgtgagaattcatttgaatatatacgtttttagaaaatcatgagctttaattaggaatttaggaatccaatcatctcaagttagtacgcgagtttttttgaaagagatttcttatacaactccttctgtatttcaaaaaacgaacgaatctaaaaactgactaaaatacggatatgtattttcaaaagcaaacaaatttaaagactgattcatacacgaatgacataccaatgaactggcaaaaacatctttaatttttataatagtagagataaagatgatttgagtaatatataaaattctgagatttatttcgttttgctattgaaaacggtttttcccctcaagaaaacggtttttctcagtactgatgattgattgaaaataggaaaacccaagcacttttgctcagatctttgcattgaagattcagaacatccaacccctagctaaccagtcacgcacttaagaaactttcattcccgagattaaattaatgtccattaagtacacaagtcaacaccactcaccatctacaaaaatcagtactccctccattccaaaatacacttatcccaaaaaccaaaagataattatttcgcctactcgtctgaattattttataacaaatacaatacgtgcaaccaattaaattagagatcttgagatgaggattaaaaaaaacaaatttagaagagatgtgctaattacttacatgcatatatacacatcttctattatatatgaaacatctatgatacttaatattcaattaattgctcattccatttcaaaatatggcgcgtaatcagtttttcaatatctcatagcaccatgtatgcaattaacgagcactcccgccctcccttaaattcggcttttaaatcaagatctctaatttaattatatgcatatgtattatatttattaggataatccgaatgagaagctcctaatatataattcttactttaagttagtggttttataatgaaaggagtctacactaatgactcgtcttgttcaacgccactgaaatctagctatacctaggtaggtaaggaaactgaagaggttgatcatctcttccatgcaagttaacggtactgttggcctggattgtggccagatgagacaagtaaattttatgcaacaattaattttattccttttgtgtactatattattgaagaaaaccaaatctttcaaggaaaacaccaaaaaaatgttcaatacgcatgtaacgggtacattcacacaatatcgcgcgcacaccaatttaggagattttgaaactcgatcaggagttcgaagattgcaaagattaccgtcatgacttttaataatgtaaaggcacaactcaaaactgatggtttatcatctcattgggaaatgcaatcagtaatttacagatatatatgatgcttgcttgattaatgagacaaaattagttatgtgtggagaaataaaataggaatcatgtatctgttgaaattcttatagaattagaattatacaagtccttcaaaatcagcagaaataaaagcaataatgtgattcttttttttactttacaaaaaattcgtcaatatttattttaaataaatttctccaacgaactagtatgtatatgagtatatgattatgctcaattgttaaggcagaacatccatttggataaaattgtaaaaacatcaggaaaaccatatgttttaagaagccataagttaaatgtttttatcatatatattagatggaggtcgggaatgtacccgagaactgcgaatggtgaaagagcaaaatagacaatatgttcgtttttttaagatacagggcacacttgttaatggaaggaaactaccccaacattttagagtaatagagaatataacttgtagggcacacatggcttcaattgtcataataaaattaacacaaactagattggagataattattttttcatgcatgagatcatatgctgctgaaatcaaatcatcaattgttctttaaaacatcaacaatttaacaataaaagacagctctttatcatgtaaatcaaattaaagatcgaaaaaaacaaagtggggggtttagtatagcttgtgttaattaaacatcgcatgtgtaaattagaacacaaagttctagcctatacataaagactacgtactgcaccaaaaagataacagtacaatattgttcaggattagaagtaacctcagattttttttttgaaacattgctactcatttatatacaaagatcaataaaaaatacatatcatattcttgtcataattaagcatgcatccattgatgttgcatgcaaatggattttcaattactaaaatcgaatcttaaatcaattgtaaaccctaaatcttcccaataccacctcattaccccaagcgaaccccaccaaacaaactacgaagaagaaagcaaaaaataataaggaaaaaagaaagatgaattagtagaatctcaaatcgaaaccctagttagctagtgaactgatcaagctaggttgcatgcagatgcattcgccatggacgcccccctcagctggaacgccaagctaagctaagctagctcgccaagaactcccatgcatgcatggaatcggtcacttgaggaagagatcgaaccaggggtccggctcgctccacagtagcgccgccgcgtagtcctcctcgtcgccgccgtggaagccccacgcggcctcctcctccgccgccgccgccgccgccgctgacgcggcgtcctctggcgccgtcgccaccacggcctgtgtttcagccgtggaagacacagcagctgcaacaagaacagcacccggcgcggcggcagcgagctgtggtaccggcgccgtggtcgtcgtggtgaccgtggacgtggaggccgtcgccgcgtagtagaacgtcgtcggcggcggcggcggttgcggctgcaggaggtggtggtggaacggttggtgatggaaggcg

SEQ ID NO: 8393 - DNA, 23712 bp, Oryza sativa
atttcttgcatgtattcgacgaagggagggacttccctaaacggctaataagtcatcagtaaccgtttaggaaccgctaccaatggtcgtccttatgctggtggataactaaacatcgtccttatgctggtagataactaaacagaatctatttcacatgttaatctttcttccccactagaatacaatctcacaccctcgtacgaatttgtcaacccatgtagtgcaggtacacacttcacgaaatttttttatttatacattttttttattaaaatatttacaaaaataatttttatatttcaaaaatttacaaatctaatcgcgtgccgccctctgggagggccaaagggcggcaagggatctaaatgcaaattttccaacacaacttgttagctctatgattttacaatttaaaattatattatataaagtcagatgaaataaaactttatattaaaattgtagagctcaaggagatctacaactttgtagttaacaactttttcatttaatatgttttagatatccaaatattcgttacaaaatataaaacatattttaaaaaatctcagatctacatttcaaacaatattgaatggagataaactttatataaaagttgtagatcttaatgagatctataactttgtagtttatcacttttccatttaaaatcatttagagtatcgaataagcattattaatttttaagcaattaaaaccgatggaaagggtttgaacacaaataaaaattttgcatttaggtcccttgccgccctctggaagggcgatttttaaaaatcgccctcccaaagggcggcaggcgattagatttataaattttcgaaacaaaaaattaattttgtaaatattttaataaaaaatgtataaataaaaaaaattccacacttcacccgaaaatgcttcgcggccgtcccaatgtctggttctttctattgggccctctactgttggtggccctttttttttcccatttccccatttcctctgttccaccacaaagctactctctctgttcagattcgttatactagaatgtgtcactatggtagaatgtgtcactatggtgtatgtcactatggtgtaggggagcaagagaggtcaccaactagcgcttggtgtgggaaatcaggcatgggagcttgtcgaagatatgctggtgtggccaaggtgctcgttgtcatggtgtgggctcgcatcagccaatagcggtacaagctatagcgatgtggcatgcctttcttctctagtgtggaagggaggagaccgatttcttgtcactgttgggtggttggctcagaaggagaagccagagatttagtcactgaagataaggaagaagctagactaagtaggtatattttttgatttttttttatggttgagctaatatatcttgatgtttcacatgtgtttgaaaaaggttttaactggaggtaaaacgatgttgcatttgtttgaaatatgtacaattttacgattttacgattcttttgatgtttgtttttgatgtttcgccgatgataggaaaatgtctcaactatgtttaggcaatgttgtattttttgctacaattttgtctagtgatgaaatatttctatataaagtgacgaaacaactgtcaatttgccgttgtgtcccactttaccacacacactaatatactacttcataaaattattttttttgttcgattatcgaacgttggaattgaacattggttgaggtacttagtgatatgggaagtgcgacatgtgattagcgcatgatcaaataagtgtattataaatatacaaattggattcatttggtttctaagaataacttctataaagtttttttttaaaaaaatacactctccatctcaaaatatagcaaacttctaagttctaaaatatgtcccaaaataacacctagcttcaaaagtgcactttttactatgtaatatacaaatcctacccttgccttgttttctatactaagccaagacatattaatgcggggtagtataattgtttttacccgcctccttaataattgtgctcaactctaaaaattacgtagtactatattttagagcgggtgaagtattgtctagcagcttgagactcacgataaacaaaccaaaagagaaggtcattccaatagccaaaacaaacgatatctgaatcttataaatacgaggagcgctccaaatttataatttgaatctgtattgaatggttctattaatattaatataaagctcaagcggaaacattagtgccatggagtggtcaaaattagccattgctttgcgtttctaaatatctgcttaccttaccatcatatacttctaagtatcgtattggtagcgatgatctagaccattatttattatgctctaaagttcagaatctacatagatttttggtaaataataaagctaagtgttaagtgttacagagtatacctccatcccacgatatttaaatggaatacagtgatatactccatctgttttatattataagaggcttttgattttttttctaaatcaaactgcttaccaagtttatcgaataatgtagcaactcttacaatgttccattaaatcgaacattgaatatattttagttttatagttttatgttatttgctattaaaaattgctacattttattacaaatttggccaaacttatataatttagacttcaagagagtcaaaataacttgtaatatgaaaaagagatagacaaatgtttactacggagtatatgatactcccttcgtcctataaaatcaactactgactatgtatctaatttatatccatacttagctagaagtttgttttctattgatagtgggagtactacctctgtctcaaaagatataatgctagcttttgaaattacattacatggaaagaaagctacttagataaatggttgggattacaatggacaagaaattagaataaagattgattgtaggaaaaacaatatttcattaccatttataaaaaaagaataaatttcacatagacccaaatattatgtctaaattgcacaaaaccacaggagtttttgacacgttacatataactccaggtattatggccataaagtttcacaaaaccacaatattaatcattttaactttgatttaccatgcttttgagttctacaaccacatctcaaattttgatataggagtacgtcaatttgatatatgagactttaggaccataatatctaatgttacatgccacgtaccaaaatccatgtgattttgtctaacttggatcataatagatagatagggttttatgaaatttattcttaaagaaattaaaaaaatgagtaagttataattattatttttattacggagggcctaacaaaaattacaaaaacaagggaaattagtacagttgttttttttagccccgggccggcgtaggtaacacgcagaccacctggcgggacccacagcagccgtggccccaccctccccgctccaaccgggccccaccccaccaccgctggcggtggcggcgcctctcccgtggctaacaaaaaccctagcgcgccgccccctcctcctccttcttaccaccaacctctccccccacgatcgccctcctccccgaaacttctggaaccgagagcagcagacgttagctcttctcctccgatggcggacaaggagcccgtcgtggaccgccccgaggacgaggaggaggcctccgccgccgccgccgccgcgggcggcgaggaggaggacacgggcgcccaggtcgcccccatcgtgcggctcgaggaggtcgccgtcaccaccggcgaggaggacgaggacgtgctcctcgacatgtgagccccccccgccgccgccgcttgctctctctcctcttctcccctctcttgtagctcgtgtgctttttttcggttcgatctggtggcgctgatccgcgcgattgtttgcaggaaggcgaagctttaccggtttgacaaggaggggaaccagtggaaggagcgggggacgggcaccgtcaagctcctcaagcacaaggagaacggcaaggtccgcctcgtcatgcgccaggccaagacgctcaagatctgcgcgaaccacctaggtttctccccaaactaatttcctcctccgaatttccccgcctctctctctctctctctctctctctctctctctcttctcttcgggggaggattggttacagatgttgcaatcgcggtgcctgtgtagtatagattcatgtggcccaataacctcgttgctaaggctttgtgtcgtcttgtgtgcagttgcttcgaccacgaagatgcaggagcatgcgggcagtgacaagtcgtgcgtctggcacgcggcggacttcgccgacggcgagcttaaggaggagatgttcgcaatccggtttggctctgtcgaaagtgagttgttcgctcccgtcgtctctgggctaatttgttctgttgtagtcgtatctactatgtagtgtggttatccttgcttggtagtattatgttggatcatgccgtttgcttttgttcatggtggcaatagtagttttcctatctgagattccgttgaacgttgatgggttgcaatttttgcttaaccaaagttgtgcttaagaacatgttgaattgggggtacttgtgaatctattggttgtttcatatgatgtttctatgaggagtgttggatagctaaccttgaaggattttcgcacgctttggatcggatgggtgggataacataggggcaccaattcccctggtcttccctgtcattacagttttcatctaatttttaccttaataattattgagatttgtcatgttcaattttaagattctgttattagaccctatgaggtaaactggagatgggacaccatgatgtctctctgtttatgttgctacttgctagtcatgtggagaacaatcttactgaaacttaaaatgtacagaataataatgaactagactggtccatgatatttaacattctgtttacctcatgttttgttttttactccctccgtttcacaatgtaagtcattctaatatttgccacattcatattgatgttaatgaatctagatatatatatccatctagattaattaacatcaacatgaatgtgggaaatgctagaataaacggaggaagtatgtggtaaagtacacttgatatgtataattcccaatgtatatttttgtgtagctatccaggtgcacactgttgtggtagaacacaggttgtttgctcttgctggccattggcttctttaggcactattgcggtagaatgatttaggtacacactgttgtggtagaaaaaataggctttctttgtgttaacacatttttagcagtcgttacagattacattctttcattccttgtctgtaaaggtgaagtagtgaactttgtaactttcatgtgtttgtgggggcatctttttcttgaatagtacaatataatttttgccattagtaatgaacgtgtttattattatgtagctacaacattatgtctagtagcatctgcatgagcagcatcctcttcatctactatgttccatttgttgcacatatttcattctgttatttgaatcttctgaaaactatctgaatttaactgactaagattcctatcatataattcctagattgcaagaaatttaaggatttggttgaagagatttcggaatcacttgcaaagacagaaggcaaagaaaccgaggaagattcgtctgccgctggccttctggagaaactcagcgtaactgaaaagaagtctgaggaagtggcgacaaaggaggaatcgaccgaagcagtcaaggagactgacaccaaatcagctgccacctcagagtaatcagcagtgtgttacctccagaacactagtgctcggtgggaagggtaagtttgtcagtgcttcccgtctatggaagttaaaagtcgttagccatgagctatgttgagaacatttgggcagagtcggaagatgtcagggtcatctttacctattgggcgttcacttgttattatttatttgtttgtgtatggtttctgcttagagtcgcaggttggcttttggatcaggtctgttcggatctcgcttttatcgagaacacgaaatgtagtccatgagtaggacgagttggaacgttttgggtccgagttacgagtatcttgacagcaagatgtttatggatgcgtgctattcatataaattacatgataccatgttcaactctaatccagttgctatgggaaagacgatatttcatttctatgtccaatttgtcatatttctataaggtcttctcgtatatactcctgttggtttgctcaccatagctgctgtccagcaactgtatatctttttgtcgtcgtaaaaatgtaaaatcctccggttgatttgcttgccatagctgttgtcctgcaactgtacaggaaaaatgttgtacgtaacagtggtttttgaagtatatttacgcgttagtgattcacgattcacgtgcacattaaaatttggatccttttggtttagtttcagaataattcatatttttctttttttatttggtaaaatattgatgttgttcagaaatatataggctggagctagataaatgtgttgatttatgttatctactccctccgtccaaaaaaaactcaatctgacccctcctaagacaacgaaagtctagattcacatttatgtagctagataataaatgtgttgatttatgttatctacttcctccgtccaaaaaaaactcaacctaaccccttctaggacagacatgttagtttgtgttagtgtcttaaggctcagatctttttcttcaactccaaacttaaacttcattgtttttcattaacacactttgaaactgtgttttttaaaaaagttttctgtatagaagttgtttaaaaaattcaaataaatctatttttaagtttataattattaatcttaattaatcatgtgctaaagagttttttttgcctgtgctaaaaatctaagagaggacgtcgccagatcacgtggtaagggcgcattctcgatggatgattaacgacggaacacagtttacgaggattagtcgaaaggacaatgtcaattaagaaagttttaaaaattacagcgatagtaagagcttaaaaaacgtactacggtgctatcgataatcgataagatgtttgccactgaggacatgataatccatagctttgaattgctaaatggaataaaaatacttacattgtatcttagaagtgagaaataacaaagtaaacaatacataagagcaaagaatagaaaactaagctttgatcttctactgcatgatgagccctgtcacaccaagaaccgcactggatcgatcttgaaacgcagccctaacatgcattcttcatccatgatccattcacggattcacctctaacttgctcttactcaactttgcccatatcatcatatagatccattcgattcaaaaccaggcccctagagtttttgcttgccaactcatctagtatcagactatcagatagaagccccccgccccaacatagtgctatatggatgagattcaggtagaaacatctcagatctagcaaaacttgagaccctagataccgtgttgcatcccaaccatcactggcattgccaaccaaccttttgttattcgccggttttgcaactcactacagccgtctagctcagcaaaattcaaccgactctaacccttaggccagatcaaactaccgttgttgctgtcggcaatgctcaagtccatcatcttcacttcttgttgcagccacctcacgtccaaagagtactttcatgtgatgttttataactaaaggcgatcatatgctacaaaaatgttatcctgaaaattttaattcgtaagtacatgagtgatgtttaaccttgtaacttctgaattttccaaatattaggtttagatttgttcagttgattgtaaagttttgcagttgttactgaaggtgcacttaaactccctagtgggttttggtgattaatgacaaggtggttaaaggggactaacatgtttatcaagtttattcacaggagtttagtcccaaagcaagttgtgatggctaagaatgcaaggagaccccccaatttgaatgttcctaagtgcgaaaaacaccgaaggtgattagactaggtttttctctttcgaaattgagtttaggaaaaaccgtactattaagaggggtttcaagtgtggttctagggtatacaaagtgctcttagtcatttccatgagtcaaaatatttttggaatcatttttgcaaaatgatttttctccccgggacagagagggctacccggaggttttggccggaacttccgggcgccattgcaaaagcaaaaatttcctaagtgctgcccggaagttcctggcacttttgcccagaacctcctagcaggtttccagttcaaatttgtgagtaacggctagatgacgtcacctagccgttatatatatggatttcgtccccaggtcaccctttggccattccacttcagctctttcatgttctagggttttctagccactcccaagcttcctttgctttctccactcaaatctagagcctatcttgtgagattgagatattagattagagtgtaggagcgttttggagatggcttgaagattaggtttgattgagcactttggatatcttgtgggctgtcacttgggcttattactcttggagatcttctcctagatggttaggtgtcgcccgtgagcttctaaagatcttgtggatgtcctgggaaagtttgtgaaggttttcctcacctccgcaaggaaatgaggtaagtgagtaaagattcttgtattgagttttcagaggttgtcctaggtagagcaacttgcacttgtggtcttttctaaaaggaattgtgagttggatcttggtggtcactcaattctagaaaatgacctagaagtgttgagttgaaggatgtggacttcttctgggatctttgcataagtgaggcaaggggttaatcgagactcggctcttttgagcacctcaacggagagtaggatccgtgtgatccgaacttcgggaaaaaatcgcctttgtctctcttgtgcatgatctgtgtttaaatctgctggtatcttgagatttacatcttgtgcaactctgtgcctgatcgtctctagctaggacctgttttacttccctgtttcgttttttttgttgcccggaagttcctgactcaagaactccggaagttccgggatactcatcctgcccggaagttccggtgttcaccaccaggaggttccgggtcctaccaatttaaccgctatgattgttgagaaaatttcaggaaagcctattcacatctctgcacattcagttaccttcatagattcatgttgccattgctatatcttgcatctgccattgttgttcaagaccttattaagcatttcattaatcatgtagaaaattaacctgataaatcaaataaaatgtattagtgatccatttatgcaatcatgatagaaaacaacaacttcaataaatatcgactaacttcattgaaacatttctttttagacaacatgtattttacaacttcatggaaatataaccattaaaatttttgtttataagacaaaaccttttatctactgagttggtcactcgggtccatcctgatatttgtcttttgtgtcctctaagagaaaatatattttcattcaaagatatttagtcactattgatattataattgtatcacgtattaactattgcgtaggctatgtcaggcggatctagcactatgacatgctatttgggagtaaataaacaaatctgaggtgaatagtaacatgacattatccatgtggaatttgttgtttttgtttctttcaaaatgaagttgagtttagacaaaagatttaaaagatttagtaaccgtatattttatatctacatctatcttcagtaattttattcgtaaaattaatgaaaattttaatatgattttcacgagtttcgtgtttttccccaactagagaggggaaacctaaatccggaccgtaccgcagctaacgctatatactctaggagtacacgctttgctctacaccgataatacacacatacaccgccgcggcggaggcgagagaaggggaaaaaaagaaactccgcccaatcagccactgccacgcgggctcaggtcccacctgtcatccgcacggacccaccgcccttaactggactggttccacccccctccggttcagagctttcagaccgaccggcgaccgaccccaccttccctccgccttccccgaagccacgcttctcgaagctcgcttctctttctctctctctctctccggctcgacctcctcctcctccgcgtcctccattaccggtagctcggaatccgccgccggcctccgacgatcgccgccccctcgccgggcccggagatccggatccccgccgcgctcggtaagccctagagcttcttccccccatcaacccccctctcccctttcggcccccaatccgattcggccgagcttgccgggccgattccggtgttcgcgcttgtgggggcggctgctggagcttcggggaagggagcttggggtctatttggcggcgccgcgtggcggtgggtgtgggggggccaccccgtccccgaggttggggggtgctgatccgcgcacggggattgggcgtgggatccggctggggaagcttggggatttgggggagggctgtgcctatgcgagaggtcgtggtgcgtgctgggttgtgccggaattggctggatctccgggtgagatccgtgaggagggggcgatggtgtgcgtggatcggccatgtcgtgctaggggtctcgtagctgcaccgtggagccgtggttctgctttgaatttaggtaattctcgatcgttctgtgggcgatgtaacagttggtggtggtggccgcttggtttgatgagtggagagcaattctgattgcttcattttgagctttggtagctttgttaggttattgttggtcgtgccatggatcatggctttgaattggttgttcccagaactttggatcaattcggactgctgtcctttttctgttgtagcacggtagtatactagtatgtgtcatttgtgggtgcatttcagttggcgatggaggtggtcgaatggtcttgtttggtgctataactagtctgaaggagatgctagtatctttgttgatcgttgctcggccatatgtgttgtcatctgtggcatgattaagcagatttggtggaaggtgacaatgaagtagatatctcactgagatgtttgccgaactttatatcctctagtaattcacgcgtagttcatcagattttggaagaatagaggttgtcgcatttcacctagcttattgcaacttgtttgagactaaatgctgttgctgcttttgctgttgtagagctggttgcatatattaatacaatgttattgcattaatgtaacacgtgcactgtagaatctggcaacttcaattgtttcctgatttatgtatatttggtttactgaatgcatttgatgtctttgcaaattatgttaattgatcaatacctgaaaacaatttttggtgtattaatagcaaaatatgaacaaaacaagttatcacgtactcgaacatttacattgaaatagagtggtggtacaattttaaaagccagatgttttgtttggtaaaagctattattttgcaacgtactctggtcatacagacaactctggattgttctgaaaaattgatttcaagttcatctgctacttactgtgccttctataatgacaggtatttgtttgatttgagattttccactgtgccttggacatttgagttctatggttgcaagatgaggctgttgacatcctctggagacatgttgaacttgttaacggtctaaaagtttgtcaccagcagggtgatggcatctagtacaaaatctgacttgatgtctggtagtcctgatgggcatggatacttcagtgggcaacgtggactgtattcagctgcttcgttggaaaggtcagcaagttttcgtgagagtggcgatagttatgcagcattcccagtatcaggttcatcaaggtcaccagcagttgactctgctactctgcttcaatcacttgccatggacttgcggacaacaactttggagccaaagacatctcggttggatgtaaaaaaatcaataagtttgattcttggaatttcccctgaagagtctacatcaactccatgcacaggacggaactcatctcttccttttgaagagattagacgcatgaagaataatcttagtgacatctcaaacaaagctaggtattattttactactctctacattgtcttgtgagattaacttaagttgtgcgatagggttgcaaacaactgcatcactacgtacttgattgagcaaccatctgtattatatatgtagaggcaacttttatttgtgatttactattctttgataatgtttattttacccttctaagggaagattattgggggaaaaaaatctcagtacatatggatggctatgtggactacatttgcttgaaactgttagaacatgttttcaattatgagtatctttgcagggaaagatctagagcttatggtgctgctgtaacaaagattgagagatgttgcccgaatattttgcggaagcgttccagaggagatggttcatcaaatgaacgatctactgcattgttgtctggaggacttatatccaagatgcccccccaaggccatctaaatgcagatgacacagaactggtatctccgagaggagaagagaggataaagaatgcaggacagaataggagattacgcacatccatgtccgaggttatgctcacatctctatgtatcattgtaggttactattgttgcgataatgtgatgttatacttctgaataagttagttctgacaattttcaggtaaaaaagtattattgaatcttacgtagtatgtattgcttgcagctaagccataggcctgttttggccttgctgtatttatctgtgcttttctttattgttgactttgttttattcatctgtttttcttgttttagcatgcagcctgtagctattagttttagcatgtttaatatgataagcatttttactgtgcacataatcatgatggtttgccatttcttaaaacttttactagtttggattgttcttaaaactgattaccacaacttattacttgtttactagatggatgcaaggaccactgttctgtcaaggggactgggctctactgatagaagtgcagatcctggcaaagtcaccggtggtggtccagcagttccagaagaaaaaattagggggctagcaactggtattgatggttgggaaaagccaaagatgaagaaaaaacgttctgctattaaggcagatgtttcaatgactggtccttcaagaaatgttgatgtagaccgggagcagaaaccagggatgcaacacaaatttaataatgaagctagggcaagaatgacaaactcccctagttttaggtcagagattctatcatccttttctgcatgttttattgttttgattctcttttgatgcagtcctttattctgtttgatcttacatcatggacaatctgaccttgcatattgcatagacatgatgattgaaaaacatattatcaagttattttttctccgaacattcaaactaagcaattcagctaataagaaaatgatttgtatataaagttttacaatctgaccaggcgtttcctttctgggtaacttttatatgggcaggtctggaactgtctcatcagtctcgagcattagtaaatcagatttactttctggacaaaatggggttgggcgatccttaagtaggagtgatcaagacagtggattccatcctactaacaaaagggatcgtcaagctgttttagataaggaaatatcagctccaaaatctcataacaagtaagatgcgttctttctccaaattcactatgttacaatcttgtctaaattcattgcttgccagttgtcacaataagcttaggtagtaatttcctgctgcatgtgaagacttaatatttgtacagtatgtgcttatttctacaagtttttttaggcccagcgaagatgatggtggtgccaatgtcactgcagtaccaaaggcaaatgggtctactaggggaccccgttcgaattctggttcattactgaagtcatcgccaaacattcataggttgcaagctaattctgatgattgggaacatccttctggcatgactaagcttaattctactagtggatctggcaatcccaaacgtacaaagtctacacattcattatcccctcccacccagtggggtgggcagaggcctcagaagatatcacgttcagcaagaaagtcaaatttagtcgctattatcacaaacactgatggtcaatcggtatcaggttcgcttgaaagtccctctatcaatgaagagtctgccggattacctaggcgtgcttctataaattgttcgcaacaaactagacggggagatcatggtctttcaactggatctgagggtgatgaatctggtgttgctgagaaaaagttaagggacaaaagcaaaagggctggggaactagatgacgggcactctggttttcaaaagatcgcaatgcttggccatccttccaaaaggaataagttatctgctgatgatgatgttggagatgctgcacgaagacaaggaaggatcggacgaggttttactccaaccaggcccagcacccctgcatcaattgacaagcttgaaaatgctccaactacaaaacaaagaagtgttaggacagtcactgagagaaatgaaaggtgatttcttcaattaccagcattccaatcaacttgtcattttttcttactgtgattattttgttcagtaaatctggaagaccactgataaagaagatgtcggagcgcaaaggcaatgcacgtcctagacatataagtagcaatgcgcagttagactctcctggtaagttcttgccgtactattatgtacatggcttccattctttgtgatcatgatgatttcatactgttaacatttcagtgcaatcggaagatgatcatgaggagctccttgctgcagcaaattctgctctaagtattggtttcacttgtgacatccttccatttatctagatatatttttctggaactatttgaataatgattggtttattacaggatctgctaattcaagtccattctggcggcaggttgaaccattctttagttatctgacaacagaagatatagcctatttaagtcagcaggtattgcagggtcatcttattttgtatcagaagatgtactaattttctctgcagtagagcggttggtagtttttgatcaatatttcatttgcttagatccatttatcggatgactccaccgcgagcaggtcaattgaaggtgatgaaagtcggaagtacaaggtactttatattacttttaagcacctttactgcaggaatatctgaagtttgtctgcttagttatgcagttgcagatagttaaactgtatagaagtagtagaatgcatggggtggttgatggcttgatgctcactttaccatggataactacttattttcttctacttctatctgcttctttctttgggttcagtttattatgctgatatttttggcttttgcagggtagtcttgaatacatctcgcaaccatcaactccggctggtagcaacaaagatgaccatagcgctcttcaaaatgggtataccctgaatgagatagataatgatgtagggattgcatgggagacaagctgcattgaacctatcctggatcaacttgtccaaggaattggggcgcgaggaggtgcatcagttggccaaagacttatgcaagctctgattgatgaagacaaggttgataatattaccaacaacatttacagaagtgaaacatatccatttgatacacatgaaattcatttcgaggaaggaggatggaaatcgcattcacagggttataagttggagtctttaatgaactttgaagctgcagggaaaggttctaatggtttgatgttagattctgattggaaatatcatgatgaactatcacataaaggcaataatgccatggagaaggccaaggtgtggcctgagtttcagtacagtgagatgtgcttcagtgataggatcatcattgagctaagtgaagttggtgtatccattgaacccgtggtatgtgttgtttcactgttcaactgtatcattctgtacaacaattttttttgttaggctggtatagaatttcgcgttgcttgagttaaactattttttttgcatttctatgcatggtttgttacagtttattattttattttaatctgttgcttttgggcaataaccaattgggtaataacttggagattatcagaagaggctgatactaattcttctatcatggattatggagtatataaatagtccaaaagatttaaaacttcaggtttcttgtcattatttaggtagtttgttgctttttatgggctctgattttcctgtgattgttaaaatgcttggagaaattggatactgacctgatatagtctacaaccatattatatttggtagcacgagtacacgatccaaataagaatatgaataggggatgacaaataaatgctagatatagttgtcttagtgtttaaatatgggtattggccatttgggtttagttctatatatagggatgacaaactattgtgcaatactggctcatgactacaagctgaaattcttaattccatatttatctatgtcctcttaagatgtacacaatttctgtcagttttgtgaattaaaatggatcatatatgttgcactacatccctaagcacatgataagaatagttttatgtcagttatctccaagaagcttcatcatgagtattttctttgaaacatttggttcttaggagtaccatataaactttgaatcttaacctgcaacatctcaatgtttcattaaatagcacatcaaagttttcataatgttttagctcttattgtgctacactgctattgtgccagcctgatcttgcccagagtgaagatgaagatatcaattccgaaatctgcaaattagaaggccaacttcataaagaggtactacttatattcactatgtgcggctggatgcatgtgcatgctccttgatctatttcactattttcaatatctgattagtacctgtcacatgctcctgtcacaagagggtgaagaaaccttagagcacatttgcagtgaaagattctataatgtgccttttggtctatctggataagtgaaataacatgaataaatttgtcaaaaagagaacactcattgtattacacaataaatttcactggtcaatgttgcattttcttgactttggaaagccaacagcatcattcttttgtgatgactgaagggagtgatgtgaaaattaatcttagtgtttttatgatgtgaaaggttgtagataagaaaaacttgctacggaagctggatggcattcttagaactaaaaaggagtcacagcacaggtatttcacatcattgttttgttgggaaactatttcttgagattcaagcccttacatctatgtggttaccctgtaaccagggaattttcacggcgtgccatggaaaggcttttgctgatagcgtatgagaaatacatggtaagtcttctgggcgagaaatacatgctgattgatgtttcttgttttatttgttgggttgggtcaatagctaaggtgcagtgtctactatgtagttttcctagttgccaacacagccttaacaatctaactctgattaagcctgctaatgttcgctatttgaggcttcatgtctatattgtgaattttctttttttttattagtaatgatttctatttatccgtcgaatgtataatgtcgagttttaaaactcctgtttctatctttcatcgtctttcgatataaattgcaaattgttcagtgtcaaatacataggtaaataatcgaatttagttgtatgagcaattatgtattactccctccgtcctagagtaagttcatttttggtccctcccatttgtcccaaaataagctcggttgtgaacaatcattgcattgtgaaagtagtgtataaatgcattgggactatataaagagagtaataattgcattaggatttgataaagtggggtgttttctagtctttttagttttgtattggtatgtgtgggatggttgaaaaatgaacttattttgggacggagggccattctaagagttattaatccgtgggacaaaaatttccgtgctgtggctccgtcacaatagtattgcattctgtattttcactgacaatttagcacatgcatataacttgtatgactcccatcctccaattcatgcctggcaagtgggaagtgcttgcatcaaatactattagacacttgtacactgcttagagttagccttatgcctagtttgaatctgcaacttggtttagcttttcggtgacacgtaaaacgaggtaatccattaccgcttgattaattgagtatcaactataacaaacttaaaaattgggtttattgatttctgaaagaaacttctatatattcctttttttatttttcaaaaagcgcaccgtttagtagtttcgaaagcgtgctaaccgaaaacgtggaagttgcagtttagagttgaagaagagaacgcagccttagggtgcatttgggaggagtttggaacttctccccgcacggaaaatgaggtggctcattagtgcatgattaattaagtactagctaaaaaaatcttgaaaaatggattaatgtgattttttaatacaacttccctatagaatttgttttgcaaaaaactgcactgtttagcagtttgggaagcgtatgcgcgaaaaaggaggaagtagaagttgggaaaggggagaaaagaacacacccttagcctgcctctaacctcatctgaaaaggtgcaactcaaattactctccaggggttatgaattgagctaccgcatgtattgacatgacctcatctaatacgtttcatatttggtagttcaactctaatctcatcttgaaatcatgaagcatgtcatatgtggtagttccactcataacctcatcttgaaaagtagaaatcataaaggtcaagggaggtgacatgacaggagccatcagccactaccatgccctccttgcatgacatgtattaggtctaaggggcattagggcatgtccatcagttgaactgagcacaatcaccagggctgtgttcgccatgaggagattgagaagaaaactccaacgtttgccccgcgcatgctttccgaactgttaatcggtgtattttttgccaaaaaaaaaaatctataggaaagttgctttaaaaaatcatatttaatcccttttcaagtttaaaataattaatactcaaataattatttgctaatgactcctctcgtcttccatgtcatcaagagcccctgccatctaaaataattcatacaacagttgggtctctaccaattaatacttattatattttattcattttaatgggcctcaatcttatcatcagcatcatggatacacctattttctcctcgaagtgggttcctccctcgtgtattgtgcctcgcatcgatgtttgcagagagacagtccctcctgtctcttccccctttctattccatgtcatcgaaattgccaagctggcagttttattggccagctattaattgctgttgttaaccagacattggggcgatggtgacatttttagaagtattctaacagttggatgttgaaaataaaatttgagacggtgcaaaaattagtagcatatgtagaagtggacactcactagtggcaacagctgaaatttcccattataatgttgttgcagttatggtgactttgcagtagctttttaacctaattggagtcccttctctgttttttttttttttttttgagatgaaacttgactccctctacgtggtaaatcatttcatattttgaatttatcacactgaccagtgctttaagttcatgtagtcttgcattgtctggcaactatgtttctgttggccaattgatatgttactctgttgatgaccttgtttgctttgtggactttaagttcactattttttgatacttattaaataattgattgttgttactgtgaaactacaggccttctgtggttcttcaagtagcaaaaatgtaaatagagctggcaaacatgctgctctaagttttgttaaacgaacaatagcacgttgccagaactatgaggagtcaggagcttgctgctttgatgagacccctttcaaggatatgtttgtatcagcaacttctcacagaagcgacccagattctgcttcacaaggtattatggtcccccagataatatttttgtgccttttgtgatctaccgagcatgcatctttctaagccatacttgtttgggaagttataaaattcgtttatatatattcttgttttgccttgtcttcgatatttacactactgatctgactctcatttcattttcagacaatattacggtaccaaaatcagtccaaagggctagtacatcagatgcctctcgagcaagcagtcaccttacggatctgtcattttcgaaggaggatccctggacaaataatgtaaaacaacgggaattgttgcttgatgaagttgtaggtagcataacaggaggaaccctgaaaacgtctggccttggtacttcccttgtgagcaacacaaaaggaaagagaagcgagagggaagggaaggggcacaaccgagatggtagcagatctgggcgcccgtcatcatccaatgcaaaaggagaaaggaagaataaaacaaaacccaaacagaagacagccaacatatctgctcctgtcagcagcgctctaactagggatccacagtcgcaggccaaaataacgccttctggcaacggcagggacaatacctctgctgctagtgctaggcatgaggaaccagcaaatgcatcgaatgacgcagaaatgccggacttgtcaaacctggagctcccaggaatggatgttgatttcggcggctggttgaatatagaagacgacgacggactccaggatctagacttgatgggcctggagatccccatggacgacatcaatgagattaatctcatgatataaccgtagcttgtttatctacgggccccccatagaaagcttcctatagtgcacaggtaacaggtgattttctcaagataaccaccaaccccagcaagtttaacacaaggccagataggctccaggtagttttggtaaagtttatagagacctcttcacattccactctcccacttcctctctgtatcagcgtgtacttatgcctccctaccttgtgccgtatgttactctgtggtgtacatatctattttggtacggtacgaggtagagtggcttaattgcttcatttatccagagaaatgtgtactcaaaaggctgtacatatatgatcatcatccctaatgctgaaataaaaccacgccagttatagctttaatttactcgtcacctgttagctgcggtttcccacaacagttggcgcacgatttcgttgctgcctgtcaggcaccctcttccccatcccaatttgaaaccacgttttgcatgcctctcaagtcttgtggggtatcccactcccacgtacaaaattgatcagtcattgtctcgtgtttgatggtagcatattcaagcgatatatctgatcatggtaccatattcaggtgatatatgtgcgagtacataggtagcatgtttttcatttctatatggttacacggaagaagaatatacacgaccatgcattgggggtgtccaatatgttatatgttaggaattgataggcaaacaaacgataaataacaatagattaatcactgaagacacaagatttaacgtggaaaaccctctcaaagtaggagagaaaaaaccacgggcgtcagccagcaaaatatctttactatatcggggtgaggttacaacgccgcacggcggcttacaagaggtgtatatatatatatatatatatatatatatatgagatgaaaccctaaaaggtattacgatccgtacagcgggggcttcgccccccacccccggacgtccccagatgcacaaccaatggcccagcttcagtctccatttcgctccggcagaagctggcctttattaagtgtaaatgaatttgaatcacaactcaacacaataggccgatggtgctagctatggcttcaaaacgagagtgaaggaggggggaggggggggggggggggtttgttgctcctccccaatggtaatattagtaattgtggttaccgagcgaggaaaacatgaaaaaaaattctaatttttgtttttttaactttgtcgatatatcggtcggtttcggttgttgtgccttggcaataagcctagtcagtagtcaccaaggtaaccacacggtttctgacggtaaattgtcacacatttaagatcaacatatgcttctcaattctagtccaatggctttgcataagatgttaggaagtatgtccatagtctaagaatcaatcgtaacgctggtcactatcaagacttcaaacaagggtaacaagctcaactgatatgattgctaagtgtggctagcagcgtttctattaatttcagaagacaggttaacgaaatattggttccgaggagacaagcgactaagcgataacggagcacacccacctaacctaacctccccttccatttcaagttgtaacggaaatggtggtgaagtgtgaaccaccactaccactaactcaaaaaagtcaaaattgacagattgaaataggcagcagcccaacctattctcatagggtgtgtttagttcacgctaaaattggaagtttggttaaaattggaacgatgtaatggaaaagttagaagtttgtgtgtgtaggaaagttttgatgtgatgaaaaagttgaaagttcaaagaaaaagtttggaactaaactctccatagaaactagaataaattgattgaaaaaaaaacagtaaccgaacatatatatagcctattaaaatagaaactagaatgtggtcaagttaagacatggcatattttagaaaaataaaaattctagcaatgttgtaacccattgtcataaaaatttggataagagtaaaaaaacttattacaaatacaatgaacaagtaaaatgagggaaaaaaaagaaatgccattacaaaataaaaacatagcaaaatacttagacataatggtgaggacattgggacaggatcctaatatcctatgggacaggatcctaatatcctataccttcaacgttagagacatatgggttttgaaggtaggatcctaatcactatgggcacttttggaacataggatttataaaaaattaggaatag

SEQ ID NO: 8394 - DNA, 44266 bp, Oryza sativa
ggatggatattatattttaatgcttctagtgtcctgcagtaaattaccacacttttgaagtgttttcgggcaaattcacatcttttcggtgtcccacagctaattacacattttttgagtgtcatgtagcaaattttgcccaaaaaatagcacaagaatttttcgcttttgatcagaagcataggccaccggtttttcttcgccccgtagcatttccgttaggtttggagttaacagcgttagattgaagtacagaaaaaattcgttggacccatttgccctttgtcttcctcgccgcattttccccgtgtcatctacccgttccgttttcaccctattagcctcgacacgagtacacgatgacatgctccggcgggtggcctcctagctcgttgagcaggcggggcgcctacgcctccctgctccaccgcctccctccccggccggcgactgctgcagcgatgatgctcgagcgccatccgccggtccatcctggcctccgccccgcggcggcgacggtgcagcttcggcgcctcccatcaggcctgagggttactccacctccgacagcgaggtggacgggctaggcaagtacttcagcgaggaggacgaggaggaggaggcggcggaggagttcgtcgaggacatcgtggcgtaggaggagtgggagggcttcacgttggagtacgaccatggctccaacgccgacgaggatgctgcggagtaggagaagaagtagcggcgctggaggtgggattctcttccttagtctgtgttgcacgctaggtgcttgcggaaatgcatgtgaggttctacgcatgctttaataaactctttagttgtcgataaatgatcttggatgcccatttgggtcaaacctgattaccgttgtcttaaacaatgtgagtcaaaacctaattctaccgcaatatcgtaggcatgtattgttggtttattggagtggtgtctcccctctaacagccgccgccgccgtcaccctttctcttcagcttaatcagcgaaaccaacgcaggactggctaggggtccagcccaaccaagcatagatagaacaagggcaatatggtctttctaactcttgactaataactaaacaattcactggaacgatgaccacgacggaagtgctacggggcgaagaaaaaccggtagcctatgcttatgatcaaaagcgaaaaattattgtgctattttttatacttattttttcctatgctatggatcaaattctctagatttaaaggttttcaaagcccaaagataacgatgtgcttgtgctgtttaaacagcagtaagtaaataggacggcccagcagcatccatccgacgacccggcccatcttattaccaaggaacaagcgtggacagtatcgaagttccaacaaaaggtactcttattatcatcagcaaaaagtttctcaaagaaaagattatcagcaacagtagaaggtaaaggtaaggcgacgctgacgctgcagatcacggatacatgatacaccagtacaacaccgattgataaagatctcatccccaaatagaatatcaaacactcagcggcatactcttagtgagtgtccgctggggtcatcacagtaggcaataggagtctcatctctccacttactaagatttcaggacttttaatttaaagtttcacaggactctacccactgttccaaaaacagcgacaggaaaccgtatgcaagcgcatcatcatcttaaggcagcgtagtgacatggtacggtatgttacttaaataaacccccccaaaagaacaagaagcgtatctcagctcctccacttcatggactcggtgcattgtggcgagagttgggcttcaaccttcaatcatctgatgccttcggggagttctcgggtgtcttgagtgtgccggacgcctttttcgccttgtgcatctccaccgcagctttgaactcctccctgatgctggtatccctgaacttcagagcaaatgtggcaagcccgctctgcgagtcgccgatgctgttcatacaggcaaacgtcacgcccttcttgtccatgtccttcagcgacatgtcctcgtaaaggcttgcgttaagaactagcctgtaattgcccttggttctcatgacgagacgagacctctcgccaccagatactgggatgttcaactttagttccccctttcctctttctttccaacccccatccaagtattcatacaatgctgagtcggctgtgaatatggccttctcattctcttcaccagtttcaactgggccctctggcatagcaaatttcttgggagcttctgccgaagtcgcaagcgcaggggaggaactcccattattcgaagcaccaatactaaaagatgggaatgatgagccatcagtctttagcccaaacaggggagcactcgagctttctttagagcctgatccaaatgaaaatgaagagcctgaaaatccagttccagccagtcctgtgaaggcattttggccactcgacaggttcttgaaagagaaaaggggtgttggtgatgacgactgccccttgttatcagcatccttctgctcctcagacgatccatcctttgtctctgattcatctccatctttcttctcatcatcacccttgctaattttgtcttcagctccagcctcatttgctccatcctcttcttcagcatctccctcttttgctgttttgtcctcgatatcagatgccttgctgttatcttccttggcctctccagctaccactgatccgccccccaagtcttttgcttcgtcagtggtctcaacaggttgagaaggtggttcaattgagtcactggacttggctttttcatctgatccgtcagatctgatccatccttttctgtctcacctacctcactagaacctgcactcttgtcagttacaggtaaagcatttttcccactgccattggctccttattaactttctcacttgaactatgctttgcattcgctgtaatgacatcagaaggttgaggctctgagacagggatagttgcttgggcgctggtatcactgggggtaaatctgattgcagagaaaggattagaaggagctgatgagggctgctggcgtcgaacctttacaattctccgtgttgccatcacttcctcactagctctcttaaatgtccccatctcttgctcagttgagtcatcatcaggctcaggattatccttgttgatttgggtacctgcaaccctcttcctagacgttggagcatgctcctcgtctgccatttcaagttcctgagattacctggaaatcaaaataaaagaccagagattagcaaaccaataatgatgtcgtaaaacttacgcaggcgttgcaattaaaacacctattagtgggtttcaaaattccagatcaaatatgcagtcttttcatgtacgtagcatgagtcaaaacatgaatgcagcatgaactctaaaagagagttaacagaaaaggctcaacatgctctctaattacacaaaactacaaaacatcatgtctgtacaggtcaatagcattatgaccatgcaaattccttacaatccatcaatctatgcacagaaaagaactaaaaaaccagcgaacttgaaacgaaaaaatggttgtgcatgtacacagcaattgaaggcagagttgaacaaaattacatgatttttctaaaatatatgtgtgaagtataatatcctagtttaaaggctccggcaacttttagctctttccttcaatcctctagggcacataaaaatagtttctgacaaggactcaattgatcaataacatgagataagagatatgtgcaaaggcctcataagcagttattaataaaattaaggttgaagttggagagaccaaagtttataaagtcatttcaattggcccatgaatactatatacatagtttttgaactaaatgttgtaaatgaccaagaatatctaccggcgtttaaaaaatatctaccgctgaacaagagcattcatgtttttcattgaaaaaagaaacatggccaaactatgtaatctagtgatgaacatctgaagcatgtacgtttatgggcagtgcagtatttacacctgggcctagggcaagtaaaaaaaaaacttctttttttctatctttgcttggcatcctaactagattcacaactgaaaaaccggttgccctaacagtaaggacccctccaatatagttgaagacagcaatggaacaacataggcatggacgcatggtattgactaactggaagctatgcttcagcaaacgtctgagaattagcagattctagtacacattataggaattccaaaattgtatacgcaacgttatactcagaagagttgttgctacagctaccaatcagctaaatcaaaacaaaagtttctacataccgacagagagaagtataaaggtataatcaatactcaggaggtaaaaaatttgcagctaaccaaacaaacatgaacaagctgaaaattcatgcattcccagagtagtgtaggtaccataagaggaccaatttcaaaaatactttactcctttaaactcctttaaaaggagttgggatgatggtgtgttccacagtagactctgtttgatattttacatttttctcaggaccaagcccagcacaggtaaaagccccaaagcctgaagtaaaccctaatttcagtttatcttgactaaaaagaaaattgtcctttgtacttcactagaattcagaaatcatcagctcatcgctacttcaatagaatttcaatccaaacgcgtgcagtaccgaactactactgaccaaacaagcccgtactcaccagaaacggcggtcgacggcggcgtagggagggaccacgggacgaggtcgaacggagaggcggacgggcggatggcggagaccggggcgtggccgctcagaggcgccggtgcgccgcccgagccgaggcggagcgccgctgcctcgccctcgacgacggcggcggcggcggcggcggcaagtagcgagtggctccgacccttcgcctccggagtacagatctggcaatttagggttgggggattgggagtggctcgttttatatggcggctgggtgctgggctttgtaggcgatttgggccttcgtcgtatccggacttcccaaaaggccggcaggtttacataggagtcggaccgggccgggcttttaagggttcagactttaaagcccaattctgataggaaaaacaaacctagctggaaaaagtacaccgagggtccctcaatttgttatcgggatacaaaattgcctccaaccgtaaaaccagatatgcgaggtccttagctacacaaaaccggtcacaataggtccatcggcggttttaattccggttttatcctacgtggctgttgagtcaacgtgggacccacatgagccccacatgtcagcgtggccacgtcagcttcctctctctttcctttcctcatctctctctctttcactcctctcttctcttttttgggcaatctggccggcggctggggcgggcttgccttgtcgacggtctcgtagtcggagaactggaggagctcgtcgacggcccagccctgtggcaggaactgcgcggcgagggcgcctgctgcatcctgcatgtcgacggcagcggtctgtgccggctgctgctgatgatgatgtggtggtgacgctcggaggacccatgggcggggcgtggtggtcggagtcatgggcgtcgctgccgccgtcgcagggcgaggcggaggcgaagccgacgcggcagaagagcgctagtgcttcctgcggcggctgctccggctaccggctagctagcaagcaaacaaatagtagtatatgtgaggctagctagcttgtcattctgtgcatgcatgagccatgcgaatatacgaatgtacatgccgtatatatactctagctagagaatcaagggctagcatttgctaattggccggtggagcaattacgtacgtacatgcatgcgccatgcatgcttatcgtattgagggtgaagtaattatcgtattttacgcgccgccggccggataaactcagtcgatcaaagtaaagattttgatttgatcaagttaaggccgcgacctcggcgacctcggcgttgctcatcttcgacggcgctgtcctcttccttaagatggtgctgagagatctgcctcacgctcatcatcgagccactcggtagaagaatgctactccctccgtttcaaaatgtttgacaccgttgactttttagtacgtgtttaaccattcgtcttatccaaaaaatttaagtaattatttattcttttcatatcatttgattcattgttaaatatactttcatgtacacatatagttttacatatttcacaaatttttttaataagacgaacggtcaaacatgtgctaaaaagtcaacggtgtcaaacattttgaaacggagggagtactaccctgccgaagcacgctcgccgagggtcgtcggaacaaggccctgaacgccgccaagattgcctgcatccatgaacgacgtcgagatacaggatgtcctcgcttcgccggtcgatggcctctcagacagtgcccctcctcctcctcatcctcatgctcgaggcggcggcgacaggggtgcgtcagcggcggtgcagtgcgggcaggtgacgcagctgatggcgccgtgcatgccatacctcgccagcacccccgggatgacgccctacggcatctgccgcaacagcctcgtgcgtgctcaaccggatggccccgacccccgccaaccgcgttgccgtccgcaactgcgtcaaggacgctgccacagagagaagagtgagagagagaaaaggcagagaagaggggaaagaaagaggaggctgacatgtggggcccacgtaggtcccacgctgactcagcagtcacgtagaacaaaaccgggatcaaaaccgccgagagacctactgtgaccggttttgtatagttaagggatctcgcatatctgattttgtggttggaggacgattttgtatcccgatgacaagttgagggaccttcagtgtactttttccaacctagctcgagagtactacggggctgttcagattgatgccatttttaaccataccattttttggcatggttgctaaaaatgtctctacgtttagtttgttgtcaaattttggtaaatacataagaaatcctaccaaaattttggtaatattgtcaacttgccaaaatttggtaagatttattttggctacaatctgaataggccatacattataggaaaacagtccatgacttcctcaaatatcagtcgaatctaattcatatccatcaaccctctcaattattaaaaccatacaaaacgtccccatcgattgttttgagggcaatctttactggtatggtgttcatgtaacaatccagtcatcaaagcaattaaaaatagatataggcccacatgtaagtaacaaggggggaaaataaaaaaccatggggcctacatgtcaatcccactcttattgtcgttctttcttctttctttcgcacatgggcgcaacaatccagcggtgcaggcccgcttatcgttgtccccctgcactgaagagtcgaggaggcgagcagcgaggatggtggaggaagacgaaaaggccaccaccgccacttgggttgtgtaccatcaaagcccactctccctacagtggtagacctcgagtcgctttgccctggctccttctccgagtgtctcggcgagcagcgaagatgcggtcgacgagctaggccacatcgacaccatttcccttgatcccatctccctccgctcccgcgcatgcaagggagaaggcacgtgctaaagtcattgtgctgcacgagaacgacatcgtcagggaagaagaagggatgcatcggcggagctagcagcggccatggagtatggcatcggggaggccaacatcatcggtaaagcttgtagaaggcagagatggaggggatacgacatagggtggcatggcagagccggcggtggcgctctctcctccttctcctcctcaccgccagctctctcctcctcaaccgctccgccttgaggccgcatcgtcgcttgtcggggcatgctagcacctagatcttggcccaccaaaaccgtctacctgtgtcccctcggcccttgctcgagctcattgccgccatcgccgtgtgcccgtgtggggaaaaggagaggacagatcggggagatattcttttaaaataattaataaatctatctaagttataatagttaatacttactcatatttttccgtggcaaaataacctgaatttgttcagccgagcctaacataccctaaactgtatgtgccaatggtttaatcataaaagacgtgatacaagtatgttgggaataacggattgcgtgtcctatgatactgtaacactacaataccttatagcaaatcaagtcaataaaaaattgctcatcaaggattgatatcaatggtcttgatgggcctattcgattggcattttctgcagctagctgcagccgtacaatataaaacgtctcagctacagcgttgccgtaataatggtagctgaacaggcccaataaaaataagtttactgctgggctagaaaagaatggttgaaggagcatttacctccactctttggattttagttcctaggccgatcagggtaagcttctaggcctcttctgttgttgcttgtttgcttctctttgctcctggtgggatcgttctagcaaccagatcggttgcaaggttgcctgctcattgtatcttcgacggtgttttttttttcaatgctaaatgattctctaccggtcaaggccatgtaaggccctgtctggaaacgtgccgatgcttgttctgttgcggcttgccatggttgctcttgccacctttgtcatcaacatagatgaagcaattgcgtaagacaaatcaagaaggtcttgattgtgttttttagattttcttttgtcctgccttgaaaaatctaggacctttatataatttattctatcccaaatgattgtctgatactggttgtcgtagtattttaaaaataaagtcagcaggtgcaaaaaaaaaattaacggttttactataaatatatcgacggatttcttacttcaaatcacacggttttttttctttgacctaccacatcaaaacataagttttcttgtctgttgaccatagtaaccgactagtgttaatgtaggctgacaaaatcttctagcaaatgcctttgtgggatgagcatatgaattccaattgctagaacttgcacttcaccagtggaacaagtgaataatttaatttagttgcatagccaaaattacacaataattacagagtaactccaatgtaattatggtgtagatacactgtactatgtactatggttgtaattatggtgtagatacactgtactatggtagtttcagtgtaattatattacagttatattgtaataagttgtgataaaaaaagtttgactatgagtctgtttataattttttttagcccgtgcgagcaccgttggttggtccagttaggttgaagcccatcaagtagttactgtagctgttattgatgtgcgtcggatcttgatctaagggttgaaaattctgtgtaatatcgactctgaaatctgtggaatgcaagctagttagtctccaaaaataatatttccttccctacccaaaaaatatagttatatctagagcttattcggattacaagatagacaaaacatattactacgatagaaatagaaaagaaatccaattgtaaaacataagaatgaaaaacaaaggaatataaaagctgagagcattcggattataggatatgaattaaaaaaaagagcttgaggtggttggatttttctcgtacttttcatgtgaaattagcattaaatgaaattttcctttggattttctacgatctgtttccacatccgaacagcaagaaaggaatttttttttaaaaaaagctctcatacacagtatcctctaaaaatcttgttggaatcctccaattcgaagaatataataatttcttcatctaagctcatctcaaccaatcacaaccatcgttgattttattttcttcagctacttattcatccaatcacaaatatcaattatttaattttatctcttacaatgttggtcacaaacattaggaattttctttaagattgaaagagacataggaaacacgtatagttatgtgctccctccgtctctaaatataagagatttttgataggatgtctattcagatttattttaatatgtcacattgcatgaaaatgatttagggagggagggaccgagggagtactccggtcaagcgatcacgccatcacggttggtcggatgaccggagtgcttgtgtagtactgtagtaggagaacaggcacaaggcatgaacacacgcatgaggacgaggccgaaaaagggtcaaaaacatcgcgttatccttccctcctctcgcctcggtggtgtgcgtcttccccacccacccccagtctccaatggccacctcccacctcctcgccgccgcctcctccaccgccgcctcctccgccaccttccgccctcccctcctcagcctccgctccccgccgccctcttctctccgcctcaaccgtactgcctccccctcagttccctctctctctctctagcttcttgttcttgcagctagccccgctgtgtgtggctgatgcgtctgagctcctccattcgcaggcaggcgccacttccaggtggtccgcgcggccgagaccgacaaagagagtaagctcgggcgtctccctgtttgttcgattgatttctatggcgttttcgggttttcctaatgtgcggtttgggttggctgcgcagcgaaggccaatgcgcccgagaaagctcccgcgggaggctccagcttcaaccagctgctcggcatcaagggcgccaagcaagagaacgtgagtctcccatcccgctcccttgcgctacgttctaatctggttgcagaatgcatatagagcactgggcactggggttttagcagcatatagagcgctgcatatatgcatgggcattgagcatgtcctacactgggttcttggtgtgtgctgtagcgggattgccgatgcgctacccagtggcgtcctcctcgaaaatttcctgtttttggatgccatacatggccctttctctacctttttgggagagcattggagcatttttcacaaatgttatatgcagctgcggcttatgatgccacgccggcgcacgccctaccttaccgcgttgttgttgtttgggtcattttagttatgtgtatactagctaggtgccttgaccaagttatggacattcatgccgttcgttcttcaatagattgatgattagtgatacgctttgctctatgcatctttcttgtttgtagtagttcgcagtttttgttaaggcaatagacgattctccagattgtgacaagtttagtactaatggctcatgttgtggaaggcttggaatgtcgatacataatcattcaaaatagaaaataggatttcaatttgaagcattccttagtttgcaagcttttcccccaaaaccatgttttaagcactctacttcacatttctagaagctgataagatatgcatctttttctctttttgcaatcaatatgttcatgtatggaaacaactaatgctatattgctaatcaattaactctttcacatggtgcatataggacatatggaagattcgccttcaacttactaagccagtgacatggcctccgcttgtatggggagtgctttgtggagcagctgcctctggtatgcctatggtacctttcgttgattttatctgtttggagagtttattcttctacttcctaataatcatttgagcacctgtagaattggtaaactactttttttactttataatcatgtgtgcctgtcactacattgcaagcattcataagacctaatcaacggtttaaaagtgtgcatcgtccctaaatgatgaatttactgaaccctagtaattttactgtgttgccaatttgcataatttacaagatctgtaggtctgcaacttattttgtgatgaagttacttcctgattatcgctgtattagagtggaatcagccaaaagattgaatatatgtgggctaggctctatgcgagataagtccagccaaaagagttctttagggtggcaatggcatactattagctcattgctgacagtacctgtacttatgaacagtgttcctcctggtgtacaaccataaatttattatttgcttatagtttattctaacctcttgtattcaggaaatttccactggacagttgaagatgttgcaaaatctattgtctgcatgataatgtctggtccatgtcttacaggatacacacaggtttgctgttaggacttggatatgttttatacttttatcgactctcttcataacttcatattatgctgcatggagaactttttgcactgctgctaacaaatatgtcagctttcaaatgttcctgactgtagacaattaacgactggtatgatcgagatatagatgcgataaatgaaccttaccgtcctattccttcaggcgctatatcagaaaatgaggtatgccaatggagctttttcctttcttttctgtgctcatatttattcacagttttgtttagtttcatcagctaatgacaaatgactactctgctgatttatgtgccatcagctatcactttaacattggggaagcacctttagcaatgggtttctgacaaaatactccctccatttttctttataagactaaccaacatcatacagaaaaatagagggggtataccaatataccataagtcgtaaaattgaaaaggttatatatatatatatcatgtaataaactaataatcttattacaagccatatatatttattgatcaactatctacacaatacctcatcgattaaagaagtggtggtgggatggcagacttactgccaccacgactactagttttttttatatatatacactagagattgcgaagtttcgatgcaatccctaatgatgttgccaggtgcaactgtctcaacaatcattgtgtcatgcaaaatgtatctcatgtatttactgacggcaacgatttcatccaggtcattactcaaatttgggcactgttgttagcagggcttggcctgggtgctctgttagatgtatgggtaagtctccagctaactgatcttgaatattagcaggttgaaaaagaaaacgctcttctttgttttcttaattttttttgctacattttgcaggcaggacatgattttcctattattttttatcttgctgttggtgggtccttgctttcttacatatattcagctccacctctgaaggtatttgatacatctgttctgaatcacacaatcccccttgtttttagtacagtacatcataattagtcaacagcttttgattgaaaaaattgaaaaaaaaacacccttgcacatttcagctcaagcagaatggatggattggaaactttgctcttggtgcgagctacattggcttgccctggtaaattaacagtgcggatcttcttccatattgagtaaaaatctatgatattatatgcaagaaattagatgtatatcctatctgtatgtattcttcgcaggtgggctggccaggcattatttggaacccttactcctgatattgttgtcctgacttctttgtatagcatagctggggtatatcttcatacgattacttttcttgtaacagtgtatgcttttcatgatcattgaccgtctttcgtgattttctagctagggattgctattgtaaatgactttaagagtgttgagggagatagagctctggggcttcaggttcttcttctgtctgtagtgtagagttatcacagcccttttctgtagttccaaagaaaagcaatcatccatatcacttaccttttttcagtcactcccggttgcttttggtatggaaactgcaaagtggatatgtgtaggagcgattgacataactcaattatccgttgcaggtaaagacatgcattttcattatgttgcttttgtttcaaacattatcttcaaggctgtatcttggtttcattgattatgtggtccatgttgtcaacttgtcatgctgctatttagcatgccataatgttatgaatttattttattataaggggagggctaaacattaaaggagctaccatgtttgctcagaggcctaaaaattaccatgttattcagagaaaaagagaaatatttgcacggttcgatcatggtgggtctatactctatactgtaacaataaagattgattgctatagatggatgcaaattataattgtatttatagaactagatgcagagttttaagtaagacaatgtaggtctgcacaaccatgcggaaatttgatctggttactatttaaaaatattgtcgtttaaatttccagtgtaatgacgaaagttttaaagaaactataaaagggcagttgctgtgaaacaagaaatgtttcctaaatgttcagaattagctttagaaatgtttcccgtcatcccatgtcagcaaactgtccagcagataaatgttgctatgtcatctttgtgaatttccgtagcaaactgattattctgaggattgctatgttttcgagtggcgaccctagtactttcgaagcaccataaaatattgcattattctgacaaaatgaattccatttttcaggctaccttttcagttccggcaagccttattatgccctggcactgctaggactcacaattcctcaggtggtctttcaggtgagctggtcgttccaattagttctcccaaatggtttcctttatttctctggtctgatcccactcagtacaaaacatttcaaactgctgtgaatattaacatttctccctgtaatgctagtgagtgaaccttttaggttagccatctgcagttcagacaatatcacaatagtatggaattagtgccaccaaactatgtatggcaaaaacatttcttcttacagtccttatgacttaaaaaacaaacaacactgcaaactaaactctggctgccaggaaattcagtcgctctctgctttctactcactctatttcatattataaggcgctctaacttttcctaagcttatagaaaaatatagcaatatttcaacacaaaataaacgtattatcaaaatttatttaatattagatttagtgaaactaatttagtgttatagatatttgtatattttcctatatacttagtcaaacattaaaaaaattaacttagaaaaaattcataacttaggaaaaagtcaaagtatggttgtaatatgaaatggagggagtagcttctaatcctcctcattttccttggagcagttccaatacttcctcaaggaccctgtgaagtatgacgtcaaataccaggtgcgcttctgttagcttcttcaattcattcatctcttccttccccattctgaaactgccaagcagtagaaactggagacaaccaacgcacagtcatctgatcagtgcaatcttacatttgccaaatgcaggcaagcgcgcaaccgttcttcgtcttgggccttctggtgaccgcccttgcaaccagccactgatgaaagcagcaatcgccctggactgtgattctgtgacagcgaagttttgggtggaagatgcagattgatggttctctgcaactgttggtggagctaggttcagcagctatgttcgcgagtgtattagcgctcttttggcggtgctgggtagtagaatgtagaatcgtttcttgttgattccctgaactgatccagatcaaacatcttctaaaggttctgcgatgcaatgctagctgcagacgggagatggtacagggggtcgttttgctactttgccgccgatgttgtagggtgtgtagacagactgtagatgaataatgtcagtaacacctgtggggggttcagtgctagtgggctgcaaaacttgagcactgcttcgatcaaattgtgtctttgattatgaaattatggaatccagcacaggcaggtaataatttcgtaatagagcataaacaatttgtgaccttaggtgcgaagaacataaagctgaccaaggtgaagtaatattgatgcattgtgcgctgcatttaatttggttgttgaattcagagtacgtatttaaataggtgtccggaggggaaaatgtacacaaatgtttactccgtttgctgtgcatctcgcagtgatacaaaaaaatacaaatcaaaccacgctaaaaaatttagtcagttgctcgtcttcagaattcagtcctcaaatatttttaatgtttcctccatggctgctcgtccgttcattttgcactcgttttgctctctgtgaactggagagccccagaggttctctttttgcatgtaatctgagtttctgatcaaccattcagcctggctaagaaaaccatatggtggtggcgttcttctaacttgtgtctgcgcggctgttggcttcatccaattcatcgatcgccagttactacttacttactaacagcgtccgggaacaggagttgagccaaagaggcaggtttatcttccattaagcttaagagaactcggagatatctcgaagttcttggcacggcacgtcctgttttcactttcaaacttgagcattcagtttagacgaggtacttgattttttttttgtgtgcacgccccagcaggtgttttaagaaaaaaattaggcaacttaaaattgttgtcccttctcctgtgttttgcgctaataattccatcctgcacatggcatctctgaggaatcaaagatcaactagcaacagcaacaattagccgcgatagatcagacatagacactggcactttcggatgaacaacagctagctagattaactgaaagcaagcacggttacaaaggacacacccagcagaggcatcagttggaaacaagaagctagcagctgctggccatgaaaagccaaagcatcacctagctagcattcagcccctgcctgaccgatcctgcaataaactaaaacacataccctagctactgaccatgatcgatcagcacctaaaccaaactaccaaagctagctaaagctaagcacgcatcaccatatgaaacataacatagcaaatcatacgggcgcctaaatgcgtgcatccgtcaagacctacattattattgataagagagctagctagctaagactgactcgatgactacaactgagacgactacgacacactggcattcacggatgcaaaagtgtgtgtagtctaggacttggtcttgtacttggactcgtcgatgtcgatgccctcgcgggcggcgcgctcgccgccggactcgtcgccggtgctgaggccgcccttgcgccccatctcgcggtacccttcctcccccatctgctccttcctcgtctgccccccgcggctgcgccctgatcgatcgatgcacacgtacgcatattagttacgtacttcaaccgaaataccgaatgaaatggcaagtttgatctatcaaaagtttcagtattattttgcataccctcggcgaggttctcctgggcctcgaggctcttgccgccggtgccgccggggacgacggtctggccctccctggccatgcggtccagctccgacctgccctgctgctgctgcccggacgccattgccaaacactagttagctagcctgacgtacgctgcgaactgatcgatgaacaaatcggaagggtggcttgtgtttgtgtgtgtatgtcttctgcggcttgagctgatggggatggacgacgcggccgcgctgtccttcttataggcggcgacggacggggcggtgctccgcggcgggatcagggcgccggcaacgtacgtgtcgcgcggcgacgcggacggctcggtgcgcgcgcgcgcctccgcgacacgcgtcgtggcgaggccgccggagcgcgacacgtacgtgcgcaagctatgcctccgcccgtgcgcggcgcgctctggttcgctgcatgcgcgtgcgcgcgcgtgcctatgcatacgcatatactactccgtatgtccgtgctagcgcgactgcgcgagcgcgagcgagcgagcggcggggtggctgcactgtcgacacgtcgatcgggatgtcgatcaccgtgcatgcatgtggacatgtggtaggctcgcacgcaccacctggtcggggggaagcccatgcgtagaccgatcgtggaccggcgaccagatgtttccggctcgctctctcagctactgtgtgcaactgcatgtgtattgacgcagtactactctcatgccctttctcagatggttttcatgtatgggtaaaattgcttggaccgacaactcggtgacactgtagagtgacaattaatatgaacgttgcatacgtctgtcgtctctttatggataactaaatatttttatgcatgaaggattattcatttatcatttatggcttctttaattgatttgtttcgtgcttcagattagtggtggcgttaggatttcttctagcctagagctcaaattgaagattaaaattgcccatgaccacacatagaccaagtacagtaaaaatgtcaaaaaaaaagcaaaaatgagggctaaaattaccatgacaattcatacacggaacggaagtacagtaaaaattaaaaagaactgaattaacatttcattggaatacccccatgatcttcactctccatcaacagcactacagtatggagagaggctgaacttgaatctgaaaaatgatattactgcaaattatgagaacttaactatttacaaggaatatatgacatacctcgatgatcttcatttctcaaagcacgattatgataatgttctgtaatatcttcgacactagcaaaattatctcgctcttcaaacaacaaaaacatctcatgttttgcttagaaaggaagcaattaaaacagaaaattgcatccttagcaaccaattgtgctttttaaaacataacttccgaaagctcccattcacccctatatttgttctgctcctctttatctaggaaatcaaaccaaatttctcactaactgcttgtctacaaccaaatacaaaatgagaatgtacatcaaagattagagactagactaacctggatttgggggatcaaaacgagaatgcagatccaagttgttgccgctatcgatgcgcgccccagccgatgttgcgagatgagaggagcagtgaacatgcaccgatgcatgatgcaacgttggagtcatgagtgcagcgtgaggagtgaggacggtagactggtggagattatagtttagggttgtctattgggaagtgaggagtgaggacactgaattagggttggtcacttgggttgtctattgggctgtgatccgtctattaggctaggaacctggccacttgaggttgggaaaggatgtgcgtggggctgggctagaggagtagggttgggccaagcgatgttgagaaagtctgaaaatatgataatttcttccacgagtagggctcgggcccaagctgctaaagccacggttctacccctgcttcagatgtgttatgctattatcaccgaggagcacatgcggaagcctttgtaaaatgtgccgatgcttttaccgtgttctctattgtacaaccataaaaacaatatgagttgttggtttataagacatattactactttactagctatgtgatccgggataattttcacatttggattttccccttccattacttaggtcccttggtcgaagggcgcctccttccaccacatcccgctttcgccgtcgcaaaatccctcctatcaccggcgctctactctgatggcctgcaaacggttttcaccactacatgctgctgccattctttcaacatcgcctcctccaattgttactgtctgaatcattggatatattgaccgtattactgtaatctttgtgcgctagagctccgcaagtgtccgatttcaagcggcgacacccacttaggtggacgcgcggaggatgactttagtccccatgcttcagtgttgttccctgtcgcctccttagttcatccccaatactagtcccgaaagacgtctaatgtgaaggaactggagggcggcatcgactccgtatgcaagacttgcacgaaccatcatcgcccacattgtttcttccagcagtctctagtaccgttcatcctcgttgtccttgcgagagctgtccctagccgtccctagtcccgtgcaggttgtgtgactctacagggccctaaatcatatattaagtaccctacatatataatgccatattggttttcgtttcttttttttttcaagttcagttgagtttttttattcacaattggcctaatctctctccagttctccttgtttcctaatccgtgggttctcctacctagctcactagttgcttcccctagggtcacttcgcattgctccattagtattgcaacacgggaggaatgcaatgacagcagcaacactgagcgctcgtggttgctgtcagcctgtcactgctcttagttttcttggagcctataggctgctggcgacgcatatacaatcaaaagcaagttgctgctgtagcggccatagaggcaggtgggtgattggcagttgcagcgacaaagcttcagtattctggtatatactccaagtccaacccttatattccgcttttccttttcattttttttgtatgtacggatcagctgatttagtgttttattgttaacttacaagccaacttaagtttaaagttttgcatggggccacggaattttcggggatggtcctggtccccttgacaccgtttgtccccgtcatcatcaccgcaggtcatcgccgttgttgatccctgcttcgatgatgctctattgcattgccactgactttacgcggggtgcagctgctagcactttcctctggcatgccaaaggccatgtctcgccggctgtgttctattctaacatggagagatgtgctcaaggatggatctagatctagggcagctagggctcaagccataggtctttaaaagttctagactccatataaatttctaaaatctgtatgaatttgtaggaaattatgacaaagtaatggaaatgagtcctagggggtggctcctggctggctctgtaactgattgttctccactgtccctgaagttcatgttaaaattgtgcctttatattccaccggctctacatgtgaaaagtagtagtggtagtatagatgcgcatatcattttgttaatcatagatcacttatgcttgtatggaaagtttgataatggactaatagaaatttagcatgtccaggtcatgttctgttatacaaaagtacgtaaatgtaaatcactcttactactagaatcaatatcgagccttcaattgtttctctatctatttgagtgtcatgattattcttagttagttaattttctcactctccccaaaatgtgacgaattagaaactgggagtgtaacaatcaaactagaaaaaaaaaagtagttgcaagcgggccaaaaccgttttcccaggcagacgagccttccgcctacgagcaaatgcctctggtaaattggtagtagagccaatactgacaaatgcttgtgcctataagggcagacctaaattaccagagggggctcccaagaactcggttaagaattttttttagctataattagtttagtttcaccatatgtgcacccctcaattcaaactcaagcacccatatcagcttatacttgatcaaaaacaaagtaaagcaagcgagtggtacccctctccattttattctagctccaccctgccttgtggtgtgggtaaaactatatggtgatttggtacgttttaacctaatagcttggggtagaaacaattgttgtatttttttagactagaaacaggcctatatgttgtaacgggtcatacatacataaaattagggatgggctagaagggtgattgaggttaaagcaatgggttcggtagttatgcatgcgaggagtgtaaggagtaaggacgctctgactacggtgggaggaggagatgtaaggagaatggttccacttttacagtctcaaatttcaattagcggaagtgcaatagtttggacaaccagttgtacaaactgctccatgcctagagcctaccgagaaagttattacgtaaacatgtgagtttatagcattagtgttagactgttagtgacattagtgctagtgagaactaatggttttgtttagttcaaacatggccttttttttgtgttatttctgatttactttgtaatatctttgggtgtagtccgacaacatgaattctagttacattggcctaaaggtttgggaggagtataaaatcgaaagtaccttgatgccacctataggggggtgaataggcgttcctaaaaattatcacaacttcatagcatattagaatgatgagagctttcggttcaaatcgaaacttcgggtatgggattggaagttccgatctcaaccgaaaagttcggtggataacggaataaaacattagctatgaacttgtagctcgaacaaacaaaatgtatatgaatcaaaaggtgacaaataaggtatctatgcaatatataaggtcactaactatattaattaagcatgcaagtagatcgagtaaaaacaagctcaagcacaatatgggagatgacaagaacgagcaaaccaagagagaagacatgttgatttgtttcccgaagtttggatccatggatcctacgtctccgttgaggggccacaaggccgggtctatttcaacgctttcctcacgaggttgcacaaatgcactcattggtttcactgttgatttcttcccttgcggaggcgaaatcgaagccttcacaaactttccgtggcacacgacaaccttggatgctcaccggcgacgcctagccgtctaggagatcttagtccccaagagtaacaaacaccatcgaagatttgcttgctatgaactcgagtgctcaaagtatagagtgaatctcactagctctcaactcctcactctctcaatccaactctcttcccttctcaaatcccactcacaaagaggcactacaaaggatggaatgaagctcactagctctcaacttctcaatctctcaatacaactctctccccttctcaaatccctctcacaaagaggcatcacaaaggtagggaaatgaggatgcctatttggctttggatgcgtctaatgttgcccaagaacagcagcccctcaaaggagggctggaggagtttatatactcgagcctctcaaaaactagccgttggaggccaagactgcgatttttggaaattccgaaatgaattttcggataagtctgaaaatttacagaagcgaatctcagtttcgcagccatttttagaatttccaaaaattttcggagttttccgataatttttcggaatttccaaaaagcacagagtaaaacgactataacttttcgctcgggagtcccttttttttgatgatgttgaactctatggaaagctcactcagaggactaccaactcaaccaaaaataaggtctaaaaccactcaaaggataagttaaagcttgggtttctctcaaggtagcactatgatacacaaacatctcgacgttgcatccctcctaatagtacggcgttcctaaactcaaatgtaaataggaagagaattataccaataggaatgccttctttccatctttctttcattgtctaaagggacatcaatgccgaaaaaccgtttcaccatatattcttcaaatgattgatgcggttacttgtagcttcaaatggcctcacacggtctatcatgacaaagctgtcactcgtccttcaccaccggatttggttcttcggcgccaagcaccttgattgcccttcaccgccgcatggtccatcgtgaccgagcttcgcttgcccttcaccgtcttgccatagtagccacttcgtatcccacatcttcaatatcttcactttgtcattcttggtatcgttaggtgtaattatatcacttgagcatcaacacctttgcaatccttgggacctatttctttcattcaacccaataaaattattagtcccaatgatccagttgtcaacctccacaagttgaccaaccgatcgcatgtataaaagaatatgaataaatgatgagtattaatcaataccacaagtgccatatactcaaacatacactcaaatgtaaagatcccaattaaatgaaagtgaataacttggatcaattacatgcataactaaagtataggatttgctccccctaactgtatgaaaaaaaatgtttgtgtgaagcaagagtatgcataaaagaatgaaacattaggagcttaccctatacaaggatagatggcatttatcaaatataaacattaaaataaatgtataccttcatcatctttaggttctcaatgtaaagagataaacaagagaaaagactcaaacaaaacattagtctcacatgtatattgttattcacatggaaatattatatatgaacatatcaatatgtacatggagagaaacagtgatacatatagcttgatctccatgcatttcatccttgtgatttaggtctatcatcaatgaatgtttctatctcaactcataagaagtccggtaatcacctctcacacactccactttcatgtccacatgagactaggcaaagaaatgcttataaaaatattagtttcacataattggatttatcattaatcaccaaaaccaaattaatggcacttgaactttcaaaaatgatgggtaatgtggtttttataagcgaggacaaagactactaattctatattgagtatgctaagggtaagggttttattgtgagcccaaaagcaggtgtgcacgcagaaatgctaggtaagatacattgttctctcaacccttaatatccatcgttatagaccagaagtagatcggattaagtagagcaagacctttaaaaactaggtgaagtggaaggattgtatggtcatatggagtcagtttgtatgctcaacttaaggctatatggatttgaaacactttgaaaagacaaaccagaaaagagatccgcaggccctcactcgttgtggttgcaaagctaagcttgacatagagctcaatgaggagagaggagtgtgttgtgttaaggagtttaaaaaccaacatacacgtgaacttgcaaatctctattaagtgacaggtttaataccagagatatgctggatagaagacattgtgcgaaggatgatgatgatctaacatgtcttgtgtaatggtgggcacagggaaactagacttcatcttttctttacttgcccttttagtgtcagatgttggcaacacctgagaattgtttggaacctggaaatttgggagatagtaatatgcaaaagcaattgctctattcgtctcatttttcatcgaagattcttgcatcaatgttgattccattaatttgcaaagctttcctacttgatgattctacaatttgtccccgatagaaataaacatatctaaaatctatggctaaacgaatttgcagtgatttgatctgaagtagactagatttgagacaaaggtaggacgacagacatggcacaagtggaatagcaccttgttggcaaagagcagcgacgctcaaaggcgtgctagctgaagatggatgtgatcgacagacacacgatgacttgcacgtagcccagccaatgcatgtgtggaacagttgagctaactagagttttcagtaaatgaaataaacctggtaaaataatacctagtttaaaactagtaaaatacaacagttaacttactcagtggagattatgggtaccccatacccacacggcatggttatccgaccggtgtagggggtaacttatatctatgaaatatgtaacggatcatgacttgggtattacgtttccttgtatattacggaacggtctaaagtcctggtttggtaatattgtaaaatagatttaggaaaccaataccgtattggttaaggtttctatcttgtaatccttcccaccatcctatataaggtgggtaggaggccttctagggggcatgacataactagatcgtcagatctataatacacccggcggattcaaatccccaaacaggattagggtattacctctcatcgagagggcctgaacctgtctaaatccctgtcttcgcatccatccacttttaggtctcgtgcgctacccccttttattattgccgaaatcatgtttcgatagttagcgcgccaggtaggggtgcgtcgagtttcctatcaagaagtgcggtggaaccaatctccgacgtcgccggattcatattcaccccaagcctctcactttgggagtttcgatttcttcgtccaccagtttggaattttccgcttcttcaattcagatgcaaatcagtcgggaaggctcaagacctctttcatctcgtttgatcgccgtcatgtttactggttttattgaagaaagttgacatgttgtgttcatcatctggttcaatctgcttggcgataccatgcaacggatcaattctcaactgccagcgttttttatagacgatgtcaaatttcctagcgatactcaattaccaatccaaatcggaatcagcctgcacttggagccaaccgatcagagcagtcgtcgccgagttatttccctgatcagcaatactcgaagacaatggctatcatgagtctccacgaccaatcatgcaagtgtatgtttccatctgaatctgatacatgtgcaaacgagcgtgcatggcaatttggtcaatcaaccaggagctgtcatgtcatcaacaatttcgaccagggggcctccacttcatcagcaccgtggacgtcgccgccagtcgccttattcaacaacaatcacacatgcataactctccgagcgctggtcacggccactggacctttgcaatttttgtttgccacgatgatctgcacctaccacggcctcgacgcgcacacacaggcggagattttgccctcttgggtagtttcatctcttctgtccagatcaattgcgccaaacccgacgccatgcaattttttgaggaacaatgcaatacatcaagccatgtatagtatgttcatctatatattcggcacggctgcctattcatgttggctgtcatccaggacacctcgctgggatctgccttcaccgatggccgtggttgctttcgctaccgccgcctagtgtcttcgtatccacagttggatggtcacaccaccattgctgggcatctacgtcttcaccgaccggctggcgttcgccgtcgcagactggtgtttccgcctgcacggttggcctattatgccgccgttgttgggcatctacgacttcaccaccggcatgcctccgtcgccgccaactggtgtcctcacctatacagttagttggtcacaccaccgttcatggacgtccacgtcttcaccgactggctggccttcgccaccgctgactggtgtttccgcctgcatggctggtatattatgccgccgttgttgggcgtctacgacttcaccgtcagcctgcttccgtcgccgccgactggtgctcacgcctatacggttggttggtcacaccgccgttgatgagcatctactttttcaccatcgacttgcctttgtcaccgctgactggtgtctcgcctatacggttggttggtcacaccaccgtcgatgggcttcatcatctacaccaccagcttggttccactggtgccgactggtgttttcgtcagcaaggggactaccaaaagctaagtcatcattaattttcttttttatatgatatttttccttttcctctgcctcattgcatcaactagttctccgttgactagtgagtcgggggctacagatgttatatcatatttttttcaataattttcataatatttatcttgattgcttgcgatataatctgagtacaaaagttctatcttcctatgctttccgtttggtttgtcgatggatagttgcctttgggccgattcctagcaccgggggctcgttggatggaccgagtaacgcaaggtgctaagtattattcggaataaatcaaaagtatagagataagataaatttttttctgctcttaacaattgcgaaagtacctgagtagtaaattttgattcgtgaaactttgttccattaatgacgaacgcatgtcactcctatgcatgtttaggaagtgcctaggccgactcccggtgcttgggggctatgactagtcgggcagagtgtttaaacgtaaggagtcatctgcttggggaaatcaaaattaacaagaggagaaatacatatttataaacattttgaaatcttgaattttcctcaagtactatatttacatcagatactactcattctatacgtttgttctgcaggatccagatccagatatgcataatagggattcatggctttaagcttatctcctatgcttcaggaatagatcaatcagaacatcaccattggcttgttgtcgccgccgccgactggtgtccttgcctacacggttggttggtcacaccaccattgttgggcgtctactccttcacccaccggttcgtctagtccgccgctgactggtgtttctgcctacacggttggttggtcacaccacagttgttgggcgtctacgtcttcactgatcggcttgcctttgccggcgccgactggtgtctccgcctgcatggctagcctattatgccaccgttgttgggcatctatgtcttcaccaccggcttgccctcggcgccgccgactggtgtctccgcctgcatggctggcctattatgccgctgttgtcgggcatctacgtcttcaccaccggttcgtctagtccgccgccgactggtgtcttcacctatacggttggttggttacaacactgttgttgggcgtctatgtcttcaccattggcttgccttcgccgccaccgactggtgtatccgtctgcacggctggcctattatgctgccgttgttggacgtctgtatcttcatcgaccggccgcctcgtatgatgccaacttgtgctatcgtcttcacggccacgacgccaccgccaccgccgctaataggcgtcatcatcttcaacgcaagctgtctgttgactagggccctcgcctctacggctggtttataccactatactactgatggacgtcatcgtcttcattgctggccaccttgtctgacgccgactggattattcgccttcacgattgcgtgtcttcatcatcattgaccggcgtcatcgtcattgctggtttgccttcgccgccactcgtggtgtcttcactttcacggctggcctattatgccgccgctcaaggacgttttcgttttcttcatcactctacttcttccgtcgccgactggttatgccaccgtcggctggtgtttttatcttcacaatcacgcgtctttgctaccggtttgcttatgatgccgccgactcgtgttcacttcatcatggctatgcaactttgtcattatggtggagctacttcatcttcattgtcttcggcaccagcaaactctattgccggtacttcgcaagttttgctactttaccagccacgacgtctccaagagcctcgacatctcggtatgcgtcactaaatatgatgccatgttattataacaagtggtgttccagtattcaagatttctacccagacatgctcaacacatatcttcactcaagttatggctattcgacgacaagaagctacagttctcgactctatgttcagctgtttcccaactaaccaaagagtcgggggctacacaaatatacggctcaaatctcgacaagttttatgtccagacgaagcaatcaactaatcagccaatgagttctatggaatctacttcgggagtcatcagtttcgttttcgcttcagagcagacgttctacttcagtaactcttattatttcaccggcaattttggtttctccacgccgctacaatctactccaagttgctcaagtgtcaagtttgagatgtaatctacatgtccgggagtttggggttattaaccaatcagctcagtttcgatgagttgaacaacaatatctattttcctccaaatgaagcatctgcaacagctacaacgccaagttttactgctatcgtcataaatcaggaagcattgtctcaatctcagttatggacatgccaacgtcaaggaaacagctcgagcttcgatatcttctcaatagtttgatggattattgtcactgacatcatcaccagcacatctacttcatcggccctgacgtctccaccgttgctaagaggtgcctacatcttcgccttcggttgcttctggaattaccgactttcaacgccaacttgttttttcaccttcacggttgagctactacgcaaacgctgatgagcgtcttcgtcgttatcatcggctgctacaccattattgactggatcgccgacatcgtcatcttcatcaacatcctgtcaagcctcttcaacatagcctactatgctgctgttgatgggcaacttcgtcatcatagccggctatctctgttgctgctaatcatcattaccgtcggatgcgtttgtcgtcgccgactattttcttcatcttcatgattggtggatttcgccatcaccgttgatgcatgtctatgtcttcatcatcggcttggtttcgtcgccaccgactgctatgtcgttgttgttgggcgccttcatcttcactgctagctgacctgactgctatcgactggtttcttcgcctccacagctatgcgacttcataacctttgattggtgtcactgtttttactaccactgacatcttccgtcacctctgatgagcaatatcatcttcatgttggtcatttcatctccatgccgactgcatcagctaccatcaatggacaattatgactacaacagaaggataagctatatgctcaggggcttacgagctcaagcacaaggattataccttcaagttggattttgttctatatacaggcaacatgcactcgtagttctgagattattttctatgatcgaagactggaccaatcattattccccgtaagggctatcaaccgaataattgcgccagttgggattcaatttttatatatattttggagtatcccataagggataatcactcagatcagaagctattcatatgagctacacttggtctatatcacctggaagatttattactcgggagcatgttacatgcgtcatcctttaaagggtgttgaaggcatattttttggcctaggcctaatatgtctgcagcccatattttcaggtgtggcctgtcatgttcttttagggacttacgcactttttgcttaggctaaagtgcacgtgatcaagtgcctaataccttaaaatccttttataccgtagttacttaactttttaggagttggtacaatgcatcttaaaaggtgtcaaacagtaaagctttatatagctgccccgctgacttttttatataagtcaaggtgctgtttgggtttttaagcaattgattggatacaatatcgttgctttttttcacgtaagtgtgcatttttattgaccaatattatggcttagggtgattatatatcttagtcattttccaggcggttggtaaatcctttatgagtttatttactcggattttaaaccacatatgccgtatatttccaggtgtggtgaaaccatgtgtcttttagggacttaagcacatctgttaaaagcagtgtgcgcatggcgtatgcccaatactttggaaatttctttattcatagcattcaagctttttttatagttgcttttctatgtgaattttcaatgatgtagtcagctttaggttgctcgcatcaatttttacaaagcagtcggtatatcacttggataatgttatttggggattgacaccgcatatgttatatattgatatcaagtcacttggttgattacaattatcaaaaccactcagttggttgtattatctactccttgactatatgtttagattgttcaactaagcacatagtcgggggttacacctattaggtgcatctagtcgatgcacctaagtttacatttaattatttttcagccctccatagtctttagatttgctaaaagtactcgggagaccatggcaaagatgatcgaagcactcggctttggagtaatctggttcgagagaagattatcttttcgactgtgaaggtctcaggggctactgtagagattatgggtaccccatacccacacggtgtggttatccgatcggtgtagagggtaccttatatctatgaaatatgtaacagatcatgacatgggtattacgtttccttgtatattatggaacggtctaaagtcctggtttggtaatattgtaaaatagatttaggaaaccgataccgtattggttaaggtttctatcttgtaatcctgcccaccatcctatataaggtgggcaggaggccctctagggggcatgacataattagatcgtcagagttataatacgcctggcggattcaaatccccaaaaaggagtagggtattacctctcatcgagagggcctgaagctgtctaaattcttgtctcctcatccatccacttttaggtctcgtgcgctacacccttttattattgctgaaatcatgtttcgacatactctcttgtttatttttcaatattttgtaagatcatattattaacttctcacttaaatgtgttatcggctcttgtcctttatgagtaatgcaaattcatcttctttgtttcaacgatttgtctagtaattactatatatggccaaatgggttgttcggtccgacacagctgttggtatttcttaacaacattactagaaatataattcccagcaatggcgcagaaatacttccggtatattatggttatagagttcatccgcaagcgcaagcgcacggatataccattgtagcatttcacccgagagtattccaagggtatcatatttattttgtcccgtgggaagatcatgtagagagaactcaactaataatttatatattacttgtgataatcatattctaagcagggattaagataatccaagggtagagtgacacacaaacatttctactcatcctcataataaataatctaagctaggtggaaagaaaagagaaagagaatctattcctatacttctaatatacatagtatacatacattctagttaactgatatactagctaataccctctatccgatgccctcctggtacttcgagaagccacccctgactgccgagttccttacgacagcccgtcatgaccatccaactggggctaaatacggaggaataccctccccagtaaattaacttaggattatatataggcgcggaggaatacccgtactgagctatcaccatcagcggcccacctctcatccgcaatatataaccccaaataatgatatcccgtaatctagacaccacgcctaaactaccagatactactctaatatcatcgtcatgacatagagtaattgcataagcaaacattataccctcaccaaagcatctcccagataagctagcagtatattcagtataataagaacataatgtaaagttggtactcatatactcggaaagtatttcaataccagaaatgtatttagaagagtattctaataaaagtacaaagcttacaaaagaggaaaggaaagctactagagccatacccgaactcttccgaagccttccggactccttattcctattctaattctattccaccatctagatactactaaactaaacttgagaggaatgagagagctcttgcttgaggtgtgtgttgaagtgaagagagtgagcttcttatatagaggtaggtatgacggttgtggaaggggaattgtccaaagtgacctccaaccgtcattgggatgcaatcctggacgttcttgccaaaacctagatccatcgacgcctggattggttcggccgaacctggggctggcccaatccagcccaatttcggctggtggcctcctctattgctccactccgcagacttgtgaattttggcccaatttatcgtgtcaattctaagttcttggcccattcatacataagtctggtcctcgacatcgtctgattgatttatcgttggtgttgatgttaattctccttcactttattgtcattctctgcaaaaaaaggttagtagacctaatactagtggaatattattgttctaacatatttatgcattgcaagcatcactagttctctcctgttttagtaatattgacggccgaaactgatcgataacgaccgtcaacaaacccccccaagcttgaacctttgctcgtcccgagcgaagaacgaaaggaaacaatgacttggttgttaatcaggagctgctactatgctgcatatctcagagatacaggtgcaaggtacatgtactctctctcagattaaataatctttggcacggtggcttacccttacccctgattcccacgagacactgcttctccttgccttgggcggttgaaagatagaacaacaattagagcaccaatcacccaatctttattcaactcttattccggaagttttcaaatgattttggaaaagaaaaccaagttcctcaattgattcactcagtctctctaagtgtatcagcatgatttcctcatcaaatgttgccttgttgattccaactctaaggtttatatgtggagctcggtagggatcaaacatggcatacttgcattcacatttattactgagtcaaaaacttagactaaagcagataactaaacatactcaagatcaagatcatgcataatgtgtgtgtggtatatagtggaaatggtgtatgaggaaaaataaataaaaataaacaaaatgcttcttctttgtgcttactttcttctcccaaaaatctttcttttattgattaggagagggcatgattacatttttttttcaatcatgctcatgcttgatggagcataactttttttttcataaccatgcctttccctcctctcttttttttctttttaggagaagaaagcacatgaaagcatggagaatttattttggtggtaatatggatatggaatggaatattgcttagctcccagtgtaggagtttagcatgtccatatatatgggtgtatgatcttgatcatagagcatgagaagtatctacacaagtcacaagagtttgacaaagttcaatggaatggcaagcaaccaaaatgcatatggtttaatcatgatagcacatttttggctctggtaggaatttatatcaaatgaggaactttcaatttatcattttgaaaaacaaaacatctggaattcaagccaacctagtatcaggatcatagctactcatatttactatctcatatctcgcaacagcttagacttagatcagcaagtgcagcccatttacctcaggttcccggataattgttggctacttatatttaacctttgagagagtacttaccaagaacccatatatcagagatatgcaacagagcaactattcatcatttcaacaaagagaactagcttgtcttacctagcatgactcaaacctatcctatctttttggtattttctattttgcaaatttttatgttgttttcaagttttataagatgcaattggaaagcaaatatgcaactggaaagggaaatatgcaatgtgatacaagttacctcagtggggggagcgaagtctccccccaagcttggctttcgctcagggtccttgattaggattgaacccctgaaagcgaaagtacgcttgaaagtcatcgtgctgttgctgcatcatgctgttgatgctggcgaactgagcatcagcagattgttgtcattcttgcgtctgagctatgtgttccgtgaggttgtactgaatctctcccgtctgcacatcaagggtgtctattctcctagtgatttcacccaagtcccaacgagacgaacttgagcgccattcacttggggatggaggcacaccacttgatctggagggttggtagtccccccagtggatgtcatgaggcgcatgccaccggtcctcactggtgctttcccaggttgagactccgatgctatggcgtggagcttgggtccatccgggtgcatccccagttggtgcccaacctgcctcatacatctgcacgggtgtcgaggatgatgaacttccttattcgttccttgtcatgttgcgcgtctccctgtatgttccacctgcacgagattcttctatggtctgcaggggaatggtcagttcatggcagttgtacaaataataccccgcatttggcaacgggatttcttttgtacaaccggggaaaaagtatatcaaagatccatctactccatgtttcaaaatatgcccttgcactaaataggcctcatcaatatgcagacgagcggctgagataaaagcaatttggtcgctaacgacccctagcccttttgctatccaagtaatcagaaaagtgcactcaacaagagcagagaactttatactttctaaccattgtcttatcatacatttcacaggagaaatttttatctttctaaccatggcaaacatgataattaattcatctcccctaatgggtctcagatcacttctaggaaacaaagtcatagaaatccatttgtgcatgagcctaagtgtaggattatggatatcatttgttctaggtttcttgcaaattggagcaccagaaatatcttcccaaaatctatttttctcgaacccagaaattcctttctagagatcggttttacaggaatcgtgaaaaccaagaagtgtactcaagcctttccatctgagcgtgaactccttacggaaaaagcaaaaagaaataccatcttctatttctttcaaagtgcacagaaattgcaaagtaagcaaatgagaaccaggctcatctaccacagcaaatctctgccaaccaacagctttccaaatataacgaaattcaacatccatacctatctttttcagcagctccggcgagtattctcgcgtgtgagcacactcccgatcgctcagcatgtagtaggcttgtctctcccgatcactgtcatggtcgaggtcagcgtcgctcaagagttgtcgcggagcgtcggtgtcttccatcgagacatcagctgatgaacgagtactagattcgtcatgacgacttgatggatagcctgatcccttgaacagacgagacagtcgcctcctcatactgcacaatggaacaagaacaggctaactcggcgggggttagaattgacaagagtttcaccagccggttagtttcgccaaagcaacttgtatatatgcaattaaagatttgaatttgaggaactatcaaagcatgaataaacttgagagcaaactttggagagggaatgaaaatgtgttgaaatggggtggaattccctctcttggccggctggcttttatagggtgcccacaacggtcaagaatgacatgtgggacccactagccgttgcctcaaaaagtgaggcagccgaccgttgcctggccggttcggccgaacccctggtgggcccaaccggccccactttcggccgatggaatccaacggtcagtgcggtcgtggcacagtgaatttttgttgaaaattttattttggtttgctctgaaaaattcatttgaagaatttcctcaaaattcaaaaatcctaaatgcaattttgaaattcaaatatgtggtgatgcaaaaattcaaattgttgaaaacaaatatgcagatacataccaatttacctgttggcgaaggtcgcgtcatttaaagtccgacatgcaaaaccgtacctcctttcgattcagtgcgcggattttccacccgtctccagaggtgatggagcgggcgtctttggcttttccttccacaccttctttgattttggtgcgaaaaacggcttcttctgagccgggtgctctaacttcttgactggtacaggtgattttaccggtgtcctccaataacggttccttggcattgttgtttccttctccaggaagttctgcatgaactttaccaggctatctgtcttgggtggctccacttcgaccacttgaatattctgcgggttcggcccgtacttgattctgaccatggagcattgttccgtccttggttgaaactcaaacttttcctccttcccgttgatatggaaacggatactcccagttcccacgtcaatgttggctcctgcggtgctaaggaatggacgccctaggatgagcggcgtctccttccccgtgtccatgtctagcaccacaaaatcaaccgggatgaagaaatcccgtatcttgactggcacatcctccgctatccccgccgggtaacggactaacgagtcagccagttggaggcgcatcggtgttggtgccaacaccgtgaagttgagtttgtcaaagacatcctttggcatgacgctgacgctagctccaaggtcgcacaaggcctggtcgaattgttgtgccccgatcgagcaggtgatcatgggacaccccggatctttcttcttctccgggaacttgttgagtatgacgttgctgcagtgttccgtcagcttgaccacctccgttgttgggagcggtctcttgttgttgagtatgtccttgagataacgggcgtatgttggtacttgcatagcgtccaacaacggcacgttgatgtggatcttttggattacttcaacaaaacaagcgaactgctcgtccactgacggtttcctgctccgctgagggaatggcagcaaacgtgtgtcgcagtactcctacggcactgtcttctctggctgaatcttcttgtcagccgagttagtagatggcgtttcttttgacatcccattagttcctgcaaggttaggatacggcggatcacgagtagacttacctcccctcgttgtgatcgccttaacattttcaatggaggagtcaggttgccctgaaatcctcccggattcatttgcagggactaaagatgccaactgagttaactgggtttctgtcatcttattcaagagttggttagagaagttaccgttattatttcctccttcataatacgggcgcggttggttccacccctgacctccttgtggacgatacccgttgttgttgcccatgtacatcgcctcctcatgggtttctgggcagtcattcccagaatgacccatgccgccgcagacctcacacgtgacgtgtgactccaaggccttgacgttgccttgtggccgtttctcatggtcgtccaagcgtttcatgaggaggtccagcttggcagcaagtaactccgtctccttgacggtgtgcatgcctcgctgacgggtctggagtcgttcctcgctccaacccatattggagaccatcttctctataagtttaacggctccttgaaccgttttagagaagaatgctcctccagctgccacgtccaggtgatcgcgggacatcggggtgagcccattgtaaaagttctgcaggatcagccagtcgtccatcttatgatgaggacaggcggccacgtactcctgtagtcgttcccatgcttcaggaatggactcgtcccttgtctgctggaaactggaaattcgtccacgaagagcgttggttttgcccatcgggaagaacttcgagaggaatgccatagagcatttatctcaagtgttgatagcagcacagttggcatagaaccactgcttcgctctcccgaggaggaagaacggaaacagtcgcagcctgacggcgtcaggactgacttccttgatggtgtacgtgctacatatctccaggaattgttgcagatgagcgttggcatcctcattaggcttgccacagaacgggctagtctgcgccatcgtgatgaggctggacttcaagtcgaaatccatatctcctatgttgacttgcggcccgacggccatattgtcagtagagggagcaacgaactcacgagattcttgctggccataatcttgaaagttggtggcgctggtacggctggtttctctgttggtagagttttctacggagcaacgactcgcggcctgacgctctggaagaaagcttctagattttctttggagttttccggcaggttgaaaccagtcatgcactaccctgttttcacaacaaaaagtgaaaacaaacaaggttagcctgcaaaggaaaatgattatacagaggtaaatataaagtgttactacaagtaatctctattatgaatcttccccggcaacagcgccagaaatgcttgttggtatttcttaatgacattactagaaatataatttccaacaatggcgcagaaatacttatggtatattatggttacagagttcatccgcaagcacacggatataccattgtagcatttcacccgagagtattccaagggtatcatatttattttatcccgtgggaagatcatgtagagagaactcaactaataatttatatattacttgtgataatcatattctaagcagggattaagataatccaagggtagagtgacacacaagcatttctactcatcctcataataaataatctaagctaggtggaaagaaaagagaaagagaatctattcctatacttctaatatacatagtatacatacattctagttaactgatatactagctaataccctctatccgatgccctcctggtacttcgagaagccacccctgactgccgagttccttacgacagcccgtcatgaccatccaaccggggctaaatacggaggaataccctccccaataaattaacttaggattatatataggcgcagagggaatacccgtactgagctgtcaccataagcggcccacctctcatccgcaatatataaccctaaataatgatatcccgtaatctagacaccacgcctaaactaccagatactactctaatatcatcgtcatgacatagagtaattgcataagcaaacattataccctcaccaaagcatctcccagataagctagcagtatattcagtataataagaacataatgtaaagttggtactcatatacttggaaagtatttcaataccagaaatgtatttaaaagagtattctaataaaagtacaaagcttacaaaagaggaaaggaaagctactagagccatacccgaactcttccggaggcttccggactcctgattcctattctaattctattccaccatctagatactactaaactaaacttgagaggaatgagagagctcttgcttgaggtgtgtgttgaagtgaagagagtgagcttcttatatagaggtaggtatgacggttgtggaaggggaattgtccgaagtgccctccaaccgtcattgggatgcaatcctggacgtccttgccaaaacctggatccatcggcgcctggattggttcggccgaacctggggctagcccaatccagcccaatttcggctggtggcctcctctattgctccactccacagacttgtgaattttggcccaattcatcgtgtcaattctgagttcttggcccattcatacataagtctggtcctcgacatcgtctgattgttttatcgttggtgttgatgtcgattctccttcactttattgttattctctgcaaaaaggttagtagacttaatactagtggaatattattgttctaacatatttatgcattgcaagcatcactagttctctcatgttttagtaatattgacggtcgaaactgatcgataacgaccgtcaacaacggcccaggcacgaccaggcctgggccaatgtcaatcgggttagcacggccaatctacacgtcggttgggttgtgcctagccacgggttgcacccatggcccatgaaccaggcatgaccatcgtgcttctccataaaataagtctacttctccttcctcgtctctttgggccgtgtattatatttggaataagtctattttgtatccctcttgtctttggcggtgcccgtagcaagaactctctattgcctagcctaaagcgtcactccatcaattggacacaatggtggtgaactagccttgattagcccatcattcattgcatcctaagatgaggatctagaaaatggatgtgcatcaaagacccctgcacagattactgcagaggatgaatgtgatgaggttggtttctttacttcacttttttcacactgatatcatgcacatctcacgtgctaaatgtccatgctatgaaaccggatgatgagcaccttagccttactcagaaagctcctgcttctgcaaccaacagtagcacttcaaaggcatacaggaaaaggtaaaaacattcctttctttatcaatctggttactagaggcatcttgatattatgatctaacttggagataaaaccaaatgtaggcccaggccatctcctggtacatgggcttctaagaaattgttcaaggacaactatgatggtactgctgatggcaggtattgctgactagctttgtttctgcctcaagtataatttttttgtagattccttataagttcttgcatatacttccaatgtcatcgacaaggcctaatgaatcaaggatataggcatgttgttttttgttgtgcaaagttgtggtggccttagcatgaaccttcattggttgaagtcaacatgactcctaccgtgtctacacaaggagaagaaacaaaatgacttagtgatgttaatctgttgccactacaaactatgttgtgatcatgttggatgcatgcatgtgagatgaactaagattgaattgttgcttttgtgaaaaagattggtagtgctaatcttacatcaattttgctatatatttgtcgacaaactttctcctaaaaatttgacagatgtaattacagtgcaatcatagtgtaattacactgtaacttgcatgtaactacaatgtaacttgcatgtaactttcacataattttgaactggttgatttgtttcaagatttgtgcaagtgaagaaggaaaaaagtcaccgcgtgcacatatgtgagaagatttgttcccacgacatccgttccaccgaaatagcatgttacagagagattttaaaaattacatacaagttacatgtaagttacaatgtacttacatcatgattgtactataattatacctgtcaaatttttaggagaaaatctgtcgacaaatgtatatgtgatccctcttacatccatatagataggattttgcatgatcatgatgtatcatgataatcctgaatgctagcaaacagcagcaagtactttcaatttggcatatgccaatgatgcctagacattgataaggcttacgatgcatgctattaggctattataagtgcaattttcaggtgttttcatatagttgttaccaaatttttacccaatgcatctacatcttgatcgtctgcaaacaatcctttgcataaacaagactctctattaaacctagctaatcaaactccttttatataccgtgcaaggaatccacaaaatcacttacaccgaaacaactatggatgttgcctatttaatatgtatacatatacataactccatgcctacctactacttctgaagactttgaaaagacacatgacaagctagcaatcagtatacatgccattcctctatctctttccccactaccaaacagttttcttccttctcgtaggtaaccatcctcttctttggtctctctcaggcagttgtcctcttctttgcacttcactcattctctgctcttctatacactaagcaaggaaacgtcagcttcttcaagctcttttcccaaccaggtaacagcatcgccgaacttcttactttctcattgatatccctctccatgttgtgcctgctcggtggttattactaggcagatct

SEQ ID NO: 8395 - DNA, 7252 bp, Oryza sativa
tgctgaaagtaaaatagaggaggacatgaagaagcaacatgctatgtttttgtcttctattactaaccatttgcaggaagtgcataatcatgaaaaggaggagagagacatgaaagagccgccagtcccattgatcacactcaaagtcgaggcacctccattatctgaagagggcatcaaaggtaaacttaatggtgctgaaattaataaaggtgagtgtgttgttaatgaattgaatttgtccacttttcatgctatagcagagcaaccattagtggaaccaactgctgagattcctttgtcacaaattgatttgtttgctgttccttgtgataaagaagagttatgcgataatgcttcacttatatccatgccacaacttgtgaatgaacatgctattcctactgttaattcatactgcactgattttaagcatgttgttcacattgctaatgaagtagaggagcgtgaattgagatcttctttaaatactttgggctatgttcagtttgatgatttttgtgagctcgataatttcaaggagaaattatttgctaagtctgatttgccatatccaaccaatgttatatttcacatctttggtgaatataatgatcttggaatatattttgtgcatagagtttacatctgctcggatttagaacctcctgtacatgtggataaaatatgcaagctagagaaaaatgttattgctaaccaaattgtctcgagtttgccttgttttgattggaagaaacaggttgttgtaaatggactacgcaaagagcaccatatggaaaaaccgaggacggttttccgtgaagaaggggaggatgatgtgaccatggctaccacggatgcaaccattgctcacatcatggatgaacaagaagatatcgagatcaagtactccaagtgctggaatccgattcggccacctactacaccgctgacttcaaacggccaccgaatctgcatacgacctccgttttcggcccgtgagtacttgatggaaagctctcggagccctctttctaacagatccagcctcttctctgaattctatctcgtgtggccagaatcacaggaacaaggtgttgcatcacctataatgggcctatgggcttgtaacttcatttgggaccccggcccaggtgaggcccatgtggggtgcgccccaagctggtggagcacgaccctaggcacccctaggtcgtcctcccacccctatatatagctagtctggcccaggtggggcccatgtggggtgcgccccaagctggtggagcacgaccctaggcacccctaggtcgtcctcccacccctatatatagctagttaccccttcagggtttctcgggttttgttagattaaagtttagccattgctacttgcttgcagcgcgcgtgtcggctagaccgtccgtctgcttgttcttcggaaccccaacttatcatttgtattaaattcctatttgcaatatcagattgctttttatcttgttcttgcttgtttcttcgatttgcttgcaggaatagggttgatctgcaccggcaagatcagcaacccacggagaggtgtatcgatcgctaaggcgcaacacaacgtctcgtacggttgtagtcggatcgtcaacgtttctcccaaatcgtagttatcacaactcaccgaaagatcgggccaacaacagccttgagtgtcgagaggaactcagggttcatcagtcactgtagctcgattgcgcccgaaaagcaaaaatgtttagggttcatcgtagaactcacactaagggtgtgtttggcatgcacacttttcaaactgctaaacggtatgtttttttttaaaaaaagtttctatataaaagttgctttaaaaatatcaaattaatctatttttgaaaaaaattagctaatacttaattaattgatcgctctgttttccatgcgggagagatcagttccctccaggaatctgaacacaggctaacggagactgggaagtttccgtgtgtttttttacacacgggagcttttttcaagtcttttagtactgtcatggattaattttacgagattttcagaggagtacagtttgttttcgtcatttcttttagaaaaaatatactagttctcgaaaatgccttatatatccaggtccatcacccaccaccgtgtgcatgtacttgccgtcacgttgtatttaagcacgattagtgacaatctacacaaactcgagcgtgacgggtcatgactatgccgtgtcgagcgacggccgacggtgataatcacgatgagcctacatacttagtatatgctacttatacatactctatacaggacactagtacgtacgttacatatttatatacataatacttctatgctatttatacatactctatacatagtaggatattgtcccaaatcctctatttatttagccattgattcaggggataggcgagccatcctttttgcgagtaatgcagaggagaacggtaaagccggtcacaatcttatccctgtttccatcgtacgtagagccacatccacagccacacggcccgcgtcggaacagggaatccccccggcgtgcagctcttcttttccccgagcaagtttaatagcaaagcccactactagcttcaaatcatttatagccaatgtaatatctaattcatacactagttacttactatactagtaatatctggtcttacctgtcatacacacattatgtcttttaaatccgtgttgtagctggctacagatctgtagcccgctgcttttctctctcttcctttatctctttaaaatatgtttatagctggcttatagcctgctatttgtacctgctctaaaaccgaatacatatttcctccctcccaaaatatagctatttttaaggttagtgtgggtattaagaaaaagtaggtgagaatgatcggactggatgaagtgtgtcattggttgaaaagagaaagtaggtgaataagaatgattgtgattggttaagaggaggtaagtagagaaatagcttcattttagaacattgtgctagaaatagttaaattttgagatggaggcagtatctatctatttattgcgtataaactaaataattagaaaaaaaataattaataagataaattaatttgtaatatattcatttacaagcattcaacttcaaattcaacttatatttttatataagttgtaaaaaataacaaattaactctaatcagtatacatatatttacaactaaatttattttttacaacttgcaaaagttaaatttaatctcaaatgcttctagtgtgatatatttcatattaatctatcttaacatttaccagttgatttgtgataaacggttagcaacaattatccaggtgattagaatccttctctcccctttgcagcactgttccccccactccccctttccttatcaggaagccacacgcactctccgtctccgtagactgcacgcttcgtcgtcacatttttcacggcctcctcaccgccctcccccctcgggccccacgtgtcagccgccccgtgcggattctttctttctcttctttttttaacctttttttttttctttttggtataaacaaggaccagtgtagttgcgcccaatcggaggggagagaagaggagacacacgcaccgcacggtggtggtggctctcggctcggccagatttgtttaattattcgccccgggtttaccgcggccgccaatcggaggcgccgcgcgcggccacatccctttctttctctttcctcgcctcgcctcgcctcgccattggcgagccgcggctatatactaggcgcaccccgccgctgcggcgcgcgtttctctctctccttgtctctctgtgctgttgttgttgcgggtgaatctgcttggatttcgtcggagttttctgtcgcggaggaggagggggtggtggttgatcggaggggaggggggagggagatggcgagggagaggagggagatacggaggatagagagcgcggcggcgcggcaggtgacgttctcgaagcggcggcgggggctgttcaagaaggcggaggagctggcggtgctgtgcgacgccgacgtcgcgctcgtcgtcttctcctccaccggcaagctctcccagttcgccagctccaagtaagcgcgttctctgatcccctctctctctctactgttgatgctgctactgctcacccgatgatctcaccctttttttagttttcgatccgctcgagatttttttggggggtttagatctagctacctgctgctgtgttcctctctcgtttgaaagggctccagatcctcccggtcgctagggcttcctccctcttctacagttttacttcttcggttttagggtttgtgtttggttgatgcgatgcttctcgcgaaacgccacttcgggatcgagccttcttttctacttccagaacaatcatccttgcggtttttggggctgattcctgggtcgattccggtggattctaccacccgggatggtcctccgaaaatggggaatttttctactgtagtttcaatcacaatctccacagctaagtacggggaaaattcgatcgcttgctttttgcagatgagagatatgcatatttctcgtgtattccatttgctttcatgtggagaggaacactctaaaatccggttaattttgcttacgtacgctgctcgataaaaaataaatcccaaaaccgatcggcgcggcgcgcggccttgggcgcctccgctaatcgcggcgccgccgtacctgtgattttatgtgtggtgtggcatggcatgccgtatgcatgagccgtcaaccaaccaaccaacgaaccagctgccgatcagttcatcctctcctactgcctctctctctctcgtggtctgcgcaggtggccggctggtactttgctgtagctatagctatatatgggatcactcttgtagcctttgggtatttgggcttgctagcttaccattattggtgttctccaagagagaaaaataaacatttcaagtaccaagagggtacgtggcctttgcatgttccatatataagtatgtcgtccaagaaaaaaaagggttaatttagtatagtaggactatacgcatataagcatgcccaaagagaagggggttaattaattaatataatgatgagtagtacggtactccattttaagagtgtgatcgatcttgatcagtttctttttggcagtcgaagctatttaagaatataattgcatcatttagggattgagcgcatgcatcagagaacataattgtatgcacgttttctgaagctcctttgtttaatttctgtgtgatttttttatgtgcctatatagttgactgcatatgggtgcttctttcccaaaaataatggaactgtgcgttcttcttttggaacgtactgtccttgggtgtaacttaatatttgatgcttgtaatttacaacttgatatatagttcatgataacttgtttcgttcttataattagaaccatgccatgaactttataatagaataatctcgtgtcatttatgtgttttgtgtaactaacaatgaaggtgagaagatcaaggtcgtagtacctcataaactttacactattcctccactattccttttttagggtcctcattttatatacttttttctacttatcatttggaacatctacacagttctacaatacacctaagacgctaagaccattatctttcacaatcttatgtcccaagccgctaagtataattgtttatctattatatgcccaatatcatgctctctagtttttcttccctacaatttgtcatctcgttatttctccatcaacgtacaactccattatgtacgaggaaaagatcattccgctatgatactatttgagtgaacaattatcagacaacaattaaataggagtaacatagcatttattgaggtgaagttaattttcagaagggcaaatgttaacgaagacctggtaattaaactggtcttttcgatctccatgcccaattgcactgatcgagaacgtaaagaccttggcatagttttttttatggcacctatatattcagtatgtatttcagtaggaattattgtacaagagggacaattcatatcatcaaaacctactggtggcatttctaattttcttactgactgaactttacacttttgtgcacatattactagattagtgccatagtttttgtaagttcaagtgcgtgctgctaaactgtatcctagttgagaacggtgggagttatattatataacttaatttttttctacaaaacgttgaacagaaatcactggacaaccttaagtcagataagaaactatgcacactgttataatttaagatcagtgattctgctgacattattactaagagcatatatgatgaagacatcaaaatgtactttaaacatgggcatgcgtattacgagtagcacataactctagcagaaatgtatgaattctacacaagctcagcatatccttggctggctggctacatcttcttggagaacatccaaagctatctttttccacccctttgaaaggatataaaatattgtgcaagtgttagtccaacgcagtttatattatgattacacaacaatcccaattcccagggtttcaaattgaagtttacttctagaattaggttccaaccattaagcaatacgtacgtagtatattctttatatatgcttatgtttttttcctgagaaaaatatgcattgtagtttagaccaatgggccagaattcatctgacaacaataaacaatatgtacttgagtggtgtctgactggtttccttcatgttaccctcttttgaatatgggattcctatagacaataacagaagaaacaaaaaaaatgcattatattagattaaattcagagtgctttagacaatcatatatagagtttaattttccattgatatatatgaacatgatatgatatgataattgaatatatatatatatatatatatatatatatatatatatatatatatatatatatatatatgatgctcgcagaatctcttaccaattttcagcgtaactagtaacaaataattaagatttattctcttattaaagaggctgtcttgaaggtgttagactatagatggttttgtatattagatatacattattattatatctccagagagcacacccctttgaagt

SEQ ID NO: 8396 - DNA, 13788 bp, Oryza sativa
acggcgccataagcgggatcgctgccgccgccgcctctttcgccgctgcttgcgcttgcaccatgttaactactcctagcttgattcttgctggtttttcggtgtggatctcgcgatgccaaaaacgcccaaaatgctctggatttctctcggtttgtttcttcctgctgctctgtttttagtttttgctgtgtttccaaccgggttggtgcccgatagtacttataggtgtcggaatgggagcatggtacgggcggcggcggcggccaagatggccaattatggcaagtgtacgcacgcaagttcgtcagctcttgactgcactggtgactggtcacgctttctgtttatgctgtcgtcaccctctctgtcatcgacttggtggtcagaaaaggtttctgtctgctcccgtcggaacagattcaggccttgtttaggccgtgtttagtagttttggcaaaaaaaaaattaacgtatacatacatatatatatatatatatatatatatatatatatatatatatttaaagtattaaacgtagactaataacgaaacaaattacagatttcgtctgtaaactgcaagataaatctattaattctaattaattcgtcattagtaaatatttattgtagaaccatattgtcaaatcatggtgtaattaggctcagaagattcgtctggcaatttacatgcaaactatgcaattatttttttttgtccatatttaatgctccatgcatgtgttcaaacatttgatgtgacggaaaagttggaagtttgaatggaactaaacacagccttaatttttttttccaaaaacgccacatcgaattttgatcacatgcatagagcattaaatatagatactacctccgtttcaggttataagactttctagcattgcccacatttatatagatgttaatgaatctacacacatatatgtctagattcattaacatatatatgaatgtgggcaatgatagaagtcttataatatgaaacggaggaagtagaaaaaaactaattgcacagtttgtatggaaatcgcgagacgaatcttttgagcctaattaatccatgattagccataaatgttacagtaacccacatgtgctaatgatggattaattacgcttaataaattcgtctcgcgattttcaggcgagttatgaaattagttttttcattcgtgttccaaaaccccttccgacatccggtcaaacatccgatttgacacctaaaaattttcttttcgcgaactaaacagggtctgagaaaataatagaaaaagaagcctctacgtttgctctcatagcctagaaaatcccacattaattggtgaaaaataataaaaaaattaaaaaacaatttgagacaatatcacattaacagcataaaaaaaaagaaaaacaaaaagaatcaatcggacaccctgcttacgtagtaaaatcaggactctttattcaatttggaaacactattttaatttagaaaacaacagtcatacatggtctatcaaagtgaaaccaatcagaaacagaaatagaataatgcatgtatttgtttcatattgtactcactgcattaatggcaaaaaaatacacagacttagcaaccaaagcaaaatacaaatacacaaaacaatcatagctggtacgcgggaaatcatctcgccaaaattagcttcgtcaacaaattagataatagaaaaacaaatcaccacgtttgctctcataacctaaaaattcacacattaattaaaaataaaaaacagagtcatatttttaaaatttatgttattcagataaaaaagtaaaacaaataaaaggtgagtccatataaaaaacaattttcaaaaatatgaaatttggattaaatgtataaaaaataaatattgaaataagagtaaatgtaaaaatataatttataaaaagaaaatctaaaatcggattaaattagaaaataattaatatcgataaaatactccatgtagaaatacagtttatgttgccatttttaatacattttataataaaatataaaaacatatatgctactataatgaaatataaaagaattttataataatactagccgcgcaatctgcgtgggcaaataattattggagtaagcaatgcatgggaacaaggaagatagactgatgttatagtacaactaaacccaccttctttacatcaacatgtgatgcacgtagatattgcgacatgaattacagcacagagacaaattcccccggcaaatagtcttagctggaaggaactggggcggcagtattgcagcttccatccgcgccgtgagaaacaagctgttgtataaactcgtcaatgtacctctcatggagttccttgtcagctacaagctcttgcagcctgatggcgtttgctacaaacaccctcctggtttcttcctcaaccatgacggcccggaccgcggcggcgacgccatggcggtcgaatgacccgtccatgtcatcccgcctcacctgcgatcctaccttgttaccctccatgagccgcgcgttcggcccttggtccccgaagatgggcaacatgatgagagggttcccaaacagaagcccctcgacgagcgagttgcggccacagtgcgtcaagaaggcgcccaccgcggcgtgcgccagtatggtgatctgcggaacccaccccatggcaacatgtccatggctcttcgtccgttcttggtaacccggaggaaggacatctgaaagatcgacgccatggggctttctcagcgcccacagaaatcgtgtcccggcgagctccagcccgagagccagctcgtgcacctgctccaatggtagaggcacctcgctccccagcgccacgtacaccaccgacttcgccggctgcacgtccagccaccgcatcgtcgagttgtccgtcatgccggcgcggcggcggcctccgtcgggcgacggtggcacgaggccgagggggatgagcggcttgttcttcaggcccgccgccacctgctggaaggcgtcgggctcccactccgggcagctccgcatggccgccagcgtgcacctctccatcgccaaggagcagcgcttcgcgacggacatgcccgacgcgccatggtcgacgaagaagcttgccttctgcgcccactcttaacatggcacgccctcccggcgttcttctaccacgccgagcacttggaagatggaagcgccggctggctccgacgaccgggtggcccatccggccatcatggaggcgctcgggagaagcatcgcgcatggcaccttgtgctggagggcgaccaggggtgcccagtggtggaacgtgtcggcgatgatccaatcaggcctctcgccggcggcgtcgcacgcggcgcccaggaactccgcgaacggcgcggcgagggcgtcgaaggccttccagaggagctcgaacttgccggagggaacgtcgttggtgcactcggtgccgtccgggaggcgcgcgaggttgcgtggcgtggagacgaaggacacgcggtggccacgcgacgccacgcgctccgcgagctcgaggtaagggagcaggtggccgaacgcgagccatgggaagatcacaaggtgcagcctcgacgaggatttggaccggccggtgtccatggcgatgttgccagatacagaggagctaaaccttaatctctcgctgtctcatgaataataaacaccggtagagataagaaatcagcaagaaaccatatgcattagctagttgttctttatataaccagtcttcaaataatgattgattttattggtgaaacaatggtcttacctatcgatcgattttttatgtgaaacaggactcaatagctagtggttcttaaatttttattattttctgtaggtacttgttgacagtgaaatttggtaagcccaaagtcatcatcggcttagagtcaatatcggcttcagagtcctgaaatcagccgatgggagtcgacaaatcgccaacaaccgtgttctcgatggaatcggatcaattaaagggaatttatccagaagagtccgagttcaagaagaatgcggcatggcagtttatctattaattaggaatagtttgttagtttcctttttatttttaggaaagtgtgtttagtgtcctataaggactttatgttttccttttatctttagtaaagtttctttcttgtcccataaggactagtatctacccatgggtataaatatgtacactcggggtcattgtaatctatctctacgatcaacacaattcggcgcatcgccaccctttttacttttacttttgtttctacgttccggtggaacttggcacccgacgcggggctgcatcggtgttcgatctccggctaaggggtaagtccaatgttccatcggcccaggcaattgtcttatctacatcggcgtcgttcaaggctgcatcagtacatttgacctcttggattgcactggtttggatgatatatttgcctacctacttatcatatgtctctgttaatctagtcgtagcatatcgatttagctctatcggctgtctctcgctttagagtttctgccggtatcggctaaatcgcgttgctagattagattagtttagacatctaccaccctgaaaactcagtcaacggcttgattgtctagatattatgtttcttttcatacttagtgctgcatcagttaagtttgatctactaagtcgtgcttagaaccataatccctagcctgcttcttgattgccaataagggtttcatcggggtttcagccggtgagttatctggacgttgcatcggcttgtaaggattgcatatacatacatattggatttagccgatgacaacaaaggtttcactgtttaatctaatcttgtagatttcatggcatcggaccgctagccgatgtgtgctttaaccttcggatcagtgcttgttctactatatcatattgttagccgattggtttctactggatattattgttatattttattaccatcagccgattgcctttatatcattatctacattggacatatagccgattgcttaaaccctatcgctatcggctggtaccggcatcggctattatcggctatcggctggaactgctccatcggcttgtcagccgatcggttgttttgatctactatttacatatcttgtcagtggcaggatcaaactgactggcatgcctgtatctcatcatatttggacctgcactggagctaagcagatctcctaggccgacgtgttcaattttttcgtcaacggtattgcaggtctcgatggttcttaattataatatatatatcgtatgcgtgcaacacatgttgtgaataataaataaataatctcaacccaataaagtctgtttctgccatttcactttcgatagattttaggtctatgtctttcatttttctttcgtaagatcttgcatcaaaatttgtgtttatttagatctaacatgtagttacactagttacagtaaacttactaggttacgttgcaccaaaattagattcttttttttacaactgttttgtttctatatttacgatttttggcatgtttgttcctttttatttcatttaaaacgggttgtatatattggatgaaaattatgtaagatttgaagctccaagtctatcaatctattgataggtagtaccataacagtttacttcggaagatcatcagtggacgacactttctactgatatgaattaagagccatagtgctccaaacaccaacaagtagtagacaagcagctcttttacaacatatgtgggaaaaagaatttatttcttaatttaatttgatagttcgtgtacaacaccattgttattcatgcttggcgcccaattcagggaatgacaaggataagatagaagtgataatttctttttaagttttgaatcgatttatggtatagagttgacacaatttgcttatggcgttaattggtctactaaattttagcggtacagatagatacactagcgaggagggaaggaggattggggaggagagggatgccaggaaggagggagagaggtaggggagaagaggagcactgagagaagagggctgccgagctgggaggagggccagcatgaacgaggggcgctaacatgaattttcttagtccgccactagctacaatatctcagcgccagtaagtttggcgttgagctcttattcaaggtggcgcaaatttgccaagatgtcgaagcgcagtaccactccactgacactgagctctctactgctaaaaacagtgtgcattccctcttttatagcaaagcaaggctagtgcagtggtggaggtcttcagtctcgagacgacggtttgattctgccatccttcatgcttgcttttttttttcccatttcactcaacactttttaatcagtagagtgcctagcgccaatgatattgatgctaaactctgatgatatggtatactcatgccactactagtagagagctcaacacaatggcattggcactaaactccgatgacatcacaaactcgtgccaccttggacaatgtgctcatcttcgatgacattgtaaacttgtgccaccttggacaagagctcagcactaggcattggtattgagatgttatacctcaacacagtggcgaatatagaatataaactatgaagatgcgggtgtaaaaatatagtatgactgaaacaacccagtgtgatcataggtgctccatgataggtgtgttgagctgcattagataatgcaataggattttgatagtattagcactataatgatcataggaaagggaatacatatttctcgaacaatattattacattagctcgttaatttcgaaccaccagctacaaactttcaagaaaaaaaatgtattcatgcttgtccgtatcacatgagaagcgttactccctccgtattttaatgtatgacgctgttaactttttaaccaacgtttgatcattcgttttattcaattttttttgcaaatatgaaaatagttatgtcatgcttaaagaatatttgatggtgaatcaagtcacaataaaataaatgataattatataaattttttgaataagacgaatggttaaacgttggataaaaagtcaacggcgtcatacattaaaatatggaggtagtacattattaatccaaataataggctaaaattggattatttaggtgccaattaagcataggtagttgttgactcctcatcaatctcctcaagaaaagggtaatctgtataaccaacaacgggatcctgtgtataaaaggtagacctgtcatacctgttcaatggtgcgtcaagctcaaacctcctcggcaagtcagggttagccaagaagagcctcccataggcgacgagatcggcatagccatcagccaccaccttgttcccttcctcccggtcatacccgccagcagcgatgaaagtgccattgaactgcttcctgaatggtaggagaccatgggcgatcttccttcgtccttcgattatggccattcttggctccaccatgtggcagtagagaaaccctgggtgcttgttgagttgctgcaccatgtatgagccgagagccaccgggtcggagtcgaagcagtccatgaagtcgacgaacggcgataatctgattccgacacggtgagctcccacctcggcgacgacggcgtcgatcacctcgacggcgaagcggcaccggttctcgaggctgccaccgtactcgtcggtgcggtcgttggcgctgtccttcatgaactgctccaggaggtagccgtgcgcgccatgaatctccacgccgtcgaaccccgcctcgatggcgttccgcgcggctcgcctgaagtcgtcgatgatctgagggatctcatccgtccggagccgccggggcttggagtacaccatgcctgaatcgtccggtgtgatctgcttgtcggtgcttgagatcggcgcctgtccattcggctggaaatctgtcgatttcatttggaaatttaatcaatcaaagagcacaatgacctttgattcttcgaatcaatcagtaaccaagtagtaacaactagcaagtaaataatctggcagatggacgaacctgtggtggagaccctgccgacgtgccatatctgcaggaagaagagggcgcccttgcggtggacggcgtcgacgatgggcttccacgcctcgatctgctgctgcgtgtagatgccgggggtctccgggtagccctgcgcggtgggggagatgtcggtggcctccgcgatgaggaggccgcccctggtcgcccgctgcgagtagtacaccgccgcgtgcggctgcggcacgttgccgtaggagcggcaccgcgtgagcggcgcgagcaccacacggtgggagagctccagctgccccatcttgtacggcgtcagcagcgggatcgccgccgcagctgccactttcgccggtgcgtgcaccatctttggcttaggagtagctttggttcttctcgatcgaaattgctctgcttctctctctgtttcttgctgctgctgctctgctctgctctgttctttgttgctctacttccatttttgttggtgcctgcctctacttataggtgttggtggtcgccgagacgccaagtgttcccaactgctgttgtcaccctctccgtcatcacaacttgtcgttagaaaaaaggtttccatttgttcccgtgggaacagattcattgcatgtggccgttttttagttcgcgtactcctgtggttctgatcaagacatcgaggtagcaggagtttggtgccgaggacggtgccaatcaacgcgatggtgtgtttggtgtgtacgtttgattctgaattcaaacatgaccctatttgtttatggttccgatttccattgcttgttctagtgcgtgtggattcccggagtgctttgagtaaataaacaacttgtttgtagttactctgtatactactactagtattttacgtttcaatactgacgcggttgacaatgccaggtatttataaaatttaaaacaaccaagttgagataagtaggagtatgattttaaaggaacactctatatctttcgaattgcatgttactgtagtattttgtggttaaatttatcatgtgcccgccaaggataaagtgaaatgtttagctcttaaaacataaagttcgaaatacgtaggattctcaaacactacaaacagaccaaacataaacagaataaggcgaattctggtaagtcaacaaaaggggattgttgcatcgaaagaaagcgacgcgaacgttgggccgcacgcgtgcttacgtcctgcgacgtcattgcaaacgacagcacgttagaaatcagtggctacgcgtttgatactaggccctatttaaatttcaactttttttttcttcaaactttcaacttttccgtcacatcgaactttcctacacgtacaaatgtcaaatttttttgttatatcgttccaatttcttcaaacttctaattttagcgtggaactaaacacagcctagacaccttgatactaagattaaaaatataattaaaaaaacttaaattctaagcatgaatctagatatccctagtatttttatttctttgagacggaggaagtaataacttttagaggaaggctgccgatggatgcagtgcggtctaaaacgcacgaaggctagccggcagggggcgatggtgcagtggacccacatgtcggcagaggttggactgtggtggagcatcggggcgagtggcgggtgaaaacccaacccggcctcagctgggccggcaatgatgacgctcaaagcgtcattcccctcctaagggcattgccgtgccgtctcatccctcatgtgtggatgccgggcaaaagcaaagtcttagttctctttgggaccttgacggacggcggcggcagtgttttccgttgcttctctccttagagatgtcgtttaggtatcccctagccaaaaccccaaaccaattggtgcaagctccctctagatttcatcctcttgtagcggcatcctagtctctacaagttggccacgttggagggcctaagggggagaggtgttctattattctctctcaccctctctcccttactcctaaagacttggatagataagggctttgtgttgattgtaagggttgggttttgggtgatctcggccgtgtttctttgttgacctagcggtagccggtcacgcttagcgacgaccggtccaatgctagccttctccttgttctatgtgttggcactgtcgatgtatgggtgtgatggtatactttttttttctttttcctggttacgaccttctaggtttgtaatcttataatttttcttctgctctatcaatataacttcgcaccgtcttatgtgagtcgttccagaaaaaaaaaacttttagggcccctttgaaacgcataggaaaaacacaggaatagaaaaaacgtaggaattgaagtggcatgttttcctaatcctacaggaatggaaaacacaggatgaagagggtccctttgatagcaccataggaaacaaacaaagcaaaagatagtttccaagaggttgaatctcttgcttattttcctatgaaattgagctataggaatgcaatcctaagaaaaatttcatatactttcctatgaatcaaagggtttgataggaaaaaatccttaggaaattaaatcctccaaaattcctatgcaaatcctccaattcaaaggggcccttagaggaaaatcgaatacctgtacatagctaccaggtacatcattgacagcaattgacgacaattgtcatcaatcccaggctagcaataatcttcagttcttgcagcctgctagatcatgcagctgctctgaccaggctgcttatggcgcaccgccgcgttcaccttgatccggtgcatctccacatgatcccacctctgcaacgaggcgtacatgttggacaggccataggcagcgccgtcgtccaggtccagctccgatatccggtccgccacccactcgcccaccctgacgccgtcctcctccgacgccgacgacaagcggcgggcgtgaagcaggagacacccgagaatcttggcgttcggcctgacgggcatcgcccgcacgacgcgcacggcgtcgccgaggagtccggcgcggcagaggaggtcgaccatgcagccgtagtgctcctcccggggctcgacgccatggaccggcaccatctcggcgaagaacctccggccctccgctaccaggccggagtggctgcacgccgacaggagcgccacgaacgtcaccccgtcgggccggatgatcccgcggcacgttcgactcctcccgaccatgtcgtggaacgccctgacggcgtcctcgccgcggccgttcatgcctagccccgcgatcaccgtgttccagcagaagaggttggggccgtcgggcatggtggcgaagacgtcgagcgcgcggtccacgctcccgcacttgaagtacatgtcgatgagggcgttgcttagcacggcgtcgatccttgtcccgagctgacggatgtagtgatggactcgccggccaaaggcaaagtcccctgcctgcgtgcacgcggtcaccacggtggctatggtgaccgtggtgggcatcatgagcgtctgttgctgcactgtctgtcgcatcaaccggcggaacatggcgatggcggtagcggggtcacctcggcgcaaatacccggccatcatcgtgttccatgtgacaacgtccggcgacggggaagaggagaaagagcagcccatacaatcgaaaagctcctgcgcagcgtccattctcccggccttgcagtacccatcgatcatcgtgttccacgacacgacattgctcgccgtcgccccgaggctcgcctcgaacacctccctggcggagccgaggtcgccggccttgcagtaacacgtaaccatggtgttccacgaggcgggggtcctgtccggcatccgctcgaacagctcccgtgcgtcggccatcctccgggacgcgacgagcgcggccagcatggcgttgaacgcgaccgcatccctgcgaggcatttcgtcgaacagcctccgggcgggatccaggaggccgcgcctggcgtagcgggtgagcagtgcggtggccagcaccgcatcgccggcgaggcccagcttgcaggcgaggcagtggagggcctgctcctcgcggcggccgggggcatccgccaccgcgcggatgagggccgcgcgggcgttcgggagcacccgaagctgcatcagatcagataggcggcgcctgtgaacaactcgttgctcctccgaacggctgctcctcggcgccccgagcgctgatggtggtggccttcctcccaacgtggtctccgtccatgggggtgggtgctcgtgtggccgtgcctcaccggctcacccgtagagctcggctttagcagcagacaatgccgcggggtgggctcgtcggggtggagctccaccgccggccgccgggtgcccgggtgtagggagaggaatgagatcccctcctcaggtcaggtgactttacagcatatggttcatgtaaagatggctactatacgtcagtgactcaaagttatcatgtgacttaatatactttaattttgtgctgtcggtataattcacgtatcagtgcgacagctacaaattacataaagttactgcacaaagttaagggacttgtttctgagaaggggatataagaagatttttcttttgggcacatagaagatttggaggtgaagaaagtggaaatgggaagggttaattggaccataccattataaataaatttgctcttttttaaaatatcattagtcccttcgtttcaggttataagactttctagcattacccatattcatatagatgttagtaaatctaggcatacatatatatctagatttattaacatatatatgaatgtggcaatgctagaaagtcttgtaatatgaaacggaggaagtactgtttatctaaccgatatcatatcatcatctacatcggcatccacatccaccaaatagctataccaatatccttggacggattcaaagtgaagcggattacataatatcatatccgttttcatctctgaagcgattggttgaaacgatacaggtagtaaattttatttttacttttaaatataagtaacataattgtattaatccaatacaacacgcaatgtcatacaacaatttgttattccccatcgtttcaaaagaaaaccaacccttttggcctctcaccaaaagcaaaaccaagttattcccttcatctcacaatattactacctaatatataattggatattttctagtacaatgatatattaggtggcaaaattttaaaacagaacagtatactacttataactgtcgtagtggtcgccgttgccatcgcgaccgaacgcgatttgaatcagttggagagcaggaggcggcgcacgtccccgttcgggggtttggccagctggcggcagcaacagatggggtaatattgtcccggcttgcagtacgtggtatacgggtacacgtagcccctcttctggcagtactccgggcatgtcaccgaatcacatggcacgatcgcatggcaccaatcatctgtgcacaaatattcgattaagggtcagaacgtttggttgaaaaaaccgataataaatatacaaagaaaaaaaattcgataaattttgataggaatacaaacaca

SEQ ID NO: 8397 - DNA, 2243 bp, Oryza sativa
cctgcgaaagaggcgatcccgctgctgacgccgtacaagatggggcagctggagctgtcccaccgggtggtgctcgcgccgctgacgcggtgccgctcctacggccacgtgccgcagccgcacgccgcggtgtactactcgcagcgcgccaccaacggcggactcctcatcgcggaggccactgtcatctcccccaccgcgcagggctacccggacacccccggcatctacacgcagcagcagatcgaagcgtggaaacccatcgtcgacgccgtccaccgcaagggcgccctcttcttcctacagatatggcacgtcggcagggtctccaccacaggttcgtccacttgctggtggttggttgattttttttcaaaggtcattgcaaattgtgctcgttggttgattaattaaatttcgaaatgaaatcgacagatttccagccaaatggacaggcgccgatctcaagcaccgacatgcagatcacaccggacgattcagggatggtgtactccaagccccggcggctgcgggccgacgagatccctcagatcgtcgacgacttcaggctcgccgcgcggaacgccatcgaggccgggttcgacggcgtggagatccacggcgccaacggctacctcctcgagcagttcatgaaggacagctccaacgaccgcaccgacgagtacggcggcagcctcgagaaccggtgccgcttcgccgtcgaggtgatcgacgccgtcgtcggcgagatcggcgcccaccgcgtcggcatcaggctgtcgccgttcctggacttcatggactgcgtcgactccgacccggaggctctcggctcgtacatggtggagcagctcaacaagcacgagggtttcctctactgccacatggtggagcctcgcatggccatcgtcgacggccgccggcagattcagcacggcctgctgccattcaggaaagctttcaagggcacgttcatcgccgccggtgggtatgaccgggaggaaggcaacaaggtgatcgaaaatggctacactgatcttgtctcctttggaaggcttttcttggcgaaccctgacttgcctaagaggttcgagcttgatgcgccattgaacaagtatgatcgcaacaccttctacactcaagacccaattgttggatacacggactaccctttcctcgatgaggatcagaacaactcggttgctgatgcttagattttgtgctattttagttgttggttctatatatccacaataataatgtgcacgattcatgtaaacagtgttagtatatgcctgcgtgcaagatgtcattttcttctctcttttttgatggtttatgtctgcaactaattcattttgatatttgattagttatgcatccaaatatattgggattaataaacgcagatgtattcacaccacatgagaaatatatgtgttcttttgtaattttataagttgatgtgctgtccttttttttacatcccagcatgggtcccttttgaattatcttgttaaaaaaaacttttctctctttgaatttacttagcatataaatccaaattaattccaaacaatggtttccatcacttgtgcaaatttttttttgtcacaattccaaattaaataccttaacttttatttttgataatggctagaaatccatcctctaaaacctaaactgacaatgccgatcgtacgaattatttttgggcaagcccttaagacactttagcatacatgcacacaaaaaaattatacaattatgggcctctttatagatgatattatgggcttctgttgaaatattttagagggtgtatgtgctctctggtcgagatgaaaagaagacatgctcatgattaaatcatttgagaagttcttatcatttaacatcagattgccttttatggttttattaatgttgtccatcatatatgtatattttttagagcttctatgttttcttcttgccccagcaattgtatcatatatttttgcttaggaaaaagtacgaatccctccccaactatcaggtgagtacgaattatccccctaaacccgaaaccagatatttttcacccctcaactatcgataccatataaaaaaaaccccgaccagctttgtaagcggttttggtctatgtagcagtctagtcagtaatttttttattaaagaaacaatgggccctacctgtcggatatctctccactccatgtcttcccctctcacccacctct

SEQ ID NO: 8398 - DNA, 3047 bp, Oryza sativa
tcgaggttggaattgcggcgggatcaagcgaagcctcgtcaggccatgccctcgtctcattcctcagtttatagagtccattccaagcaggtacaatatacatcctcggaacaaataaatgtatttggttttataagaaaaattagtttgcagtgcatcagtgatcctatattcctgcttattggagtacatacatatatgattattggcgttcatctgtgatcagttccctaggtttagatccattgtgttatttagaattagaatggtcatttattcagggggctttgacctgttagtaacccgagtcaagtcatggcctaattaactgaatgaatgatttcagactcaagaaaattgaaaataatctacgcatcttatcttatgaaaatagtatgggaaagagcacaggaaaataatctatctgaactataccagtttgtagcgtgggaatatgttatactcagttttgagggtgtaccacggtaactaatgattcacagctgctttcctccagggtgaaccctcactttgctggttggctttcagccgtggattagcaactggttcatgttctgaaatttttatactaaccatcctcagtctgtagtatttgaaatcaatctttcagtttgttctgaaatttttatactaaccatcctcagtctgtagtatttgaaatcaatctttcagtttgttctgaaattttatgcagaatataaccaatgccagtattttggaatgagcgcagaattgatccgtcacttctgaagaaactccgttacttagcagaagcagaggccacaacctggcagcggctggtcacttcagcggtctccaattgcctttgaatacgccaatggtaatttcaaaaatctccaagtagtccactaattttattacttacattttttttcatctaaagcaaaattgaaaacatatgtttccttgtaattctaaatttgactgcacatattttgatttttgatgagtactgctcgatagattcaaagcggcccatgagtttttttttttgagttgaagtggcaagagcattgccgaatatattagacgaatagagttcaccctgtttataaggaaaaccgggcccaaaaaacatacaactgcccggtttgctaaagtgaaaccggcgaaaaccttacacagaagacacaaaaagcctgagacaagacaactacgaactgtcggaggccgagggatgagcaagaccgtaagatgaaatctccaaggaggtgaataacgacataagccgctgtcgacgtccgtccaaaaactgggctggttttcacccaggggggagggagtccacaaggcaacacctccagggaggaaacggcacccgtgggcgtcgatattgccaatcctagaacaggcagggcatgaggtttttgggaactagcaattattgattttgattgttgatgatgaagagttctgactatctacatgggttagtttcttgttcaacaaattcaggaaatagtttcagctcatcagaagtttgcatcgatgtcatcccttctagccatcttctgtgcatttgcttggaacatttggttctgcactaccgttgactataaaatacagctcaacagagctttattttctcacatttctcataacaagttggatatggaaaaccatcgactctgaataggagatagcgagctttggaatgattctgagatagctccattttttatcttgtctgaactttggctgtgagctcaaatgattaaatcagtatctttttcatttttttcagccactgaatactttttaatagttttctattattctatggataatgcttgtgtgcatgcttatgatggattgctaattgttttacacgtgcataataactgtaattaactgggggagtgcttcttgaggtagatggaaagctttgctacttttgaagaaaacgagtggataatagagaaattgggtgagacatcatttattctgcgcaactttgagaactggctgagatgtaaacctgggaaatatagtcatcccgtgtgaataacacaaatgagcttcgaaggacaaacatcatgccattgggtcagttctgcagttaaagatagttgtctgaaattgatgaagttcttgactgcaggttgtcttttaagcagtttgtagcttaataaacggttgtgcaggtgccatggtcatactattgatcctgttagaacaaacaagataaaatggatgtgcccaacaactagacaataccacataacttatgatattaccgatagtgatgcgaaaatcagggaatagacagtattgtttcttcttgattcagaaggcgttctccagctttcagcaagcctcatcttctattgattttggcatgattgagcgaacgaagttaacctcgctaaatgaaggtacccaccgctatagactgtaatgatactccctccgtacttataaaggaagtcgtttaggacaatgtttaagtcaaactttaggaatataaatcataaataactcttaagttgttgaatttgaaaataaaaaaattatatgaatagatttgtcttggaaaatactttcataaaagtgtgtgtgtgtgtatatgtatatatatatatatatatatatatatatcacttttcaataaatatttttatagaaacaagaagtcaaagttatgttttggagaccgtgtcactgtcataaacgacttcctttgtgagtatggagggaatacacattagttactaaattttcagaggcttttgccttaactttgttcaaaatataatggagaactctgttaacaggactcgtaatggggcaatgttgacgtcactcaatgaagctacatgggtcttgcataaagggattgatcagcttttcttttatgcttgctcattgatgaaatgacaggcattaggcctttttattttcaaacatttaatttgctaacattgatgccgtgtacccttagtagtattattatatagtagaacattttttatatcatgttctttggggacaaatttacaccgagt

SEQ ID NO: 8399 - DNA, 27737 bp, Oryza sativa
  unsure (1)..(27737): unsure at all n locations
gctggtttttcggtgtggatctcgcgatgccaaaaacgcccaaaatgctctggatttctctcggtttgtttcttcctgctgctctgtttttagtttttgctgtgtttccaaccgggttggtgcccgatagtacttataggtgtcggaatgggccatggtacgggcggcggcggcggccaagatggccaattatggcaagtgtacgcacgcaagttcgtcagctcttgactgcactggtgactggtcacgctttctgtttatgctgtcgtcaccctctctgtcatcgacttggtggtcagaaaaggtttctgtctgctcccgtcggaacagattcaggccttgtttaggccgtgtttagtagttttggcaaaaaaaaaattaacgtatacatacatatatatatatatatatatatatatatatatatatatatatttaaagtattaaacgtagactaataacgaaacaaattacagatttcgtctgtaaactgcaagataaatctattaattctaattaattcgtcattagtaaatatttattgtagaaccatattgtcaaatcatggtgtaattaggctcagaagattcgtctggcaatttacatgcaaactatgcaattatttttttttgtccatatttaatgctccatgcatgtgttcaaacatttgatgtgacggaaaagttggaagtttgaatggaactaaacacagccttaatttttttttccaaaaacgccacatcgaattttgatcacatgcatagagcattaaatatagatactacctccgtttcaggttataagactttctagcattgcccacatttatatagatgttaatgaatctacacacatatatgtctagattcattaacatatatatgaatgtgggcaatgatagaagtcttataatatgaaacggaggaagtagaaaaaaactaattgcacagtttgtatggaaatcgcgagacgaatcttttgagcctaattaatccatgattagccataaatgttacagtaacccacatgtgctaatgatggattaattacgcttaataaattcgtctcgcgattttcaggcgagttatgaaattagttttttcattcgtgttccaaaaccccttccgacatccggtcaaacatccgatttgacacctaaaaattttcttttcgcgaactaaacagggtctgagaaaataatagaaaaagaagcctctacgtttgctctcatagcctagaaaatcccacattaattggtgaaaaataataaaaaaattaaaaaacaatttgagacaatatcacattaacagcataaaaaaaaagaaaaacaaaaagaatcaatcggacaccctgcttacgtagtaaaatcaggactctttattcaatttggaaacactattttaatttagaaaacaacagtcatacatggtctatcaaagtgaaaccaatcagaaacagaaatagaataatgcatgtatttgtttcatattgtactcactgcattaatggcaaaaaaatacacagacttagcaaccaaagcaaaatacaaatacacaaaacaatcatagctggtacgcgggaaatcatctcgccaaaattagcttcgtcaacaaattagataatagaaaaacaaatcaccacgtttgctctcataacctaaaaattcacacattaattaaaaataaaaaacagagtcatatttttaaaatttatgttattcagataaaaaagtaaaacaaataaaaggtgagtccatataaaaaacaattttcaaaaatatgaaatttggattaaatgtataaaaaataaatattgaaataagagtaaatgtaaaaatataatttataaaaagaaaatctaaaatcggattaaattagaaaataattaatatcgataaaatactccatgtagaaatacagtttatgttgccatttttaatacattttataataaaatataaaaacatatatgctactataatgaaatataaaagaattttataataatactagccgcgcaatctgcgtgggcaaataattattggagtaagcaatgcatgggaacaaggaagatagactgatgttatagtacaactaaacccaccttctttacatcaacatgtgatgcacgtagatattgcgacatgaattacagcacagagacaaattcccccggcaaatagtcttagctggaaggaactggggcggcagtattgcagcttccatccgcgccgtgagaaacaagctgttgtataaactcgtcaatgtacctctcatggagttccttgtcagctacaagctcttgcagcctgatggcgtttgctacaaacaccctcctggtttcttcctcaaccatgacggcccggaccgcggcggcgacgccatggcggtcgaatgacccgtccatgtcatcccgcctcacctgcgatcctaccttgttaccctccatgagccgcgcgttcggcccttggtccccgaagatgggcaacatgatgagagggttcccaaacagaagcccctcgacgagcgagttgcgcccacagtgcgtcaagaaagcgcccaccgcggcgtgcgccagtatggtgatctgcgaaacccaccccatgcaaacatgtccatggctcttcgtcgtttcttggtaaccggaagaaagnacatctgagagatcgacgccatggggctttctcagcgcccacagaaatcgtgtcccggcgagctccagcccgagagccagctcgtgcacctgctccaatggtagaggcacctcgctccccagcgccacgtacaccaccgacttcgccggctgcacgtccagccaccgcatcgtcgagttgtccgtcatgccggcgcgacggcggcctccgtcgggcgacggtggcacgaggccgagggggatgagcggcttgttcttcaggcccgccgccacctgctggaaggcgtcgggctcccactccgggcagctccgcatggccgccagcgtgcacctctccatcgccaaggagcagcgcttcgcgacggacatgcccgacgcgccatggtcgacgaagaagcttgccttctgcgcccactcttaacatggcacgccctcccggcgttcttctaccacgccgagcacttggaagatggaagcgccggctggctccgacgaccgggtggcccatccggccatcatggaggcgctcgggagaagcatcgcgcatggcaccttgtgctggagggcgaccaggggtgcccagtggtggaacgtgtcggcgatgatccaatcaggcctctcgccggcggcgtcgcacgcggcgcccaggaactccgcgaacggcgcggcgagggcgtcgaaggccttccagaggagctcgaacttgccggagggaacgtcgttggtgcactcggtgccgtccgggaggcgcgcgaggttgcgtggcgtggagacgaaggacacgcggtggccacgcgacgccacgcgctccgcgagctcgaggtaagggagcaggtggccgaacgcgagccatgggaagatcacaaggtgcagcctcgacgaggatttggaccggccggtgtccatggcgatgttgccagatacagaggagctaaaccttaatctctcgctgtctcatgaataataaacaccggtagagataagaaatcagcaagaaaccatatgcattagctagttgttctttatataaccagtcttcaaataatgattgattttattggtgaaacaatggtcttacctatcgatcgattttttatgtgaaacaggactcaatagctagtggttcttaaatttttattattttctgtaggtacttgttgacagtgaaatttggtaagcccaaagtcatcatcggcttagagtcaatatcggcttcagagtcctgaaatcagccgatgggagtcgacaaatcgccaacaaccgtgttctcgatggaatcggatcaattaaagggaatttatccagaagagtccgagttcaagaagaatgcggcatggcagtttatctattaattaggaatagtttgttagtttcctttttatttttaggaaagtgtgtttagtgtcctataaggactttatgttttccttttatctttagtaaagtttctttcttgtcccataaggactagtatctacccatgggtataaatatgtacactcggggtcattgtaatctatctctacgatcaacacaattcggcgcatcgccaccctttttacttttacttttgtttctacgttccggtggaacttggcacccgacgcggggctgcatcggtgttcgatctccggctaaggggtaagtccaatgttccatcggcccaggcaattgtcttatctacatcggcgtcgttcaaggctgcatcagtacatttgacctcttggattgcactggtttggatgatatatttgcctacctacttatcatatgtctctgttaatctagtcgtagcatatcgatttagctctatcggctgtctctcgctttagagtttctgccggtatcggctaaatcgcgttgctagattagattagtttagacatctaccaccctgaaaactcagtcaacggcttgattgtctagatattatgtttcttttcatacttagtgctgcatcagttaagtttgatctactaagtcgtgcttagaaccataatccctagcctgcttcttgattgccaataagggtttcatcggggtttcagccggtgagttatctggacgttgcatcggcttgtaaggattgcatatacatacatattggatttagccgatgacaacaaaggtttcactgtttaatctaatcttgtagatttcatggcatcggaccgctagccgatgtgtgctttaaccttcggatcagtgcttgttctactatatcatattgttagccgattggtttctactggatattattgttatattttattaccatcagccgattgcctttatatcattatctacattggacatatagccgattgcttaaaccctatcgctatcggctggtaccggcatcggctattatcggctatcggctggaactgctccatcggcttgtcagccgatcggttgttttgatctactatttacatatcttgtcagtggcaggatcaaactgactggcatgcctgtatctcatcatatttggacctgcactggagctaagcagatctcctaggccgacgtgttcaattttttcgtcaacggtattgcaggtctcgatggttcttaattataatatatatatcgtatgcgtgcaacacatgttgtgaataataaataaataatctcaacccaataaagtctgtttctgccatttcactttcgatagattttaggtctatgtctttcatttttctttcgtaagatcttgcatcaaaatttgtgtttatttagatctaacatgtagttacactagttacagtaaacttactaggttacgttgcaccaaaattagattcttttttttacaactgttttgtttctatatttacgatttttggcatgtttgttcctttttatttcatttaaaacgggttgtatatattggatgaaaattatgtaagatttgaagctccaagtctatcaatctattgataggtagtaccataacagtttacttcggaagatcatcagtggacgacactttctactgatatgaattaagagccatagtgctccaaacaccaacaagtagtagacaagcagctcttttacaacatatgtgggaaaaagaatttatttcttaatttaatttgatagttcgtgtacaacaccattgttattcatgcttggcgcccaattcagggaatgacaaggataagatagaagtgataatttctttttaagttttgaatcgatttatggtatagagttgacacaatttgcttatggcgttaattggtctactaaattttagcggtacagatagatacactagcgaggagggaaggaggattggggaggagagggatgccaggaaggagggagagaggtaggggagaagaggagcactgagagaagagggctgccgagctgggaggagggccagcatgaacgaggggcgctaacatgaattttcttagtccgccactagctacaatatctcagcgccagtaagtttggcgttgagctcttattcaaggtggcgcaaatttgccaagatgtcgaagcgcagtaccactccactgacactgagctctctactgctaaaaacagtgtgcattccctcttttatagcaaagcaaggctagtgcagtggtggaggtcttcagtctcgagacgacggtttgattctgccatccttcatgcttgcttttttttttcccatttcactcaacactttttaatcagtagagtgcctagcgccaatgatattgatgctaaactctgatgatatggtatactcatgccactactagtagagagctcaacacaatggcattggcactaaactccgatgacatcacaaactcgtgccaccttggacaatgtgctcatcttcgatgacattgtaaacttgtgccaccttggacaagagctcagcactaggcattggtattgagatgttatacctcaacacagtggcgaatatagaatataaactatgaagatgcgggtgtaaaaatatagtatgactgaaacaacccagtgtgatcataggtgctccatgataggtgtgttgagctgcattagataatgcaataggattttgatagtattagcactataatgatcataggaaagggaatacatatttctcgaacaatattattacattagctcgttaatttcgaaccaccagctacaaactttcaagaaaaaaaatgtattcatgcttgtccgtatcacatgagaagcgttactccctccgtattttaatgtatgacgctgttaactttttaaccaacgtttgatcattcgttttattcaattttttttgcaaatatgaaaatagttatgtcatgcttaaagaatatttgatggtgaatcaagtcacaataaaataaatgataattatataaattttttgaataagacgaatggttaaacgttggataaaaagtcaacggcgtcatacattaaaatatggaggtagtacattattaatccaaataataggctaaaattggattatttaggtgccaattaagcataggtagttgttgactcctcatcaatctcctcaagaaaagggtaatctgtataaccaacaacgggatcctgtgtataaaaggtagacctgtcatacctgttcaatggtgcgtcaagctcaaacctcctcggcaagtcagggttagccaagaagagcctcccgtaggcgacgagatcggcatagccatcagccaccaccttgttcccttcctcccggtcatacccgccagcagcgatgaaagtgccattgaactgcttcctgaatggcaggagaccatgggtgatcttcctccgtccttcgacgatggccattcctggctccaccatgtggcagtagagaaagcctgggtgcttgttgagttgctgcaccatgtatgagccgagagctaccgggttggagtcgaagcagtccatgtagttgtcgaatggcgataatctgattccaacacggtgcgctcccacctcggcgacgacggcatcgatcacctcgacggcgaagcggcaccggttctcgaggttgccaccgtactcgtcggtgcggtcgttggcgctgtccttcatgaactggtcgaggaggtagccgtgcgcgccatggatctccacgccgtcgaaccccgactcgatggcgttccgcgcggctcgcctgaagtcgtcgacgatctgagggatctcgtctgtccggagccgccggggcttggagtacaccatgcctgaatcgtccggtgtgatctgcttatcggtgctcgagatcggcgcctgtccatttggctggaaatctgtcgatttcatttcgaaatttaattaatcaaccaacgagcacaatttgcaatgacctttgaaaaaaaatcaaccaaccaccagcaagtggacgaacctgtggtggagaccctgccgacgtgccatatctgtaggaagaagagggcgcccttgcggtggacggcgtcgacgatgggtttccacgcttcgatctgctgctgcgtgtagatgccgggggtgtccgggtagccctgcgcggtgggggagatgacagtggcctccgcgatgaggagtccgccgttggtggcgcgctgcgagtagtacaccgcggcgtgcggctgcggcacgtggccgtaggagcggcaccgcgtcagcggcgcgagcaccacccggtgggacagctccagctgccccatcttgtacggcgtcagcagcgggatcgcctctttcgcaggtgcgtgcaccatcttggcctggagtgcgcacgcgatttcgtcaggtatagactggtagccgcttttctgttcccaactgcttcagttagtgcaacaaaccaagaaaaagaaaatctaacaaatgtatgggcattcacctcacgagcgcacacgaggtaacgacggcctggattcctatccgtgcgtgaggttttgattgccacaggaaaacggcagcaacacttcaacaccggcggcgaagacgccatggatgtttggagggagagtagagaggaaggttggggaaagaagacgacagtgcgtgtggtttggggatggatgtgctggccctctctatcaccaacacaagatcctggtactagaaaagatgtactagttattggggcggagctagcaccaaaactaaggtggtgcactaccattgaaaacctataaaacttcaatcgaatactgtgcatttcagtgttttaaagtgagaaatcttggctttaggggagttcctgtgcatcagattagctgaacgtggctgactagtactataccaccaacacgcatgacggggacagcgcgtgtggtttggggatggatatactgccactctatccccaccagctattaggacaggtgtgggtccagttgacatgactatacttaggccgtgtttagtttcaaagttttcctttaaatttctaactttttcatcagatcaaaactttcctaaatacataaacttccaacttttccgtcacaccgtttcaatttcaaccaaactttcaattttggcgtgaactaaacacagtcttacaaaggttacaaaggccgtgtttatacctttgtcacatcgaagatacggacacatagaagtattaaacgtagtctaataacaaaaaaaaatacataatccgtctataaactgcagcaccatattgttaaatatatagcaattaggcttaaaagattcgtatcgcaatttacacgcaatctgtgtaattagtttttatttttatctatatttaatactttatacatgcattcaaacatttgatatgacagggtgaaaaaacttgccagaagatctaatcaggcctaaagaatacggaacacagaaaatgaatgaacggttgcaatagatatggactggtagatgtatgcacgaatctccaagttgagaaaattccatatgtacccttgaaacttcacccaatcccttctattctcctgagatttgtttattttctttcatatccctaagtttcaatttggatcccttctatacccctttcatcagttgactattatttgaccgttaaatttctatcataaagttcatttttctttttggtatcaagaaaatataaatttatgaagtatattgataaagtgtatactgatatgaattaggagccatactgctccaaacaccaaagtagacaagcagctctttttacgacatatgtggcaaaaagaatttatttcataatttaatttgacagttcgtgtataacaccattgttattcatgcttggcgccctttaggaaatgacacaggtagatggaagtgataatttctttttaagttttgaatcgatttatggtatagagttaacataatttgtttatggcgttgatcggtcaactaaattttagcggtacacatagatacgctggggaggagggaaggagggttggggaggagagggatgccaggaaggagggatagagtgtaggggagaagaggggtgctaatagaagagggctgccaagtagggaggagggacgacatggatgaggtccgtacgtcaacagggaagagagagccgcaggtggggatggagcgcgcatgcggcggggcaagcgatcggaatcagaaccgagaaccgagatggatagggagagttgggcggactaatattttgttggaagcagattttattttttaaataggcaaagattgatcctttaaaaaaacttgttttgaaaaaacatcatgataaaaactaattacagaaataggcatctgctttagcaccaacctcaatgacactgagctatagcctgggacgaacccaaggggtgccgggtatgcactacccaaaaattttgaaaaaaaaacactagggtgtggcgtggaatcatggcaaggatggtagcgagaaagcattaaaatagaatcccctcgatgaatagagcacaatggtgatcacagtttgtccggaggtcaaatcaggataagaagaaaggactgaaggaagaaccaagaagaagaatggctaggtagcttagggcatgatggctttcgttggatggtatcactaggagttcaccttactaattcattgtgcatccacgatgtcgtgcagctgtgcgcattaaaataaccgatcagatcaagagtggactgaaactcgatggtaataagaagatgaacctttagagactatacaactatcttaactgacaacgggttgcggcaagggacgaagcatgagtggactgctttttcttcccctgaattttacagatttttcacgaattctgaaccacagtttgattatttttttgaaaaattaaatcaaaatttgccaaaattttgctaccaaaccttgatgttttctttttaaaagatagaggggagtgatccctaatagacacactcaacgtgaatttccttagtcctccactacctgcaatgtctcggcactagtaagtttggagttgagctcttattcaaggtggtacaaatttgccaggaaccaaagtaccactgccactgacattgacctctttattgctaaaaatagtgtgcattccctcttttacagcaaagcaaggctagtgcagtggtggaggtcttcagtcccaagtccatggtttgcttccgtgatccttcatacttgcttttttttttccatttcactcaacactttttaattagtagagtgctcagggccaatgatattgatgctaaactctgatgacatggtatactcgtgccaccactagtagatagctcaacacaatggcattggcactaaactccgatgacatgataaactcgtgccaccttggacaatgtgctcatcttcaatgacattgtaaacttgtgccgtcttagacaagagctcaaagctaagcattggtattgagatgttatagctcaacgcagtggcgaatctagcatataagttaagaagatgctggtgtaaaaatatagtatgactgaaacaacccggtgtgatcatgggtgctctgtgataggtgtgtcgagctacatactctaacacagtaggattagcactataatgatgataggaaaaggaatacatcgatttttttaaaagtaatatgattttaatggaaaatcgcaaaactatagatcagtttgatgaaatcgcaagtttagcaccctatcgaacaatcacggttcgataggggtacctatcgaacaactacaactacagttcgacaggtacatgtcgaactgttttagttcgacagggtagttcgtccaaaaacaaataaaaaagtacatgaacagtatcactacagtgctagacagggacatatcgaactgccaaagttcgagaggggttgcgtgaacagcgcgctatagtgatgctacagtgctcgcaggcacatatcgaactgcctaggttcgatagggtattgtgaacagcgtgctacagtgatttttccttttttaattttttttaatcacctgtcgaactgccgcaggtaccctatcgaattgtagttgttcgataggtatcctgtcgaaccacggttgttcgatagggtgctaaacttgcgatttcatctaaccgacctagacttttacgattttccattaaaatcgtattattttcaaaaaaaaaattcgaatacatctttctcgaacaatatcaatattacattagctcattaatctcgaatcaacagctacaaacttacaacaaaaaaatgtattcatgcttgtccgtatcacatgataagtgttacattattaatccaaataataggctaaaattggattatttaggtgacaattaagcataagtagttcttgactcctcatcaatctcctcaagaaaagggtaatctgtatagccaacaacgggatcctgtgtataaaaggtagacctgtcatacctgttcaatggtgcgtcaagctcaaacctcctcggcaagtcagggttagccaagaagagcctcccataggcgacgagatcggcatagccatcagccaccaccttgttcccttcctcccggtcatacccgccagcagcgatgaaagtgccattgaactgcttcctgaatggtaggaggccatgggcgatcttccttcgtccttcgattatggccattcttggctccaccatgtggcagtagagaaaccctgggtgcttgttgagttgctgcaccatgtatgagccgagagccaccgggtcggagtcgaagcagtccatgaagtcgacgaacggcgataatctgattccgacacggtgagctcccacctcggcgacgacggcgtcgatcacctcgacggcgaagcggcaccggttctcgaggctgccaccgtactcgtcggtgcggtcgttggcgctgtccttcatgaactgctccaggaggtagccgtgcgcgccatgaatctccacgccgtcgaaccccgcctcgatggcgttccgcgcggctcgcctgaagtcgtcgatgatctgagggatctcatccgtccggagccgccggggcttggagtacaccatgcctgaatcgtccggtgtgatctgcttgtcggtgcttgagatcggcgcctgtccattcggctggaaatctgtcgatttcatttggaaatttaatcaatcaaagagcacaatgacctttgattctttcgaatcaatcagtaaccaagtagtaacaactagcaagtaaataatctggcagatggacgaacctgtggtggaggccctgccgacgtgccatagctggcagaagaagagcgcgcccttgcggtggacggcgtcgacgatgggtttccacgcctcgatctgctgctgcgtccagatgccgggggtctccgggtagccctccccggtgggggagacccccgtggcctccgcgatgaggaggccgcccctggtcgcccgctgcgagtagtacaccgccgcgtgcggctgcggcacgttgccgtaggagcggcaccgcgtgagcggcgcgagcaccacacggtgggagagctccagctgccccatcttgtacggcgtcagcagcgggatcgccgccgcagctgccactttcgccggtgcgtgcaccatctttggcttaggagtagctttggttcttctcgatcgaaattgctctgcttctctctctgtttcttgctgctgctgctctgctctgctctgttctttgttgctctacttccatttttgttggtgcctgcctctacttataggtgttggtggtcgccgagacgccaagtgttcccaactgctgttgtcaccctctccgtcatcacaacttgtcgttagaaaaaaggtttccatttgttcccgtgggaacagattcattgcatgtggccgttttttagttcgcgtactcctgtggttctgatcaagacatcgaggtagcaggagtttggtgccgaggacggtgccaatcaacgcgatggtgtgtttggtgtgtacgtttgattctgaattcaaacatgaccctatttgtttatggttccgatttccattgcttgttctagtgcgtgtggattcccggagtgctttgagtaaataaacaacttgtttgtagttactctgtatactactactagtattttacgtttcaatactgacgcggttgacaatgccaggtatttataaaatttaaaacaaccaagttgagataagtaggagtatgattttaaaggaacactctatatctttcgaattgcatgttactgtagtattttgtggttaaatttatcatgtgcccgccaaggataaagtgaaatgtttagctcttaaaacataaagttcgaaatacgtaggattctcaaacactacaaacagaccaaacataaacagaataaggcgaattctggtaagtcaacaaaaggggattgttgcatcgaaagaaagcgacgcgaacgttgggccgcacgcgtgcttacgtcctgcgacgtcattgcaaacgacagcacgttagaaatcagtggctacgcgtttgatactaggccctatttaaatttcaactttttttttcttcaaactttcaacttttccgtcacatcgaactttcctacacgtacaaatgtcaaatttttttgttatatcgttccaatttcttcaaacttctaattttagcgtggaactaaacacagcctagacaccttgatactaagattaaaaatataattaaaaaaacttaaattctaagcatgaatctagatatccctagtatttttatttctttgagacggaggaagtaataacttttagaggaaggctgccgatggatgcagtgcggtctaaaacgcacgaaggctagccggcagggggcgatggtgcagtggacccacatgtcggcagaggttggactgtggtggagcatcggggcgagtggcgggtgaaaacccaacccggcctcagctgggccggcaatgatgacgctcaaagcgtcattcccctcctaagggcattgccgtgccgtctcatccctcatgtgtggatgccgggcaaaagcaaagtcttagttctctttgggaccttgacggacggcggcggcagtgttttccgttgcttctctccttagagatgtcgtttaggtatcccctagccaaaaccccaaaccaattggtgcaagctccctctagatttcatcctcttgtagcggcatcctagtctctacaagttggccacgttggagggcctaggggggagaggtgttctattattctctctcaccctctctcccttactcctaaagacttggatagataagggctttgtgttgattgtaagggttgggttttgggtgatctcggccgtgtttctttgttgacctagcggtagccggtcacgcttagcgacgaccggtccaatgctagccttctccttgttctatgtgttggcactgtcgatgtatgggtgtgatggtatactttttttttctttttcctggttacgaccttctaggtttgtaatcttataatttttcttctgctctatcaatataacttcgcaccgtcttatgtgagtcgttccagaaaaaaaaaacttttagggcccctttgaaacgcataggaaaaacacaggaatagaaaaaacgtaggaattgaagtggcatgttttcctaatcctacaggaatggaaaacacaggatgaagagggtccctttgatagcaccataggaaacaaacaaagcaaaagatagtttccaagaggttgaatctcttgcttattttcctatgaaattgagctataggaatgcaatcctaagaaaaatttcatatactttcctatgaatcaaagggtttgataggaaaaaatccttaggaaattaaatcctccaaaattcctatgcaaatcctccaattcaaaggggcccttagaggaaaatcgaatacctgtacatagctaccaggtacatcattgacagcaattgacgacaattgtcatcaatcccaggctagcaataatcttcagttcttgcagcctgctagatcatgcagctgctctgaccaggctgcttatggcgcaccgccgcgttcaccttgatccggtgcatctccacatgatcccacctctgcaacgaggcgtacatgttggacaggccataggcagcgccgtcgtccaggtccagctccgatatccggtccgccacccactcgcccaccctgacgccgtcctcctccgacgccgacgacaagcggcgggcgtgaagcaggagacacccgagaatcttggcgttcggcctgacgggcatcgcccgcacgacgcgcacggcgtcgccgaggagtccggcgcggcagaggaggtcgaccatgcagccgtagtgctcctcccggggctcgacgccatggaccggcaccatctcggcgaagaacctccggccctccgctaccaggccggagtggctgcacgccgacaggagcgccacgaacgtcaccccgtcgggccggatgatcccgcggcacgttcgactcctcccgaccatgtcgtggaacgccctgacggcgtcctcgccgcggccgttcatgcctagccccgcgatcaccgtgttccagcagaagaggttggggccgtcgggcatggtggcgaagacgtcgagcgcgcggtccacgctcccgcacttgaagtacatgtcgatgagggcgttgcttagcacggcgtcgatccttgtcccgagctgacggatgtagtgatggactcgcgggccaaaggcaaagtcccctgcctgcgtgcacgcggcaccacggtggctatggtgaccgtggtgggcatcatgagcgtctgttgctgcactgtctgcgcatcaaccggcggaacatggcgatggcggtagcggggtcacctcggcgcaaatacccggccatcatcgtgttccatgtgacaacgtccggcgacggggaagaggagaaagagcagcccatacaatcgaaaagctcctgcgcagcgtccattctcccggccttgcagtacccatcgatcatcgtgttccacgacacgacattgctcgccgtcgccccgaggctcgcctcgaacacctccctggcggagccgaggtcgccggccttgcagtaacacgtaaccatggtgttccacgaggcgggggtcctgtccggcatccgctcgaacagctcccgtgcgtcggccatcctccgggacgcgacgagcgcggccagcatggcgttgaacgcgaccgcatccctgcgaggcatttcgtcgaacagcctccgggcgggatccaggaggccgcgcctggcgtagcgggtgagcagtgcggtggccagcaccgcatcgccggcgaggcccagcttgcaggcgaggcagtggagggcctgctcctcgcggcggccgggggcatccgccaccgcgcggatgagggccgcgcgggcgttcgggagcacccgaagctgcatcagatcagataggcggcgcctgtgaacaactcgttgctcctccgaacggctgctcctcggcgccccgagcgctgatggtggtggccttcctcccaacgtggtctccgtccatgggggtgggtgctcgtgtggccgtgcctcaccggctcacccgtagagctcggctttagcagcagacaatgccgcggggtgggctcgtcggggtggagctccaccgccggccgccgggtgcccgggtgtagggagaggaatgagatcccctcctcaggtcaggtgactttacagcatatggttcatgtaaagatggctactatacgtcagtgactcaaagttatcatgtgacttaatatactttaattttgtgctgtcggtataattcacgtatcagtgcgacagctacaaattacataaagttactgcacaaagttaagggacttgtttctgagaaggggatataagaagatttttcttttgggcacatagaagatttggaggtgaagaaagtggaaatgggaagggttaattggaccataccattataaataaatttgctcttttttaaaatatcattagtcccttcgtttcaggttataagactttctagcattacccatattcatatagatgttagtaaatctaggcatacatatatatctagatttattaacatatatatgaatgtggcaatgctagaaagtcttgtaatatgaaacggaggaagtactgtttatctaaccgatatcatatcatcatctacatcggcatccacatccaccaaatagctataccaatatccttggacggattcaaagtgaagcggattacataatatcatatccgttttcatctctgaagcgattggttgaaacgatacaggtagtaaattttatttttacttttaaatataagtaacataattgtattaatccaatacaacacgcaatgtcatacaacaatttgttattccccatcgtttcaaaagaaaaccaacccttttggcctctcaccaaaagcaaaaccaagttattcccttcatctcacaatattactacctaatatataattggatattttctagtacaatgatatattaggtggcaaaattttaaaacagaacagtatactacttataactgtcgtagtggtcgccgttgccatcgcgaccgaacgcgatttgaatcagttggagagcaggaggcggcgcacgtccccgttcgggggtttggccagctggcggcagcaacagatggggtaatattgtcccggcttgcagtacgtggtatacgggtacacgtagcccctcttctggcagtactccgggcatgtcaccgaatcacatggcacgatcgcatggcaccaatcatctgtgcacaaatattcgattaagggtcagaacgtttggttgaaaaaaccgataataaatatacaaagaaaaaaaattcgataaattttgataggaatacaaacacaaaacacagtaagatttaaacagaaatataagtacaagataaaaaaaatacataaataatcttttgaatataatagaccaccagaaagacgagggaatcagaaaaaagaaacagaatcaaagatatgtcccaacaagttgaagttcttgctaattttccactaaaattcttatagaattatctattttataggaattttaaagaagtagatagattcaatccttttcaaaggtctttctaagaattttttatacaattgaaatcatccaagtttcctttttttttttgacaatcaaagggaggctcaatgtatgaattaaattttggaagatattgtgtgtcagaatcatttatatagcatgaaacaccatattttgttatacttttcagatgacaccaaaaatatatggctcatataacacaaaacaccgggttaaaaaaatatttcacaattatttgccaatgcaattcttcacatgataaataacagtatttatatgtatactgtgtccaaagttcttcaaatttgactgtctatatataaaaaataacatctatttatgaacggatggagaattgagttatacgtattgatacttttgtaaattaagatggcagaaactcttttataattaccttgtgcagcacatgaatagaccatggccatgagtaaaagagacgccaaaaacatgaccctgttagtgtccttgatgttgagaaacgccatgatagacagatatggccaggatattggaaattcaaaaaggctggctgaatctctcttgtgttctaagcttttcacttgctcttctattgcaatttggaattgctgctacattgctcagcagagcagtttatatagagaggaaaaggccatcaacaatagaattaaattcgatctatcctaatctttgcttttattgacctcttaaacctatatttgaatggcattaatttgttgctaattaacaaatcaatattttggcttcttgggccgaccattgcattcctaggcctgcaagcttgtaatgggcctacacaaagaggacctggaaccatctgttggaataagttcactcagtgaccctcaaaagtgatcgaaatctaatccgtgaccctaaactacaaaacgggatatctcgacccccaaactcttaaaaccggtgcaatttgactcccttggtggttttggagggcggttttgctgacgtggcgcttacgtggcggtattgaccgggtctcctttacacgtggcgtttagatggcgtttaggtggcatttagaattaaaaatatctgtgggacccatttatcattgacatgcaaaagaattgcaccggttttaagagtttgggggtcgagatatctggttttgtagtttagggtcatggattatatttcgatcacttttgagttttgagggtcactaagtgaacttattccccatctgtttgacaagttaggtaatgtttggtttgagggatatcctaaatagaagatggcaattcagtacatactttcctctttttttaatatagcgcagtaggagcctctcctgctgtttaatcgtcaaaaaaaaaatagaagatggcaattcagtttttttagtgtgtttggttggtgagtgacgccatgatggcctacaaagggaatatcccataaagatgttggatgagcgtattcggccaaattggtcggacgaggatatccaccttgttaatcttaatcttgatcattagtaattgattagcaataattaatgcattgtattgttaattagtaattaactttgtcgaaattagggttaattagaccgaattagtctattttgtttttaattagtatagattatgactatattagtgataattattatatttttagtattaattaatatatcattgttttccttctactccttctcattcatccctttccttgtccttcattcaaccaagcaagaaattgaataaccatatctcactcaaccaaaaaacaaaacagaaccaccgtatcattactttgccatgcaccaaacgcacattaagtgctaatttggaacaaacaatatttgaaggatttgattcccatggaaatttttcggtaatcatgaaatattatctttcccatttccttgcaaaaagaatatatatgatcactataatcgagcacagtacagatctgacatcacattacagtttttttattatttcgtgctgtttcagaaaaagaaactatagtcgagtatattgttgtaacagatctatcgcgccgcgccgttgtctcttcatcgtcggacacgtacgatgaaataatcttgagaatcatttggagagcaggaggcggcgcacgtccccgttgctctgcttgtggcagcaacagctggacacagactcacctggcttgcagtacgcccgcgcgttcttcccgcatagctgcgggcacgttatgttgttgcatggctcagtcggctcacagtagtcctctgcatgaactgatacacatattcaattaaaacttgttgaaaccaatatgtatgtttaaaaagctttttgctccaagatttatatgttcttttcctactgaaaacaagtgtacaaagcccaaccaattgatgagtgagtgttattaccatcattagaaagtattaagttactgtccatatgcatatctttatcattactttcctactatacagatatataaactgctaacaatggttaaaactgtttttcttaaaatatgttaatgtaattgattttcacgacaaaccataatactatcgaatatgtatttgtacacaatggtttagagcttgacccgatttttttatatataataattaataaccccgtaattaaatatctggtaattgcgtgcaagtaattagcaaagtaggatggacgttgtttttgttagcgtccagatgtggacgctattctctagagcgtgtaggtctgaacgctattctctagatcgtgcaggtctgaacgttattgtgaacagcgtccaccatacgggtgcagtcgaaccgtgccaaaccggcccaaacatatccacctaaaaccaatcggcgccgaaataactgccgttctctagcgaccgcatcctggcctcctcggcaatccctcatcgccaccggcgggcagcaaaggcggcgcagtattcgtcaccaatcgcacgcgactagctgacaacacgccttgccacgaaagactccatcagcatcgcctttgcttgtgcggctgaccagctgtgccgccggcagctagcacacactagagattcatcacgcgagtacgtattcaatttcatctccattgatcatattgttgaacatatatttgcattaaatttcttccaatcacaagttttccctcgtacgtgcttgacttttcgcagcctacggagatcggcctctccatgtggatgaggtagtggaatcatttgttttctttcaaattgtctcattaccctattgggataatggaactccactacccagccttcatctttgcaattgaaagaaatccaatattttctagagctgattggtaaagtgggtggtaaggaattccatggtgatgatgccatatattcatggaaccactaggctgtatgcatgaaaacatagaacaattacttaaggagattaacatgaatagatgagaaaaaaaacagatttcaacaggtacggcaaactgaaaaaatacccagattttcttcaatggtagatatttagtgctggccatgaggcaccatagtaaatcatgaactgatcacgctatcagcatttttttataagctgtaatcaatgtgaattgctgagaatttatattaccaatgcaaagatatggtgaatgtaaaaatgtaatgagcaattcagtattttggaaacaactcccatgacaaatctaatataactaattatgtatttctttaatccacattatcacaacaatcaagcatactaacaagatggacatatataggatggtataatcacacatgtattacggaaagaactgactatgcatgcaaacaaacggcacttacactacacgtggaggcgtacggcggaggagaccacctgggaacgggatgtgtgggcaagtggcagtgccggcgaaccaccacaagcgtctgaggcaggcggcgttggtggacgggcgggcgtcgccctcgcgcgtggaggagagcagcggcagcggagctgccgagaacgagggctgcgacggccggcaccttcgtgcgattggacgcgcagcggtggcggatggatgggcgacgttgttccgcgcatggaggactttccaggcagtggcgtcgccaagaacggttcctcttcccgtttttcttttttttttccctttttcattttgcttatgttcgtactgggaccgccggaccgacctaggcgaccggtcatatgctggacgtagttagccagagcgtccagctctggacgattttacaaacagcgtccacatctggacgctttattcttcagcgtccatcctattattaaaaatcccaactttgatttaccagatatttaattatggggttattaattattatattaaaaaattcgggagcttgactacatgcattctacaataacatctattctcagaaagaaagagtagcccttgtgtatatgcttttataaagatgataataaaatgcttataattaccttgtgcacaacacaaataaatcatagccacgactacaaaaatggccaacaacatagccctttttacacccttgacacttagaaactccatgatcgagatatgtggctagggatattggaaattaaaaaggctagcaagctatagctattccttaactgattctactctctttgctcttatactgcgatggaactgttgttgcagtggtaaacagtgtagcttatatatagagagagagaggggaagcggccgtcagtaatcaaaccaaatcaaatctatgagatctcttcaaaaatacaatccatgcaaatcttgctttttattgacctctcaaaaaaaatctcacatttgaatgccattaatttgatactaataaaaaaagattctagtctcttgggccaattccaaaataaaacaatttctacctatgaatctgaaaaagctgttcaaattcatacgtaaaaatagtttcattttgttcatattcgtatttagaaataactttatttaggatccatttgcgtttacttggcacttttaaccaaaatttaaataaaatattgccaaattcattaaaaataattaaaatttgaaaatttcggccaaaataatatcatttcggggagtctgatagaacgaaaatttcctgcgtgcaactgacttcttacttttcagtgtttatggggttttgctgcccagtgggcatggtagaggcgtagagctagactgctagagcatagagcatagagttaatctccaattgtggctagagaaggagtattttgatatgtggatcatagctaaagaaagtgcgttgaaggatacccgtgacagtgagacaaagcgactgcatatatacaaaaatcaacacacgccacgaacatgcgcagtacaattaatccctcgatcgtttatttcaaccgaatgacccatacaaatacaccacacgcaacgcaacacaattagacatatagtatatattgcaattaataacttacaatattatcaaagcacaatgatgttctgatatcgaaccagaactcccagaaggtggcatgcagaagaagaagaagatcgacgtaggctagcagccgcaccatggccggcggcgaccaacccaacatctcggtggcggcggccggcggccggcggcggagaggggtgggcgggggccgggtcagtcgtcgcggcaggcggagctcttgggcttgacgatgaacttcatctggcccatggtgcagtggatgccgccgcgctcgccgcagacgaagtagtggggcttgcgcttccggaggacgaactcgtagcccgacccggcgccctgcatcacgttggccaccagcttcgccgccttgaggttgcacgactggtagtccgccgcgttccgcatcatgtacacgctgtgcgcgtgcgtcgtcgcgttcggcgggtcgtacatgaacactgccagtgccaccccccataccattgttcatatatatatacttattaatttcaccaacatttttttttaaaaaaaatattagactcaatcaaggttcaccgtgttactccatccctccgttccaaaatattagcatttataagttgtttagcaatagaaaatagccaaatatactaaggttaagggagaaaaaagttcttttcagtcatctctggttaaattcggaattccttatatttttccccatatatctgattggttaaaatttgtatggatttttatgtattcggatcagtgttatagaaatggtcataatacggtgtaaattttaaatcctagaaatacttatattttaaaacagagcgagtaaatatcattgtataataataattcaaacatgtaaaagcattatttacggcatacatactagttgtgatggagtgtgagatgcaggggcggagctagtatatattaggggagtgcccaggaacccggttaagaaaattttttagctatacctcatctatttttatcatgtatgcaccccctcaatacaaacttaggcacccacataagcttaaactcgatctaaagtagagtaaattaagcaactagcaccacccttcatttcgctctagctccgtccctggtgagatgttacgtaccaaggctgtcgttttggaagaaggggcccttcttgatgacccagtcggtgtagttgtaaccccacgtccaccgcgccgcgtcgccgacaacgaaccgctcggcgcgcgccgccgccggcaccagcaccagcatcgccaacaccgctgccaccaccagcgttgcactgctaatcctcccctccatcgatcccaacgaaatcctcactctaattaaccaacaaattctcttcagtctccggcaaagctagcttagctaattaattaactggatgaatggatggagatgcttgtgatgagcaatgacatggcgatcgagatcgagcatgctggtataaataggatagccaagctgcaggtagctttggggacgtaatgatgtcgcaaagttgacccacacccagtttaaacctgggcgaaacatcgggaaatttaaattaaagaaaattcgtgtgaaactgatgtgccatgccgtggattctgcatcacacgatttggttgggacgtaattttcaggtaaagcagcactcgatatggagctcgcgttctggattggtcatcgatcaagtgccccattagcgagcgtgcttagtggcctcgtaaaaatttggagacacgggggttggtgagcaaactgaccatttcactggtctaatctctagttgcttccattttgcagtggtgttcagccattagctaggagcttagctagccatgattttttttttattcccctctcgagttcctttcgttgattagccaatagccaccatgtcagcatgattactgtagaggattagggcggtgataggagatgattaattaagcaggcgtgtgtgattaaacgacagtgtatgtatatacgcctgcttcatgatcacgtcatgctgatatggactacgggagtcgacaggagtggattagtggatgttgcgtcgagtaagcatcacttcgattattacactggtcgatcgatcgtgaattactccacggttctccgaccaccgtcaaacgccggagctgtattaaccggcaaccacacgtaatttaaggtcagcttgtggtcaagtctggcctaattttgtcggaaaatcgcttagcttagaatacttaaatatgcctagcttctcctgtgcatttagctttgggatgcagacacagatttcgcctgtaatgcgtgcacgccgctgcaacataaaatcgaccgaaattcaacggaagatcttgcttgcagatggctactagtataactgtttgcgcacatgcacagatgcagccgatccatcgatcccggtagtagtatatgcgtaacagcgtgtatgcgtcatcgataccaaagggtagcagagcatcatgagcagaggcctctgtattcgagtgttgtggcatgtgaaggttcagacttctactgtgctgtattatacaatgctactgttcataggtgcccactgaggcactgaccaagtgaccagtagtccagtacgtagcttggaagacaagattaaaagatgagcggcttaatgatcacgaactcatggtgtacattaattcgaccggccggccattgcgaaagctgtggcagagagtatacgcaaaccacaaggctggggctgggcattttctttgcttgagtggatcatgtccttatggaggatgattgggatgcaatgagtgtttgggcagttggatttaacaaattgagtgtatatgacttaaacagagttaagtcaaattgatgtcctaataatcgaatgtacctccacaccaatactaccatgaatgaaattttatagaaatttgaactaaatatgtgaaacaagctcatgtcttccaaaggaagactacaaagcggaagttgccgaaatagaacagacacgtgaactttccaccggaaccgctattctcttaccggcgcgtgacgctcacgccaccaaggcactcacgggggaaggctaaaacaaagggctgcagga

SEQ ID NO: 8400 - DNA, 11250 bp, Oryza sativa
tcactgccaagcaaataaattgctattgctaaagttgcaaaggggttaatgggttatggaaccaacgaatttaatcactgtgattgtgaagaaaaggctcgggaacaataataaatacaagtagctggccgagctaagaacaccttccataccaaagataacattttttgcttaaataagacaattgtacatcgtggatatgaactatgctagaccatctagttgaaaccactcaaggaaataatccacacagcaaatactgtaagactaacatgaacattttttttagagcaatactgacagaaatcatgatgtaacatctcggtagaatagtattgattccatcttctggcgttcagtattagagtcaattaaaaatgtgaatatgcatgcctaaagaaagagcaagatatggtaggtactgcttcacaatgttacatttgtataatcttctcatgcaaatatgtttgaattcctacaaacatacaggcataataaataaataaataaataaacaaacatattacaaacatataacggctttctcactcaagtaacaaataaatatgcaacatgtttcagataatcagacaaaattaacaagcaacatgacaccttttggagaccatttaggctcagttggggactccactaacattggattgctaccagcaacacagacccgtttggtcaagtctctacaaacaaagaatcatgggtgcttaatcataaaaagctaacagttgaaaaaaaaatcagaaacaggtcgaaaatggactagcataaggtagacagactgcaacactagagattacaacagaaaataaatccaaaagtttttagtattatgagatattcctctgtagtcagactaacttctttatatatatattccatgcattagagatagggttccttagggacactcaaagtttattaaagtgtaccatcaaatgattcctgtagaagggctagcatgtattatgaaccaagaaaaagataatggatccatctaaatttctgtcatcccgaatgtaacatttgttttgtttatattacctgattggaagaaaaaggcagcatgttctaatatgcatttctaaagataatgttgcttacccgctttcagagaagtagccaacccaaagttctgacttatcccagggcatatttggatgactccactctatccatgccatacgcttgttattatggtcaatacgaggaaaagcatagaagtcattgccactaatcagcacctttggttcttcaatacagaaaaaaaaagtaagaattcttacaaaaaaagcagatatgagaaaattacaagcaacacgcacacatagatttaactttgtgaaagttataaacatttcgtatagtcttaccctgaacaaccccattactcaagcttatagctgcgattgttgtggtgggattcaagctactctttcgacggtctatcaagaaatttgagcatgtcagaagttcagtatgcaactatagtttgtaataaaatcatatgccaattaaccttctatcacggtaacataacggctgaagtgaggatcaaagactccatcagcataactgacatcaggcccaccataatcgggtgtaagaggcacaggcacaccagctgacaagggaaaatcatcatgtgaaatatttcagcagaaaaaaatatcattatttaatatgcatattgatcatcaagcattaagtggttctaaatatttaacagctgaatagtgtgattagatttcctttttaatcctgtcaaacacaacctatcatttcactggctgtcatttcattataaacgcaagtcttttcgcttgttaagacatgctccaccaattctacttatttgaatgagcatgctatacagtaacctataaatgcatatacacaatgaaatatttttcaatgaagtactagacaaagaattaccataagtaaggaaagtaaaaacacatccttccaactaaattatatttctttattgacatgctaattcagttaggttcacctaactccttagtcctacaaccatagcaaatgactcacttttagtactttgcttgtacagacgttgatccttgtagtttgagaacacaacaacattatctttgactgaaaatgcaccacctccatattcttgagctagagtacgtgctgcaaattcttgaggtatgatatccacaggcttatcatcctccttgactataaccatacgcctgtgtccaatatggttgaagataaattaattccgagtgacacagcataacagggaactattaaaagttgaacatgacatggtacactaataacagacattaacaaacttaacacagttattgcaaccatcaattatttaattgcacactgctagaaattcatggaattagcaattgccaggcagaaagaatttattatattacattaatcttctggcatcatgttgtctctagtgcagtaatgcacacacagcaaatgcatataaaatacattctgggtttctcaaatttgcatattcaatcaactctaattgtcaaagcccataagccaatcattcatttgaccatgtattctagtgcaaagctgtaacttgctttcatttatatgcagaaaaatcataccagtaatctgctgagaaactaaaattccaataattaaaaaaaaaaacatagtgaaacgaaatcacattattccttccagtttctatgatacaatctccacgcaaatatgtgccaacatgctactaaaacaattccagaatctagatacgcacacttactaagaaactagtaacaaacatcacaacagctcgagaccaacaatcacaatagctcgaggccaccaagacacaaaagagaatcagaatcttcatgtgccttaacgtataattaaggcaccatacaaactttcgtaaaaaaaagtgtagtagtagctgccaatgctattaccaaaatatttggaggaaaaaaattatttataactgttataagctcaggaacggcggttactggttaacttaccctttctcctcgggccggccctcgatccagaggaggcgcccgtcaccggcgagggcgatccctcccagccgcttgtcggcgccggagacaacatcggcggtgatgggcgacctccaggatccgtacggcgccgccacgggcttctcgccggtaccgccaccgtcggcggcggcagcggcgggggaggccgcggtggtggaggaggaggaggaggacatgcggggcgccgacgcgagcgggcggcggaggcggatgcggggcagcgcgcggaggaggtgggaggcggaggcggagaggcgtgcgggtgagatggaggcgagaagtgtcgccatttgtgaggactgctttttataagaggttttgtggggtttttgcggtttatagaacagtggaggatacgctccattgttccactctagcattcgcagcgagatccgctattgcgctttgttaaatttttttagttgttcatttttattgcgctttgttaaattttcttagttgttcatttttagtgcatttgatcaatgctactcaatttgtttctaaagaaatatatcaacacaatggatgcctcgctatcaacaatacatcacctatcatcgaaagaataatatattataaatataagcatctatgataagtctagagcttaatccgaatagataggttgcaccataaaaaactaccagctacgctcacttcgcaatgttactcaaccattactctgtttcgaatcatatcatcctacacagaagtacttgaaatatgcttcatgaaaacccttaaccccagccaaaatagcaaataggcgaaggcctctttcggaatgctgaaattttccccaattcctactagaattataccaaatttcgtaaaagtcatataaaattcctgcaaatgtgctacaatgtgaaaacgtgggagaaattctagctaacggaagcatttattccattatattgaccagagtcgtatgcaaagcttcaagagattatttcaaactacagctaggacagcgttgctccagagttccctcgagttgttcccagaagttgattaggtgacgaataacttcttaacgcttacaaggagggttcatcaaaattgtcgatcttgattggagtgatgccatcagccaccttgaagtgccccactaatctagcgaagaacaccatctgctgctccaaggtaaacttgatgttctcggcctgctccagaaatgcaagtcagatatgtgcctatgtaaaattgtctatttactggtctaaaagtttcatatactgaaaaataatatatacagttagccttcaatccttcatggtaaaaaaaaaaaaaacaattcggtaggaaatactcaacctgatacattactaactaatatataagtttggtgttgcaaagataaagacaagaggtactcgtcagaccttgcggaaaccatgttgttccccttcatactcgaccaaagcaacaggaaggcctttgtcctttatggccttatatatcgtcgttgcctgaactggtgacacaacctgaagatcatcaaagaggtgaaaagctggtaaggagaaacagaatgtgggaaatgcacccgctgctaagtcactcttagccgattttcgttccctctgttctgggttaacagattacatttgatttatcgataggtaactctatctgtaagtgcacttcctagccatatacatattgatcatgggacacgaggactaaagtgcatcagtgataattaaatacccttcatttttgtttatatgatgttattgctttttgtaactttgtactagtacagaccgattatattataatgatttggaagtttctttaaagacaaatcagccaaataggtttcatactgaataattatagatagctttgaatatactggtagtaaaaaattagaactcataactgcattcaaacaaaaatgacccgagggagaagttcagatcttatagctttaccgtgtcttccaatccttgaaacaatataattggacatgaaaatctatcaacgaagtttatcggtgatctctcaaagtaagcctttctattccctggaatattgaaggtatggcaagtaatgttgttaaccaaaccctgagcatatacatacgcctattttccagcatagatgagtgcaaaattccttaccaacaaggttgtcaatgtagtatgcctcaaacttgtgcatgcctgccctcaacgaagctaagtcagcaatctgctttggaccgaagcataacaccagatgcatcaaaatctcagcagatagatagtttcagcaaaagagagaatttatggaaatctgagacttgccccatataaagaagaaccagccttgaatatctgtctaaaagcaaggcaagctaaagttgtgaatccaccagcagattctcctgttacacaaagccgttgcgcatctactcttccagtttccaccttaataatcagaatgacactagcataaatgcttacaacctccacacgaaaatatgaaaaaggtctgtgtctgataagatataccaaaaatgtagcacaactgcagcaatcatttacatcaacgacgccccactgccctaaaagcctctcccgaaattttctcccatagcctttaagaccgtgaagaaatatcaagaaactagtccgtatcaaacaccaaaatctttgatgctaaacagatagtatatgtaaataagagcattgtaattcgtcagaaaaaataattcatacatcaaacatccaaataaaacaaatgcaagttctttatcagatatattagagtcaagaaagagctgaagacctgtgcttcccccatagttaacatcaacaaatgcccatcctcggcttgtccagtactgaacaccaagatccagaactccacgtgcttcatctgtaggtccacctaaagaattgcaacaatgtcaatacgagtttccatttcctttctttaaaaaaaagtacatttccttattttaatgttctgctttcccttagcaattcaaaaggcttgtcagtcaagtcagtcaggacttaggaccaatgagagctctgtgatcttttatcatcactacaaaacattcttcaaacaaaaacaactgaaataaaagagaaacaaagtgctgctctatatcactaacaaaattgaatgagaaaaaccaacatcatgtttcctaataacttctgctacaagtgtgaccagtaaagacaaaaagaataaaataggctattgaagtcaacgaaatatcatataactaattaccatgggttctgaccaataacggaggtttctcatctgacgacccttggaaaatatgattgtgcggggcatagaaataagcataagccttctggccggggactacagttggaaactccataaattcaggcaaactaaagtaggacgcatattgcataacatcctctgaagaggaccagactatagagaaattagttgctgtttttctcttttcatccagtgtcacctggtgcaaaaacagaggtcaaagggttgcactatattgaaggaattcagtttgaatagttggcatgtgacaaccaataaggtagtcgaatgaaccttagcaatcgacactggaagagtagcagatgcaccctcaacatagaagaacccatccccagaaacctagaaaatcaggaggatttgagttaaaagcatcagcattccaacaaatttaaggcactgacgagtgagatccaaatgttataaccagcaaactacaattagttctgaagttgactcatcgcatttcatacacatactatgttagttacagaagagaagggaatgtccagttctgaaaaagaccctgaatcatggtctagcactccagcacatgaccttccattctgcctggataagattcaaagttatgaattacacacagtaaaccaacacttgagtatgggaaaacatgaaaaaacctgtaacagcaaacgattttgttactcgtgtcatcttttccaaggaaaccataggagctgacaccaaaaatccacattggctttgagaattcagcatcaagtgaatacagttgcactatcaaattgctctcctcatcctgttgtaaatgaatagcacgtaaatgccaagtaagaggacaaatcgcactattttcagtatctttagcaacataattttagccatcatggttaggatggactcttttctttttgtttttagtgatgataaatgtttccctcattctaaaaaattagcagttagtggtaggatatcaacatgaatattacgctgccccatataatggagacgccaacataatatctcaataataaaatggtttatcacaagttcacaactcttcctactgaaagaagcatatcaaatataaacagaatataacttcttgtatgagaaattagactgggaagtaggcacaagtaataaagacagaacacattagcgctgagagggttgcagcggatataaggtccggtatgcaccacaccatacttcaatcaagtagtttgcaaaatcagatcaacgggcaactgaataaaaataattagttcagggaagatcatacccatttataaatattccaaaacccactctctcggtcagttatgaagaacagctcccctgaagaaaattgattgaattaagtgatattttggaaatatatttgcacctatcttttggagaaatgaaaacctacagaatgattctgacatgccaaagattcataatccatgcagagaagaatggtatagctacaaggatgaaagagcatgtcttgaacacataaaaaacttaaaataatataaactgggtatgaaaatgctaacaccttttgaagtccacttgggttcagtaggagattctactaacgttgggtcaccaccagcaatgcaaatcttgttgtgtacctctctgcatgttatgaatacgtaataaatatgtaggcttggaatatatcattcaacattcgcacgtcaacaagcaacccaaacatagtttattttaggaaaaaggatggaataatgaatatatcttattgaattgactatttgccgtgaactagagactacaagatcagtgtgttctcaaatatggactagtgcagtaatgctgaagattagtaatatgcacaactccatgttccttcacatgaatacaaagataaagatctaaaatatcattcagtattttcaaagcaaaaaaggtaatccagtagtagatagagtagtacctctttctttatgaaaactagttgagaacagaaagcatgcaagtaagaaattaccctttctcagagaaatatccaacccataattgcgctttatcccatgacatgtttgggttactccattcaatccatgccatacgccttttaattggatcaatgcgtggaaaagcataaaaatcgttgccactgaccagcacagttggttctgagcaaaaacaaaaaggttgagaagtttcaataaaaagttagtgtaacaggtatagttcaaaagaagcttaccattagcatctctgtcacttattgttacagcagcaattgttgtcacgggatttgagctatcctttcggtgatctgagtttaaattggaacttccttaaaaaggtaacaatggaaagcatacctactagaatgctaaatgtgaaataaaatactaataaccttccattatagtacataacgacagaagtgaggatcaaagacaccatccgcgtaacggagcactgatccagtgtaatctggggtcagaggttgtgctgagttatctgaaatcaacaaggaaaagatttttgaaatatattagttaccagatactctttgaaggagcactccatatggcgccttttttagcaatgatgactagtgacttaaagactaaaaagatacatcgaataaaccttttgaaaatcaaagcggcattactattcaaagaaaaaaaaataaagataggctagtttcttctcattttcttttctctaaagcatggagatctcaattatgtaaacaatttgcccatgcatttggtcatctgggtcccaatttccatgatgcatcccaaattaatggcagacgaaagcttaactacatttcaactaaattttcagcggtgcctcacgaattgcagacattagacctgctcaggttttccactcaatcgtaccatttctgatccattttcctcaaagctactacccctctgtctcaaaatatagcaacctagcgttggataggatataacatagtaaatctggacaaagccagtattaggttgatatattttgagacggaggtagtccatcataggctgcgtgggcaatgtaccaacctacaaggctacaactgagaaccggtgcagtccttgtgaaacagcagaagaacagcaactgcaccagacctggtccgttgacttccattcgaaggcctaagacttggtgcaatgcgagctcgagtagtcgagttcaccaactattatccacagtaaagagtacggtatgctgcaatggcgcggcttgttcggtgtacctccaatggtctgcttgtaaaggcgctggtcgctgtagttggagaagaccaccacatccccttgcaccgcgaacgccccgccgccgtactcctgcgccagggacctcaccgcgaacccctccggcgtcacatccacggcatcgccgcccggctccgccgcttccttcactaggaccgctcgtctgaagaagaagaaaaaatgcagcatcaggagagcaatctgaccacgcgagaagggggtggatggcgtcggcgcgcgtcgcgtaccctccctcctcggggcgcgtctcgacccagaggagtcggccgtcgccggcgacggcgagcccctcgacggtcctcccggcggcggagacggcggcggcgctgatcggcgactcccatgacccgtacggcgccaccaccgccttctcggccgcggcggaagcctgcgagtgcatcgcgacagggcgtgcgtgcgcgcgcgtggcggctgccgggagttgcggggtggaggagagcagaggtgaggtgagcggcgttgctgtcaagaccgcgggtaaactccactactcttctagtcttctgtacctcaccgccaccggctcatcggtccaactcgggtatcattaagaacttaagaatgaataggatactgataaatttctgtattactagaacagtacttcggtaacaacgactcctatcggatggcctaataagaaaaaaaaaggcaaattttgaattttcaaacttaattttgagattattttaagatattttcaacgtgatttctttttaagcattggcttttaagtcaccgagaacacgtatataaaagttttacctacaaatacaattttattcactaataagccgttttggcttattaaaaaaaaagcgaaacgatggaggccacgctaggcctcctcgattgggaatttgggatccagtgaagttagagaagctcggtggtacgactttgaggtattctcagccgtccgatcgacagcgaacggacaagactaatctctacagtgcaccataaacagtatattgacagtatacttaggccctctttatttaggcttataagccaacttataagttgaaaagtctaagccaaaacaaacaagcagcttttttatttggcttttttaagccataagccactataacactattaagccaaaagctaggttggagaagcttttttagcttatatgagatagatgtatgactccaccactaaacttaggacattaaatccattggcttataaatcatataagccaataagctgacttaaaagtctaggccgataagcctaagcctaaacaaagagggccttaacactttctacagtaaaaactgcatatcactgttcttaacgagaaagcggacaatatgccactctataggttgtgttaagataaaatgccactcaatacaatgcaccagataaaatgccacccaatacgttgcctaccggatgaaatgccactttaaagatttttgtgcccaaaatgtccctgagagagaggaagaggggagcgctggggagggctggacggggaggggagaggggagcgccggggagcactgcggagccctcgccgcctaggcactgctgctcgccgcgccggcctcctccccctgcccccgccgttgccgcttccc

SEQ ID NO: 8401 - DNA, 12249 bp, Oryza sativa
acacattcttggtctcctttcttacaaaaaaaaaaaaagcttacttgtgtcccccagaaaaacgtgagtacagccacttggtgcacaagaatttttccttttcttaaaaaaaactaggaatatagcccgcgcacatgcgcgggcatctttaatgtgtttgaaattttattacgaatgcttacgcgtagttggctttttttttattgaaataccctttgtactttcaaacttatttgggatttctattaatgttggttatgattttattctagttacgcttgcaacataaaaatttgttaactaaaattgtgtgaaagcatgccgttttgaatttataagaaaatattgtgtcatcaccatgaagtttctatgaaactatatattgtactatgggtatttctatactttaagtaataattgcttttatactatctatttctttttggattttaggataaagtaatttaagatttctattaaacatatagctaatagaactatgtcatataattaaagatagatttatacttcgtcgcataaatccgagaaagttaaattttgtttcaaaatataagggattttagagtagtattacttgtcctatccaaaaaactataatttataatttattgtttacccaatcttaccctaaccaccttcccaccctccacgtctcttttaattaataaggggtatcatggtctttttttttcttcctcattagctataaccctaaggcaaattttgttataggacactgcgatttcgtggttttagctgtaggataccgtccgaactcacttttagaggaagacactccataaacgtggtaatttaccaatgtacaccgcgccgattagaataataatttccggttgaagaggagagagaaatcacgtgaaatgtcaaaaatgcccttaggcccacatgtcagctctcctatctgtcctctctctatcccctccttccagcgtctgatgcgcggcgtcgggtagtcgtggtggcggagaacgatgctgactccgcgatggcgacggcggacactacgggctttcatgcttcctcctcctacaggacctcgagcgccgctaggatgtcgagcccgaccccgcccgcatcacggtggcgccacccgccgctgcgcggcgacgacgccgcgtgaagtgccgcgtggtcgaacgggcttgtcggcgacggaagatcgccgctgtcatactattgctgttgcggctaccacggcgagcagcgggcgacggagacgtcgagcttgccttctccaccatgggtgagacacgtagagagagaggaggagatcccattgaccggccgcttggtgaactccgcggcgttgaggatgatggtagggacggggtcggtggcagcggaggcgggaaggcgagggccggcggcagtaacggacggtggtcatggcatcccaccgccggatttccgccgcatcccggagttccgcagccagaactcacccgtgctgtctcgccatcgctgtcgctccgaccctcgcccccgtgtcgccgcaaccgctccactccgcgcatcagacgttggaatgaggggatagagagagagagagacatgagagaaatgagagctgacatgtgggctcaagacatttttgatattttacgtgatttctctcttctcttcaaccggaaattattattctaatcgacacggtgtccattggcaaattaccacgtttatagagtgtcttcctccaaaagtgagttcgggtggtgtcctaccgctaaaaccacgaaatcacagtgtcatgagcaaaatttgcctaaccctaaataccttaagatggttctttactacctgtgaaatacatcttgatgtttttttctaatttattaacacacttggatgattgttttttaatctaaatgcttatctataatgtagatagctacgaataacgtgaccacttgtataacgataaattacacgttgaatgttgtgccttcgtaaataaaattttcaataatttctcttattgattatatgctttaatatatcaataaatacgtaggttatatgctacatagattagtcatattttttaaattatatgtagggtgtgtattattgatgttttttaatttatgttttttcatattgcagtatacatatatattttttgatttaaagaaaagtcatgaggatgtagttttcaattattttgttccatgagattgtacacctaatttacttatttgtgtttatgaataacttattatattgccatgtggaaacataggaatgtctataggagttccacgtgactgtttgagagcgttttaggaagtttaatggacttttattgtataataatagatagatatatagatttttaagatttgtccgatttttaagagcgtcacgcgtgatggtgtaggagtgttttactttttgtatataatataatatatagattataatcaggttgttatctaatgtttgattttattctcatattaaattttgctaggtataaaattaaaaactaaaaagaatgagaagatatgagatggagggaggggtggacggacaaatgtacgtatgtacactacgtacatgagggggatcagaggatgcctgggagggtaggggtggatatttttaaatctaacagtgaaaaataatgggtctaccgtattaagtgaaaatcaagggtatgatgttttgctttttttttctcagaatttttttgatttctctaatttattagaacgccaagtggaggcttaggagcgtttgtaggaagttttatggacttttagtatataatagatgaagtactacgtaagagataaatgttgcgcaacaaactatagtgatctaatttatgtatatgatagaaacaaccataacatcacatgaatacactcgtaaatgtgtcttgtgtctcttaaagtttaaaagacgaagaccagcgatacatcatttgcctccctaaaaccctatttataaccggagatagtacaattacataggagggatgcaatttagctagccctaattagccaccccaagtacaagtgctcaccacctcctttctactccctccgtcctataatataagggattttaagtttttacttacaatgtttaatcactcgtcttattaaaaaaatttgtgcaaatataaaaaaaaagttgtacttaaagtactttagataataaagtaagtcagaaataaaataaataataattctaatttttttgaataagacaaatagttaaacaatacaagaaaaaattaaaatcccttatattatgggacggaggggagtactactatcaaacatgaccatgaccatttactaatagtctagccctaaggccctgtgagtctgtgatgtgttgggcaccaccaaccattgccatgatttattcctcttctttctttctctaactttaattttatttattcttcttgtgaggcccaagcggccaagccgggagcccgggagtgtgcagcagtagactagttagtagctgttccacggtcccgaccgccgcacgcttagtttgaccggagccgtccacccgtgaatgtgatccatccggttccacggccaactttcccggtcaaacacgacgtgacgttccccgtaatcccccacacgatccacgggagaaacgcccaccaaacaaccacaaattcttccagaaaaaaaataaacgaggagcagtgacgttctcgcgaccatcatccgaacgtgccaagcatcttctctcaaacaaaatcgtgtcttaaaaagttaaattaaactacttttatactgagccgtttatttactgtgcgacaatgcgatattatattatcgtaatcctagtcgtgatcgcgatcctgacacgaacaaaaaaacgggccgtgtctaggattgtgacgctgacgacgttttgccaagggcgacaccagtaacagcactgtactagcagcggctatcagctcacatgggcatggccgctcgctccgttcaacgccggggaccgttcgtttcaactgcttctgccttgccgaccgccagtgacgaagcggaggtccgctgaaacaggttggcagttggtggcaactctgctgcagaattatttgcagcatgacaggtgaagttctaggcatctagctgcaagtcgtattccctttgtctaaaaaaaaaaatctagaacttaatatgacaacgaatctgaatagaattatatccagattcataatattacgatgtgatttttcatggaacagagggtgtatcacataaaagagcagttaatcatagctcgatatctgcagtactaggggtagttgctattggtgatcatcttgattaccacttcggagctttcgaggcttcaaacataggaggcatggtaaagatattctttttcctgtaaagttgatcgcaaaggtcgtcatttctacagtgtatccagtgtgaaagagcaaaagaaatgctgacgaatgtatagtactttacatgtttcacagataacagtttcaggaaagggaatttatccaattcaggatattgttggtaccagagatattgtacactacagacatgcttccctgatgcagaagacgctcttgaagacacccaacgctaataatctcgcaaatcttcttttacagaacaatccatccattagcatttcttatggggaggccccttagtacgatctgtatagtcccattaagggcttctccctatcctccattctttttcttgctgcttcacgcgctttaagggcggcttcctcctcctttgagatcactttgggcttgccgtcctctctttttctcttgttaacagcaatggcggatggagcaccctttacagttctcatcggattcagtggtttcttgacgaccaaacctggagcttggccccctttaattgtggggacagtcgcaactgaagcagttggttttgtttgtgaacttgaggattgcccagcattagcttgggaggtttttgcccatgcgtatgcctcttcctgagtgacccatttacctgctcattaagaaagcataaatattagtgagaaatagcagctccctcaaaggcatgacataaccacttaaagatccagatacacatgttaagagaagtacctaaaccgtcagaatagtagaaaccagaatttgagtcaaaatagagtccagtagatttgtcataatagtatcctgaatagagtcgaattcccatcctgcacaaacaggatgttatctaacagattgaacaaatattgttaaatagcgaaaattgtaatagtgctggcggacagaatgatcagcgcacatatgcaaacagtgcatcatggttcatgctactcagtgtgccagggaaaggtaggaactggtctgttcatctgttctcctgtctttaatgacatataatcatcagtaaagacttaagagtattaagcatactaaccagaataattctgctagggcacagttcatgaaaatctaacatcatttcattaacattaatgcaattgttagcaaaatttatcgtcaacatagtagcagagcaagtattactcacggctcaatttggtagtaaaagttttactcatgatgacatggacaaatctcaaacattcatttctacatcctatagtagtttccaggttacatattttcccatacatttgagccaagagaaagatatgtttgaaggacggatttaagataaaacaattttaggctttgaaaattgacagtagttagacatttctgctaaccaaggtattgtattacatgagctaggttggaatatatttcaagcatgtcaaaaactagaatcagcaggagaaaaaattaagaagataagactaatacaacaagttaatacaagctcaaaatagtgaacaaaaagagaaaacagaaatcatgaccaactaaaccctctcaagattggtgaattaacctaaccatcaactaaaaaaatcctacaaaagcataacagagaagtaggatgttcccaaaattcctaaaataaaaggaaaaaatatttttcactatcctaaacaaaggacgggaaggaagatagcaagcatatatcctctaaaaattagtcatccttcaaaacggctcttcctagggtgaggtattatctgtccccataaatagaaaattccaggagtaataaataggattaaagtattgatataattggaattgcagaaagaaatactccatactaatttactaaaaaaagaaagtacctcatccaaaggactcattttatattttaggattaaacaaaagggttcgcaaataaaagcgcttagggatagcttcatcagatatggaggcctattttttttttatacaaagcagagataactaatggcacaaaagaaaacaggctatgcagtggatcaggcattgaagaacactattgatagacaacggtgagccatacacaccatctccaggtgccgcagaagtgtcaccgtccacattcctttgactgttctctaaatctttttggtagctctttttagctttctgcagtgaacagtaagttacaaataacaaggcatggtagttcataaatcaaccaattgcaagataaattgaaacaacacagcaataagggaaaggataaattcaaaaagaaaaagcctacatggttttatcaatgcagaagtgtttacccttcacaagctctgtagtttgtgacataacaatatgtacattaggtgattaggataccaacatactggggaaaaaaacagcattacaaacttacagcttctatttgcttgagggcccgggctgcttgctgctgctccttttctttggcagcaccctccttttgcatggttgccaatcttttagtgacattgtccttgtggcgcttaccgatttcatgtgttctgatgcttagcgggttattagctatgtaaatcttacagaagtcacaccatttgtttccttggctcacccagtactggaaaaagataggggaaaaagttatttataacaaaaacacttgcaaagttggatgcttgtgatgacagtgtacaacaacttaaatgtcaaagaagatgatcgcagataactttcaaagggctaatagggaccctgtattcctaccagaaggaaactacagttgcttcttgtactgtcaccttttcagatagtgactaaataatctctttctcgcaatggtaaaaaatattgatgccaaaaagtcaattagcaggattggatgcttgcaacaacagagtttaagagcataacatagatcatatgaatgattggacacgaattttttcgaaaggaaaaaacaactaactattctcctataaacgaacacaataggcatttgtatcctgatttattcagaaagagaattgataatattgccatgatacatcacattgggactttcagtctctaatctccacttagcatttcaaattcaattacagttgaatacaaacaagtactaaaaaataccattaacctaccaaaagaatcaaagccctatttggttaactatctcaatctacaaaaacataagatgactgaagcacccatatgaagatggaatcactccagtccagaggcaaaatcttcctcagtccagcctcaccaagccgcatattctatctactctcccatagcatccgaacacacagggacatgcacaagcagcatacgaattacgaaactaaccctaattcatcgaaatccacgagaccaagtgactaacagaggcaaaatccctaaacatcagctaatcctgtataaactcgcactcggaagacgccgaccatcaccgagaaaccccccaaaggagaaaaaagcaccggggtttcgttcagatcgatgcgcgaatccccacagcgggcggcggagggcaacagggcaacgcgcgatgccggaaaattgcggaggaagaagggagagcgtacctccgtcatggcgggcaagggctccgctcagctgcgccgattgcgacagtgagcttcgcctccgctgccgggggaggggatcgccggagcggccaagcgagcgggggatttttggtcgcagtcggagacgggacgggggagagggtgctggggtgaggagtatttctcgggatgtgggcccgccggagagggggagaagcgcggattccagacgttcataattcaaattcatgccttgtttgaagtttaaacacgtgatttttcttccgagtaaatttcgaaaacaaaaagaaacacaacaactatttttttatcgaaactcaattttaatcgagcatttcggatagttgcaacaataacatatgatttattagaaagctgcaactttatatcctactccatccattttatatataagttattttgatttttttaattagtcaaacttttttaagtttgataaattttataacaccaattagttttattaaaactaatatttaatatattttgataataggtttgttttatgtaaaaaatattattttatttttctacaaatgtaatcaactaggaaaaaaaattcaaaatgtttcgatccacctatcatacatatatgaatactcatatatgaatactcatgttgttgtatattgggttcacgtgttacatacactaaaacgatataattttatagttttctaataaaatcattcactattattgtagctttgtagatagcaaaataataattttgaccaaataattacaatactatgaaatttatttttaaaaaaaaaaaatcggatttctgtccgcttcgtacacgaactgcattttggacaaaggcgatgatagtttagtagcaacagctaataagccttagattaataaacggagcaactaaaattgtttcaaataattagagtttggttaaaacttttatatctattctcggcaacttaaaagctaaggctagataatagaatacgatgaaagaactccaaaaccaagtatcaaaattaaaattttggctaaggcttatatttaagctaacatgcagacttcagtttaattagaaattttcctgcattccgaacttgtctcaagtccatcccaggctattatttctcaaaaaaaaaaaaaaaaaaaaaaaacccggccgaatgtttgtgttatagatgactcttgtctcagaagaaataatggtctattaaaataaagttaggtatggatgtgtctcctgttgcctaatatgggcgatttctggagtttccgaaactcaaatatgcgattccattgccccagactccaacattgattgattttaatgaacatttagtcggagtacatggacaattcaaacagatgcaaactgtaagaggtcatgttccacgaaatgtaagctactgctacactttcttcgagcgatcagtcaaagttttcgatcttgattggagttatatcatctgccaccttaaaattcccgactaatcgagcaaagaacaccatctgctgctccaaagtaaacttgatgttctcagcctgttcaaatggaagagcatactccatcacaaccttatcgcagggtttagggtgtaaagagacttgagactatagagagacaagtgatacagtttggtaccttgcggaaaccatgctgctctccttcgtattccaccaaggcaacaggcaaacctttctcttttaaggccttgtatattttgcgtgcctgatctggtgggactacctggaatgaaaatgaattgaagcagatgaaattgtttgcactttacagttgcaattatgcaccattaatttctcggttatcatgattatgagctcataggaaatgtttcacaaggaaatattgcaggaatgatgagaggcaattatgcatcagtaattcctcagttatcatgactatgcatgagaccaacatagaaacttccggtttatgaactcataggaaatgtttcacaaggaaatattgcaggaatgatgagaaaaaggctcaactacacaatatagaagtatttttttttaaaaaaaaaaatctttaactctaagttataagtacctagaaagtgacccttgcttctccaggtgagttatgaaaattaataaaaaaaaaaagcaaataacatgtgaacatgaaacttattacttgtcttagatctaatactcctgtaataaatctgtaagactaatgagtaccagaggatggtttaggaaaaaccattagttaactataggaggaactaaaatatgatgaattgatgatctgacagaagcggataatctaataaacagaaaataaaagctcgattcaagagtcccacattagcttgtctgctgttctgctagatattgatctctattcaagggtgcaagtgtaacagcggagcatacctcatacagtaaattttcaccgcatgtaacactttgacatgttatacaactatacactgacaaacatgacttgtctaaaatagttgatcctccgcaatcatcacataccttatcatccaagccttgaaacaaaataactggacatgtaaatttgtcaacaaagttgatcggtgatctctcatagtaagcattttcatttcctgaagagcaatgtagcaaaaggtgactattacattggacatacgggttggattgaatacttttaccaaagcagaaatagtgagactcttatggtcttacctacaagattgtcagtatagtgagactcgaatttgtgtgtctctgctctcaacaaagataagtcaccaatctgctcattaatatggtaataaaaatgacaagtcaacaatctgctcaatagttcttatgtctatgtagagacaaaaatgattgacgttacaaaggtggaccactctgtgaactgcactttaatctttttatcagttttccatatcaaattacctatcatacaaatgcaagtagtgatttaatacctcaatttcacgttataaatcaagtttgttaaattcttagttatatctgtgaaaaacagatcctacaacgttgtgcactgggctgaaaaatattcttgaatattcccatcttggatatggactaagaaaaggatcatatcgccaattattttctaaaagataatgcaattgatgtgtaaaaagtaactattacttaaaaacaatcacaagaaatctagaacctgcagcccccattgttctttgttatgtacatttataggaaagccaaaaaagcagaatcctagaaagatatataacttacaccatacaaagaagctccagccttgaatgtgtccctgaatgcgagtgaagctaacgtagtgtacccacctgctgatcgcccagtaatacaaaggcgtcgctcatctactttcccactctccacctaaaaaatgcattaaggtgttttgttagcattactataatgaaatgctattatataattacaaccattactactaggatgtaccaggactcttgcacagctgcaacaatcatcaacatcgacgataccccatttccccaatagcctctctcgatactccctcccaaaaccttcagttatattatactacagttaaattcagtgataaaactaaagatttaaataacctagagcctttattaaatcaactacgacatgaattagcagaaaaagaaaacaagctcccaacattgtacataaaggtgcaaccaaaagtccaaacagtggaagctaaaaggacaaaccagtgcttcccccatagttaacatcaagatatgcccatcctcgacttgtccaatactgaacactcaggtccagaattccacgtgtttctgctgttggtcctcctgaaagatgtggggaatatcaaatatgcgattgccatgattgtgatcatggaaaagaaggatgcaataacctaacgaaccaaattagacagaaaccacatagtaaaaattgtaaatacaaaacagaacacataacagttgggcctaaataactgaataattattttctgggatcaaactacaaagatattctgaggcatcacaaggcttcaataatttacttaccatgtgttttgacaagcaatggaggtttttcgtctggcaaaccttgaaaatttgggtttgaaggtgggtagaaatatgcataagctttctggccggtgctggatgttgaaaactcaacaaattctggtgcactgaagaaagaactatattgtacaacatctgatgaggatgaccaaattattgagaaactaactacttttgttctgtcctcatttaaagctacctgaaa

SEQ ID NO: 8402 - DNA, 25389 bp, Oryza sativa
caccctcaaaactgagtataacatattcccacgctacaaactggtatagttcagatagattattttcctgtgctctttcccatactattttcataagataagatgcgtagattattttcaattttcttgagtctgaaatcattcattcagttaattaggccatgacttgactcgggttactaacaggtcaaagccccctgaataaatgaccattctaattctaaataacacaatggatctaaacctagggaactgatcacagatgaacgccaataatcatatatgtatgtactccaataagcaggaatataggatcactgatgcactgcaaactaatttttcttataaaaccaaatacatttatttgttccgaggatgtatattgtacctgcttggaatggactctataaactgaggaatgagacgagggcatggcctgacgaggcttcgcttgatcccgcagcaattccaacctcgacaaatgatctgaaattgagcaatgaaatgaaacctgagtatttgttgtagctggaaacattttaactggtaagaaaaaaagactgcttcatgagaaaattgaccattggttgcttagacaagttccctaccgagttcatggatgaactaaccgacaaccaaagcaagtggcacaaaatatccttatagagaaaaaaaaaatctaattcacctatgcatttatttgcttcaatattaatgctaaaaccgatccatccagcgacaatttttgacaaactgatgaactgatttttttttgaattgagactgtttgagataaaaattcatttgagaaggagtattaattagcatgaccctgacctgttactctgacggtagaaaccattttcttgagggtgcaggtatctatcagttcagaactgctattacacgccatgggatcatactaacaatgcttacttataattgcagcaaaatcaagaaaataaggggaaaaaaattaattctgcatgtctgatgcttcacaagttcgatcatattgtccatatggaatatatgcccaggagtgatatgatatttcttcagatgtaacaatctacttgttctgaagctattatttgtgggggttatgtgggtgatcgcttaccttaatggacacatcatgcccaactaaatccatatttgggttttcaattcttgttgagaacacagtacgtacttgcactgatttaaagataaccctgtctcaagagagaggagatccagcaacagtgttatgcaacagtgtcattcagtctctacacaagcagctgtcctagtgttctcatttgtccatttagcataatttgtacaaacatggcaggcaaagacaaaatccccgatctctaattcccatgtttgaaatttaacacgcccaaaaggacaaaatccccgatctgaaaacatgtagatggatttgtagaaagagatggggaaattttagggtttggggggaagataacatgcagccggttgggttcgtcatgtggcgtcgtcagctgcactcaccctcagtcgccatgcgccaccgtgctcgccctcagccctcttgagttggagggcacctgcaaggcgggagaagaggctgcggagacagggggccggacggaggaggcggactactcacagaatggggtggcgccgaggagattggcttccggcggcgcgcgtgaaggcggtcgaggcgggagaagaggcggcggagatcgggggcggggcgtgcgtggaggcggtcgacgagccggagattgggtcgtagtgtgccttcatcagctgccagcctgccctcaccctcagccgccatgcgccggcgaggcgggagaagaggaggcgaagatttggtgcggggcggaggaggcggacgcgaaggaaacagagatgggagacggcgttgagagggagagaaaatcgggggaaaggggtgtgtgtgcgcgccgcgtgcgatcgacgatgcgtggggcgcgtgcggaagattgaattgtgatctgatctgttggattcaagaccacgaggaggcgacgcagggaggagggcgaaggacgcggcgtggggaaaggagtgggcgtggcgcgtgatgaggagaggagcgatgggaggagatttgacgccattggatatgaaaatcggatggttgagattagacgtgtttgttagatgcgtctgctatgtcagaaatcaagaccaccactacagattttttaagtagtagagaaaatgagatttgctctagtccaacaaaaaatatcttaaggtagcagtacctcacgatatcaaatcattttttgatcgttggatctaacaatatctatcatgctcaattagatccaacaatcggaggtgatttagtattgtgaagtaccggtacctcgaggtttttttttttttttgaccggagcaaatctcactctatattgctgatgattgatctatcaatataaggtctttgcaaattgtgctttgttgattgattcgattaattgcgacatgaaccaacagatcaacagccgaatgggcaggcgccgatctcaagcacagacaagcagatcacaccggacgattcacacacggtgtactccaagccccggcggctgcggacggatgagatccctcacgtcgtcgacgatttcagggtggctgcgcggaacgccatcgaggcggggttcgacggcgtggagatccacggcgcgcatggctacctcatcgatcagttcatgaaggacagcgccaacggccggaccgaccagtacggtggcagcctcgagaaccgttgccgcttcgccgtcgaggtgatcgacgccgtcgtcgccgaggtgggagctgaccgtgttgggatcagattgtcgccatatatagattttatggactgcttcgactcgaaccccgaagctctcggctcatacatggtgcggcaactcaacaagcacccagagctcctctactgccacatggtggagccgaggatggccaccgtcgaaggacggaggaagatcaaccatggcctcctgccatttcggaagcaattcaatggcactttcattgcctccggagggtatgaccgggaggaagggaacaaggtggtggatgatggctatgccgacctcgtcgcctatgggaggctcttcttggccaaccccgacttgccaaggaggttcgagcttaatgcaccgttaaacaagtatgatggatctacattttacacacatgatcccgtcgttggctacacggattaccctttccttgaggagaagaaagaggactcagctacagtaattgtttgattatcacctaaatcgccgagtttttttttatggatcaataatgtgtacttgtgaaacacgcatgagtagatttctgtgcatgcatatttgtaatttaattaaggttatcttttgttgagtatttattgtattgatactgccaaatatatgggttacatgtttcgttgacttgttttacccattataatcatcatcatcatcatcatcatcatcatgtgacaaatcagagacctaaaaatgtgtacattaaatctattgatcgagatcacctccatggatccacctcccccgccctcccctatcctccctcgtttcaagtcggccccatatcttgttcctctctcctcatatctaccaccttggcgccatgccttcaaaaccctactctcctttgtcggatctagcctgccccacccaccacatcgtctagtagcgtcccccgcttcaatgagagtctatatcgcaatctatcaggagagcctctcctggctcaccggcgaggttgatgacaccgtggttgatgagggagtcaccgtgtcgttgcctacggcgattctggcgtggggtgaagatcacacccacatatcacccttgtcttggtggctgatgcagtacttctcccccgccctgagccaccttatcctaattaatgaggtcttgttggcctgtttcccccattccttgcggacctttgcttgagaaatggttcccgcagggcactttgtgtgtcaaatttgttggtgcgtgaatctttacctcagtagcttgggtgtctcggaagatgtgtcattttcctgtcctcgacataccactaatctatccatatatgttctaactaggagatttgctccggttcagcaaaaagtatattaaggtaccagtatctcatggtaccaagttttcgattattggatatagctagacaggatgggcattgttagatccaacgatcggaaatgatttggtaccgtgaggtaccggtagcttgatgtactttttattgaaccgaaacaaatctctctaactagacattgtgaagaagcttccattgctacgggatgggtttttccgtgcggtcaagaaaaatttcgcgtgcggatgaatggcccacatgcaacacttcgtctgcgaaaatcgtgatttttgcgtgcgggtggcgccccacacgagaaaatcggatttttccgtgcggttgcttatgtcgcccgcacggaaaaataaaaatccaaaaaaaataaaattcacaaattaccgaaccttaaccctagatccgctactccccgccaccgccacgccggctgccaccgccgccgccagatccgagcggagggcagccgccaccgttagatcctggcgtggggagggcggcgacactcccggctgccagatcccagccatctcctcctcatcgtcatcgtcggcggcggccgccgcgctgcctccgccagcagccgcgatgggcgcctactcgttggcgcgcagctgcggcgccgctcctggccgccgcttcctccacctcatcgtcatcggtggcggcctccgcgccaccctcctcccgctagactccgcgccgccgcccaccggatccgccctcccctctggccgcaccgccgcggacgcccctcccctccgccggatctagggagggaaggaaggggaggggaggggagcggatcccgcgcgggggaaggccggccgcatgccggatccgagcggggatggccgccgcccgccggatcccgcgcctccaccgccgccgtgtggagctgaggccgccgccgcaccgcctctgtcactgcgcaccgacgcgaaccgctgtcgctgtcgccgcacgccgccgtcgccgtcacccgcgcgccgaaaggagacaagaggagagacgtgaaagagagagggggagagagaagagagataagaggggaggggtgtgaggagaaattaaaagagatatatgaggggaaattttgaagtgggtgggagggaaaagaaggaatactatttttgcgtgcggctctcttaatagatccgcactggaaaatcgactcattttcccgtgcggtccatttaggaggaccgcacgagaaaattgattttcccgtgcgggcgacagctcggccccggttcccctatttttttgtgcggttccacttacgaaccgcatggaaacaaaagagggtagtgtccacaaaaatctatcgtgtagtagtgttctaactcaaaggatgtgatcatttattacttaggttgtatttctatatatggagaacctgttaaccaaaacattcaattgtttatcactatgaactcttaagttttagttcttctaatatttataactcaaaaattcaaattgaataaatataaagacgtacctatcttgaaatttaattctaaaaattcgtattcataattagcaactcataactggtgtggactctacctttagtatgagcattgctatacgtacgataaaacttcatacgatcagactacgatacttcatagtctcttgtgtgtgatgcaaatgtggggtccaacatgtttccacccaataaaaaaaaaagacatgcatggtaggatcgtactaaaatcgtacaaattttatcgtacgcaaagcaatttccctttagtataacctgctacaattaaaattttatttatactatcaataataatagcccgtgggttactactactagtaaaattgtattagatgcagtgttgtatatattttatatacatgttcttaacgatctaagagaaacaagcaaaagataaaaaataaactgcgatgacaaaaaaaaatctcaaaatcaactctacatttaaggttgaaattttaattttgactaataaatataaatataagcgaaaaggtgaagccgataatgcaagaaacctatacgttaaaaaaaaaagaactaacagctcagtgcatctcttactcttgttgattgacaccggtcatcagtagttcagcaccagacggctgttgcattaaagaatgtttagaaaattagaaccacgcattcccccacacgaggaaaatcagtgcgctctcccaggtaaggagagactttcctaccgaccagacgatgacggagagggtgacgcaggaaagatccgatggaatagcagtgcgcacatttccgtcaagccgccagggtcccactcagacgctataaatgaaagagcatcatcaacccccttggaccatcggactcggagcaaaacacaatagaggagcagagcagagcacagtgagctagtagcagaggccacactagcgttgagatggcgcgcgaggcggagaaggacgcggcggcggcggcggagatcccgctgctgacgccgtacaagatggggcggttcgagctctcccaccgtgtggtgctcgcgccgctcacgcggaaccgctcctacggcaacgtgccgcggccgcacgcggtgctgtactacacgcagcgcgccaccagcggcggcctcctcgtcacggaggccaccggcgtctccgacaccgcgcagggctacccggacacccccggcatctggacgcagcagcaggtcgaggcgtggaagcccatcgtcgacgccgtccaccgcaagggcgccctcttcatctgccagctctggcacgtcggcagggtctccaccaacggtatgtactccttcacatagttaagctgctggcaattgattcataggtttttgttgagtttttggtttcttgcaaattgttctctttggctgattgaattgcaaaccatgaattaattaccaacagaataccaacctgacgggcaggcgcccatctcaagcacagacaggcagatcacaccggacgattcaggcatcgtctactcgaaaccccgacggctgaggacggaggagatccctcagatcatcgacgacttcaggcgagccgcgcggaacgccatcgaggccgggttcgacggcgtggagatccacggcgcgcacggctacctcctggagcagttcatgaaggacagcgccaacgaccgcagcgacgagtacggtggcagcctcgagaaccggtgccgcttcgttgtcgaggtgatcgacgccatcgtcgccgaggttggagcgcaccgtgtggggatcaggctgtcaccgttcatcgactatatggactgcgtcgactccgacccggtggctctcggctcgtacatggtgcagcagctcaacaagcacccggggtttctctactgccacatggtggagccaagaatggccatcgtggaaggacgcaggaagatcacccatggcctcctgccattccggaagctgttcaatggcactttcatcgctgccggaggatacgatcgggaggaaggaaacaaggtgatagccgatggatatgctgacctcgtcgcctacgggaggcacttcttggccaatccggacttgcccaagaggttcgcgatcaacgcaccattgaacaagtataataggtccaccttttacatacaggatcctgttgttggctacacggactatcctttccttgatgagaaagacgagggcgctgctacttatgcttaatcctcaattaaattgtcaaattgaaatgttcggtttagtaatgtgcactatatttgtgatacactcataagtgaccctcacttccatccatcccccttttttttttatgtttgcgtatatcaattttttgcacctcgaggtgaattttgtttacgtaggtatgtaaccatgggcatgatgggctgttgtcaagcctgttgtggtttgatgccaaaacttacccaaccaaataattggcactttaaataataccttataaatatttagattaatgccaaatttaccaaatgtaatgcaactcctataacccaactctactaaaccattagaagtgtcaaaatttacccatgatttgacactgttagagtttgtgtcgaatatgtgtatgtagtcggttacagtttaggacttggagttgtaataggtattaggactagagtatgagtcggactctatcctaggatctctcataaatagaggggcgtgcctgttgtaaccgcatggcgacttagcatagcgtgagggagcggctgccggcggcgaccggctgtgagtcgttgtaactctgatacgttgtatatgctggatcggggaggagcgtccgtaatcagtgccccaaagatgtaggctacggcaaggtataacctttcgctccccggggcaaagctgcttcgcaccactgatagactacttaattaagattccatttcaaaggcactactttgtttctcaagcctttgtcattgtcagtcaactaaggttggccctcggccccctgcgaatccgtaaatcagagagcatgccgcaaaaaaaaggatgtaccaaatatcatgtctcggtgtcgctatcattttggatctcctatggcgttttcttccgcgtttagctaccgatgtcgatttcggggctggttttataacaagtggtatcagagcttgcgggaggtccatggtagaggcgcgatggaggtgcttcacaccgcgccgctcgtggtttatgtccagggagggacatgtgcgcaaggtagagcacggcggcgatcaacggaatttgatcggtggatcgaacacttcaggcggcggtctgaaccgttcgatggctgctttcaacagggagatgactagacgtggtgctctggttgatggcggcagaagcgattggtgatccaattggtgggtcggacacttcgagcgggtggctcggactttccggtgagctactctcaatagggagacgtgcggccgcacgctcgggttgattgaagctggaggcgatcggcgttctcggtgggtggatcgatcactctgggcggggtggcctgggcctttcgatgagttgcgttcgacagggagacggctaaacatagcactcgggtcgttcgcggctgagaagacggcatgcaacttgtcggcttcggctcgcgactagattgatggtgtttaatcggaagtcggagcgggtggttcctagaggcagcttttgaaggtgttgatgaggtaattgcgtgatggacatgctatagagaaggcgtacatacgacaagcgatggaatcaggcagaggggtggtcaattcagatcgtcaatgctttattcaatcgtgttagtacagcaaaggcattggttgcaactgaccggcgatattggtcgctggcgaggttgggcgggatgttggttggctgcgctagaggtcgtacgggtgcgtggtggctgaggaggtcatcagaggtggcggcgtgcacgtttgcatgtcgaagccgtagactacatgtgaccggagtccagaggtagcaagatggttctgttttgggccggatttacgcaggagaccgactcgggtttttgcaggcacagcggatagactcggattacgagtccttcctggctacgcatggaaaaagccaaaccggtgaccaactcgtacacggaaggggaacaaagagtttcttcgatttggttaagaattggactcgaatttctccaaataaaagcagcagaggaccacgggattgcaacaacaagcaatcgggcaaactaccaaagcaaggcgagatctgacctgttggatttcgtgggcggaggtggtctgcggtgtcgggctccggcggcgctgcacggttttcggcgagcagcaggtgcaggcggcggaagctcggcggtgccggctcttggagaaggcggcggacaccggcggcagaggaggcgtcctctcctgcgtcggggcagcgtcgtccatcaccgggggtcttcagaggcgtcgacagcaggacctgcaggcatgcactcgaggacgggcgttggcggcgggaacctaggcgattttcgacggcggcgcggtttggtggtggggtgcggcggctctggtgctcggctggtcagtggggagagaggcacggcaggcgctgggcggcggcgccaatcgggccgagaggagtcgggcagaaggagcaagaaacgggattcgatttggatctgtaaccctttgaccgcatcaactgattctttgaccgagtaaaggacacctgttccggttttttggagagagaaaaaaaaacggttcggtccggctggtactgttcgagttagtcggtggggtcaattaatcagggcagatcaatttaatagggcaacatctgttgagttgattatcatcgatggcggcgacggtggtttccaaatttgaggtggtgaagttcgatggcaccgggaatttcgttctctggcagatgaggctgaagaatctattggctcaacaggggatatccaaggctcttgaggagacgatgccagaaaagatggatgctagcaagtgagaggagatgaaggcgcaggcagctgcaacaatacgcttgagtctctcggattctgtcatgtaccaggtcatggacgaaaaatcaccgaaggaaatttgggacaagttggcaaacctgtatatgtccaagtcgctaacgagtaaattgtatctcaaacaacagctgtatggtttgcagatgcaagaggagtcagatcttaggatgcacgtggacgtcttcaatcagttgattgtggatctaagtaagttagatgtgaaactggatgatgaagacaaggccataattcttctgtgctcgcttccaccgtcttatgaacatgtggtgactaccctgacgtacggcaaggatactgtcaaaactgaggagataatttcgtcgttgcttgcacgagacttgagaagatcaaagaaaaacgaggcaatggaggcttctcaggctgagagtttgctggtcaaggcaaagcatgatcatgaagcgggggtgtcgaagagcaaggagcatgatcatgtttgctataagtgtcatgagtttggacatataaggaggaattgcccattactgaagaagaggagaagtgcgagtgcaagtttagtagcccatagtgatgattcagagagcagcagtcatgagattctcacagtgtctaacgagaagtctggagaagcgtggatgttggactcagctagttcctatcatgtgacatcgaagcgggagtggttctcttcatacaaatctggtgattttggtgctgtttacttaggtgatgacacgagttatcgtgttgttggagtgggcgatgtcaaattcaagatgtatgatggaaatgaggtgctactttcatatgtgagacacgtgctgggactaaggaagagtttgatttcgcttggaagcctacatgagacgggttggttgtatcaggtggattctgataggaagaccatgaatatcatgaaggatggcaagactgttatgactggtgagaggacaagctcatgtttgtacaagttacaagggagtgctgttgcaggtggagtcatggaaaatggttatgctggtgttgctgtgcacgatcctgaaggcggtgagcctggcgtaggctcgtcgggcgactcggcgtgagcggcggaagaaccaactcaagtcctggtacacggaggttcgagcaagtaacagattcggattggcgtggcatatttgccaaggtggagtttgttagagtttgtgtcgaatatgtgtacgtagtcggttacagtttaggacttggagttgtaataggtattaggactagagtatgagtcggactctatcctaggatctctcataaatagaggggcgtgcctgttgtaaccgcatggcgacttagcatagcgtgagggagcggctgccggcggcgaccggccgtgagtcgttgtaactctgatacgttgtatatgctggatcggggaggagcgcccgtaatcaatgccccggagatgtaggctacggctgaactccgttaccaaatatcgtgtctcagtgtcgctatcgttttggatctcctatggcgttttcttccgcgtttagctaccgatgtcgatttcggggctggttttataacagacactaccaatgatttggtaggacaccaaatcagataagcccgagattaatctattatatccataccgcttaaaaaatatgttcttttcttctctagcccgcatcaacagttgtatactattcttcaaagagcaccaacactaatacaccaccccctctattttaaaatttaaaacatattttatttcattaggataacctttaaaaaattatcctatatagaatatcaattatatcatggaaaagaataatcataagtgagtatatttttaatacggatataataaatttaaatttttgtgtcataaaaactatatccaatagagtaaagtgttggtcaaagctttgtataagttcacgtaaatgaaatcttatcctaaccaaacaaaataaaacttatattttaaaaaggagatacttggacctttccctaaattttatgatatatcaagcaaatatgtagcaggaaaaattaaagagggcaaaactaaaatttgtatgtacatcaccgtgttgtgaagtgtccagtattactagatggataccccacaggttgttgtcagagaattgtaatgaaataaatatatatgagttgtattcttttctttctcactatacggttttctttcatgtgcttatatatgttgtatcttgtatcttgatcaattatccaaagaccataaatgattaagttgtatggtatgacttttatggataaaaggtgcaatttgtacctttgatgaataatccaaagattaaaaataattgagataatgtgacttcatgatagaagagagaatttatattaactacgtttagtggggatgaactttacgaattttataggtatatagtatgaaagcaactaatattggagtaaacggcactgtgttgcaaggtttgcaaaaaccatttagtcaccaggcatacagctcccccaatgatctcatcgataaccatgattaccgttggtttgacgacagaaactggcaaaatttaaataagttttgccaaaagtttgaattacctccgatccttttcagcttggccagtttactaaatggtttctcaattatatagcttgattaacttggtggctagtttctcaattttaaacccttcgatgtagagtagagtagtagaaaaaaagggctacgagtgtgatgagaatccataacttacggaggttaaggacggcatgacttttattctagcctacatgttagtatattaagtgagtgtattgtcttttgttatcgacttagattaagcttttaagttaaaataatcggtgcgtataactcaatatgatatttgagctagagatcttagagttcatatatattctagctaacacgtaattaaataaaattgtagttcacttttattccatgctataggttttaggggaccatgtatgaaggagtgtgttaattggaatataaagtgagtgaattagccatcttttcacatcgggaccacctatacatttgtcgacaaattttctcctaaaaatttgacagatgtaattatagtacaatcataatgtaattacactgtaacttgtatgtaattacactgtaacttgcatgtaattacactgtaacttgcatgtaactttcacgtaattttgaatcgttagatctattataagatttgttctagcgaggaagaaaaaaaaatcatagcacacatatatgtgaaaggatttgttcccacgacctccattttaccgaaataacatgttacggagagatttttgaaagttacatagaagttacagtgtaattacactgtgattatactataattacatttgtcaaatttttggaggagaatttatagacaaatatatagcaaaattgtttcacatctactaaagtttctgtgttgaattaattgatgcatgtaacttaataccacaaaagtacactgcgagatcgatcgtcacaatcgcattatggattggataattgactgcgagaaagtcttaattgcacagtgagccagcacgaggcattaggcgacaccgttcgtcaacacaggtaggccgaacccaacgtattcgctgatgttggcaatggcaggacgtagcagcgctcaacgccacatatatctgggcagggctgcatgcacatcgattttcttaatccccggagatattaagtagttatgctgccgtgaaagggcatgtaatctagtggttgcagtgatctgagtagtatctaaggtcctgagttcaaatatttataggagcgaattttaaattaaattatttgatggctaattttctgttcgataagctaagttcctgattttttttaaaaaaaatacatatatccggttagatatagaggccgggtaaaatgcccttctcaaaaagaaaagttacgctgcctatcttctactctctcagttcctaatttttttaaaaaaatacatatatccggttggatacagagtccgggtaaaatatccttctaaaaaagttatgatgcctatcttctactccttccatccaaaaaaatcagccttgatgtggatgtaacgttatatagtacaacgaatctgaacacgaggagtacgatgcttcctcgaggacctgtgatccgccccctttgttaaagttggctccactgttttgtcagctcccacatttagttaagctatccggataagcacttaattaagcaggcttgccttctacaaagaaaatgagattaactgttgtccaactttctctcgtaatactaccaattacgaattatagatagcagggaacatttctaatgtgcaacagagaaatggtttgttaagattgctctagaagagtaacttgaaaatagctctctgtttcaaagaaaaaacataacaccacaaactatggtaatcttatttattttgaagctagtatcgagctgagggttatttattttactttaggtgatctagcacctatagaatgatgcaacataacttatatactcaatctgttctaaaatataacaactcctggcctttaaagtttgtttcaaaatataataacttcaccaccaacattttcttttcaatcaaatacaatcccccaccattcaatttcctcacctaccatcacttttcaaccaatcataacaattataaccacttttttaataccgtgtccaaccctacaaatccttatattatgtaacaaagggatctttttttaagttagctggtcacaaattaaagtaaactagatgggtaccccgtgcgttgctacgggagaattttgtgataatatagtagatatgagttctaaaattttctttcttacctattaaaccatttatttcatgtgtttatgtatttttgtatcttcatcaattttagctaaggttataaatgatttttgttgtatggtgtgtcttttgggaggagagatgcaatttacatctttaatgaaccatccaaagactaaaaataattgagatgatgtggcttcatgagagaagagagaattagcattaattacatcttagtggggatgaattttatagatatataggattaggggtttgtcccaaccttttttttcatatttgaattagaacattttctatgtgtgattaataggagaggctgacgatggaaatcatatttattatgtagaaaaattcatactttcttcgtttcacaatataagttattttagcatttccacatttatattgatggtaatgaatctagatagatatgtctagattcattatctagattcattaccatcaatataaatataaaaaatgttagaatgatttacattgtgaaacggagtaagttcctaataaccagcatcagtcattcgagtaaactacgagtaccatcgatctgattacttcagttgatcagctggtacgtgtgtgcgcgcgatattcaccccactgaccaaagcgcatacataatccatacccgtagcttttgcagcaaattaaaatggttatcaataaaacacttggcgcacgattgatacaaataaattacaaaccgccacagtgggggatgtttgacaatcagaatctctatgatcagctgttgatcactcacgcacctttcttatgctcgcgtcattgcttggtcatgctgctggagactcctcaaaccacacctcgtgtattgtttgttattatatgaaaacaaaaaagaaacgcctctggatatggtaatagtcgataaagtaataatagacgtatttccattcgtcagagagacagtggctgctacgtgagacgaagaaagtgacatgagaacggggtcagaaatatcgtgcagggaaccattgaaaatgggaaactctgcatgcacatggatgattggttgcatgattggtcaatgacaaagtgcgccgagccgccggtcccacttcaagcacggacacctataaatagaactcccgactaaatgcagttcatcacaaccaaaagcgttcatcaagaagtcaagcagagcaaagttcagaagcaagcaagagagaggcagaagcgttgagaaaggccgaggcgagatggtcaaccaagccgcgatgccgctgctgacaccgtacaagcaggctggcggcaagatcgatctctcccaccgtgtgctgctctcgccgatgacgcggtgccgatcctacggcaacgtgccgcagccgcacgcggcgctgtactacacgcagcgcgccaccagcggcggcctcctcatcacggaggccaccggcgtctccgacaccgcgcagggctacccggagacacccggcgtctggacgcgggagcacgtcgaggcgtggaagcccatcgtcgacgccgtccaccgcaagggcgccctcttcatctgccagctctggcacgtcgggagagtctccaccaacggtaaacactcgtcaaacgcgcatgaatgttttatgttcgtgttcataaattaatttcttagcattaccatgtaatttagtaacgatcatcattagtcgatagtgttctaattctgctcttgaatttactttgcaaaacagactaccagccaaatgggcaggcaccgatctcaagctccgacatacagatcacaccggacggttcagggatcgtgtactccaagcctcgccggctgcgggtcgacgagatccctcagatcgtcgacgacttcaggctcgccgcgcggaacgccatcgaggccgggttcgacggcgtggagatccacggcgccaacggctacctcctcgagcagttcatgaaggacagctccaacgaccgcaccgacgagtacggcggcagcctcgagaaccggtgccgcttcgccgtcgaggtgatcgacgccgtcgtcggcgagatcggcgcccaccgcgtcggcatcaggctgtcgccgttcctggacttcatggactgcgtcgactccgacccggaggctctcggctcgtacatggtggagcagctcaacaagcacgagggtttcctctactgccacatggtggagcctcgcatggccatcgtcgacggccgccggcagattcagcacggcctgctgccattcaggaaagctttcaagggcacgttcatcgccgccggtgggtatgaccgggaggaaggcaacaaggtgatcgaaaatggctacactgatcttgtctcctttggaaggcttttcttggcgaaccctgacttgcctaagaggttcgagcttgatgcgccattgaacaagtatgatcgcaacaccttctacactcaagacccaattgttggatacacggactaccctttcctcgatgaggatcagaacaactcggttgctgatgcttagattttgtgctattttagttgttggttctatatatccacaataataatgtgcacgattcatgtaaacagtgttagtatatgcctgcgtgcaagatgtcattttcttctctcttttttgatggtttatgtctgcaactaattcattttgatatttgattagttatgcatccaaatatattgggattaataaacgcagatgtattcacaccacatgagaaatatatgtgttcttttgtaattttataagttgatgtgctgtccttttttttacatcccagcatgggtcccttttgaattatcttgttaaaaaaaacttttctctctttgaatttacttagcatataaatccaaattaattccaaacaatggtttccatcacttgtgcaaatttttttttgtcacaattccaaattaaataccttaacttttatttttgataatggctagaaatccatcctctaaaacctaaactgacaatgccgatcgtacgaattatttttgggcaagcccttaagacactttagcatacatgcacacaaaaaaattatacaattatgggcctctttatagatgatattatgggcttctgttgaaatattttagagggtgtatgtgctctctggtcgagatgaaaagaagacatgctcatgattaaatcatttgagaagttcttatcatttaacatcagattgccttttatggttttattaatgttgtccatcatatatgtatattttttagagcttctatgttttcttcttgccccagcaattgtatcatatatttttgcttaggaaaaagtacgaatccctccccaactatcaggtgagtacgaattatccccctaaacccgaaaccagatatttttcacccctcaactatcgataccatataaaaaaaaccccgaccagctttgtaagcggttttggtctatgtagcagtctagtcagtaatttttttattaaagaaacaatgggccctacctgtcggatatctctccactccatgtcttcccctctcacccaccctctctctctctcaaatgccagcagttgtggctcgagcgccgacggcagcggacgccccctttgtcgcctcgacgagccgcgcggcgatggctgcgggtgcttccttcgccgcccgaacttctcccaccaccatccttggatcacttcgccgccccctccacctccccgagcaccgctggctgcgggcatcccctccgctgcctcaacgagccgcgcgccggcggctacgagcgccccttcaccgccccaagctccgtcgcccccttggccccaagctcggcccgccgtcgtcctcagctcgctccatcgcccccttcatctccctgagcaccgctagctgcgggtgcccctccgctaccccaagcaccgcccttcgttgtccgctcctcccaccactcctcctcccaccgcctcgagctccgctgccccctcctcccgtcacccgaagctccgcccgccgtcctcgtggtgagggagggagaagagagtggattttggagagagatagaggctacgttcgttacattgggttgggaacgttaccctccggcatggaaaatggagcagtccattagcgcgtaattaattaaatatttgttttttttcaaaaatggatcaatatgatctttttaagtaacttttatatagaaactttttgtaaaaaacgcaccgtttagcagtttgaaaagcgtgtgcacggaaaacgagaaaaaggggttgggaaccccttgaaccgaacacagccagagaggtgagtggaaaaaagagagtgtgggagacagacaggtggggcccgctgattaaaaaaatgaattgctgactggactgccacgtagaccaaaaccgcttgcaaaactgctcgggggagggggagtttcatccggtatcgatagttaaaggtgaaaaatatttggttttcgtgtttaggggggtaattcgtactttttccttttgcttatcaggtccaaattatagaatggaagataaaggggagagagagagagagaatacaaaactggagggggccttttacagtacattttactaccggtggtagtagtgtagtagaaactaaatccgacccttcatttgtttgggtattttagggcttttaaaaatgcttagggtatttttgactttcaactctaatttcaattatagaagggtattgctcgtaatcttggcgctgcaattatcctaatcgacggatcatggcaaggtcgccgcgacgccggctgcttcatcgccggttcatataacttctcaccggcgtcttaaccttctcactggcgtcttgaacaggagtaatgctcgatcaatttatttttaggaatcctccatcaatttagacgggcacatgtgtatatgcatatactaatttgaagaaagagcagcgatgcattccaaccatgtttgcattcatgcaattagggatcggcgaaccgtccttctctccggattagaagcaacaaaatcaacagaaaaaaacaaaaaacccgtatgaacacttgcacgttcatcactaggacaggcccacctacagtctgagaaaaccaagagatggcgtaaaaaatagagtagattagaaaaaaaaattaaccggtaattaacacatgcgaaattacttctttaccatgcaaaattttccaaatctacccttggagaaataatactatccataatactcagtgtagtagtggcggatatgatccgctggatgcaacgaatggatgatccatatttacccgagggtacagtaaaaaaatccaactggaggggtataagaaagaaagaggtcatcgattttcataagaactagctatgtggggcccactttgtgaggcccaaatattagtgattgtggcggtgaggcagacttatgttttgatgtttataaaggagtaaagatatcattgcgatgatcctcatataaaaaaaaattcttgtgtgtcattgagtatttgctccatcattcccatacccctaaatttagccatgtttcctttatacccttaagttgttttgttcttttttatactcaatctgttaattgaccacgagatttttcacaaatactacctccatcccaaaatataagtatttttagctataaatctggacaactatgcgtccagattcatagccaaaagttgctatattttgggacggagggaataactatattgcctcttgtttctacattttaaaaatatagatctcaaggtaaaaacagttttgactctaaaaatcggagtggacatgatgatttgatcaaaaaaatgaaataaaaaatacttagaattttcaaaatattaaaggtaatttcaaccccccctacccctccatggaaatatttccaaatttggttgtggttaatttttaaaatataacatttcattttttttaggggagaaaaatagagaaaaatgtgattttgtaatttcccctttgaattttcatcaaatttcactgcaattcagttcaaatgtttaattttagattcaaaaagttggtcaaacatttttattccctacaatttgtatagctgaagttattcactttcaaattatgttttataagacgttagcatttaaactacaatcccgaaattacaaatttatagattcaagctatgttattgcacaattatggacttagaacccaaatatatcagtaatcacaaaattatctaatttatcatccaaaatcaacgaacaaagcagtttggtagtttacgactttatggtgtgatttttgtttgcttgtgttgttactctggtgcaaattttgatttgtaatgtcatcttaggtgcttaagaaatgaagttggccgagcacaaatataggtatatggtgtacctgcgtcatctgttgttcatgctgatgatcgaccatatatatctccatgaccacagacatgtgtaatatgctcgtcatgcaaacgaaacatgtcctgatacgcagacaacagggctgctgcctgttacgcagaccaagttcacgacgcaaggctgacgaaatcacgatatggcatggttggtacggaggaagagtcaacgatctatatggagccagcagcgcagcgcgattttgcagatcgaaaatattagcgtactctgccggtcaatggagaaaaccgccgtcgccacgcgcgagggtccactccgacacctataaatacaaccaaactccaaccccattcggcacacagccaaagcgtttagcaagaacagagcaaagagctagcctagctagatcatcgcatcgcatttgttagttttccatcgccgattgatacatacatcatccaagcagagcaatcaccaatcaaccgagacaagatggtgcagcatcatcaagcggcggcgaacgacgatcatcaggctatcccgctgctgacaccgtacaagcaggctgggcgcccggggtcgaagcttgacctctcccaccgtgtgctgctcgcgccgatgacgcggtgccgatcctacggcaacgtgccgcagccgcacgcggcgctgtactacacgcagcgcgccacccgcggcggcctcctcatcacggaggccaccggcgtctccgccaccgcgcagggctacccggagacacccggcgtccggacgcgggagcacgtcgaggcgtggaagcccatcgtcgacgccgtccaccgcaagggcgccctcttcatctgccagctctggcacgtcggaagagtctccaacaacggtacgtgcaccacgaaatatgtacattcttgttgatgaatttgccgggaaagtgaaatcatccctcgaggggatatcccctcgtttcgtgcatgtcacctaaatagttataaaaaattataaaaaaaattggcaacatagattaatacgaaatatatcactccacaaacatgcaagtttaaggtcaacttctacaagttgtaacaaaaataacaaatatagttgtgaatgtgcattaactattttcagtttaatttgttatttttgttgcaacttatagaagttgaatttggttttgcatgtttgtggagtgatatatttcgtattaatctatgttgtcaatttttttaaaaaaatttgataactatttagaagacatgcgaataacgagggatgtcgctggatgaaaatccacatccgaatttgccgtgtgtttctcatcctgcatgctctgctacaggtttccagcctgacggattggctcccatctcaagcaccgacaaggcgatcacaccggacggctatgggatggtgtactccaagccgcgacggcttcggacagacgagatcccgcaaatcgtcgacgatttcaggctcgctgccaggaacgcagtcgaggccgggttcgacggtgttgagatccacggcgcgaacggctacctcctcgagcaattcatgaaggacagctccaacgaccgcaccgacgagtacggcggcagcctcgagaaccggtgccgcttcgccgtcgaggtgatcgacgccgtcgtcggcgagatcggcgcccacagcgtcggcatcaggctgtcgccgttcctggactacatggactgcgtcgactccgacccggaggcactcggctcgtacatggtggagcagctgaacaagcacgaggatttcctctactgccacatggtggagcctcgcatggccatcgtcgacggccgccggcaaattcagcacggcctcttgcccttcaggaagcagttcaatggcacgttcatcgccgccggagggtacgaccgggaagaagggaacaaggcggttgccgatggctatgccgacctcgtcgcctatgggaggctcttcttggcgaatcctgatctgcccaagaggttcgagctcgatgcgcccatgaataactacgatcgcaacaccttctacacgcaggatcctgtggttgggtacaccgactatcctttccttgacgagcatcaccatgacgacgacgatgactctaatgctccttctgcttaaaaccagtcatgcaactcttcaaatcgatcggcatcaataatcaataatgcaggcacccgtgctatcgatttcactatttaccgctacattttctttaagtgatttatgtactcttgtactattgtttatgtttagtgtgagaagacatcaagacatgcatcatgcgtgtatatatttactggaataaaacacgagttatatgaacaatgattttgttttatggacacttctattatgcgaaagtttgctactccctgcgtttcaaattgcaagactttctagctcattaatatgtactctccctccgtattttaatgtatgacgacgttgactttttgagcaatgtttgaccatttgttttattcaatttttttgtgaaaatatgaaaatgtttatgttatgcttagaaaacatttgatgatgaatcaagtcacaataaaataaatgataattatataaaacttttgaataagacgaacggtcaaacgttaaaaaaaagtcaacggtgtcatacattaaaatatggaggtagtatatgaatgtggccaattctacgaagttttacattgtgaaatggagaacatgcctttggtctttggtcttcccatcctagaattaatcttcttctcgttctgtccatcctttatttgaaatgttttagtttcaaatgtactagcgtttcaaaatctttatcgattagaaagtttgaaagacgtgctcatgataaacgagagaattataaaagctgaacgggctctcaagcaaagtcttagcttaagtctcgtttgcatagccatagttaaaaaaaaaatagaggtactctagtaaatcaaagttgtgctgagcaggcctggattcggctcctctgactttaggagcaaacggcaaaggtgcacagtaaaatgagtctagtgccgtagttaagaacgagaaaacggacaatgtacacttaatagattgggttcagatgaaatgccacttaatacaatgcactagataaaacaccactcaatatgttgcctaccagatgaaatgacactttggagatttttgtgcccaaaatgtccctatatatataagagagagagaaggagagcgaagcgccggggagggccgggcaggcggcattggaggcctcaccgggtggtggcggcgccggccggcagggacgacgggagaggaggatagggcggcgggcgagcggcggtgaggacaatgcggcagagggaggaggaggcgacggtgcggggaaggaggacggggcagcgtgcacgcttacctgcgtgttcgccgggaagcggcaacggcgggg

SEQ ID NO: 8403 - DNA, 714 bp, Oryza sativa
acggaagattttttaaataactttttggagggttttcttttatagaactgtctataatatatcttttagagtcagttcaaaaatggctcatgggacgtactgaaattcaataggcgacgcaacatggacatatcgagtatatacattcccttttcccagccagtgtgattttaactgagtatatatctttacataaacgatgttgcaagagaaaacagcatgttacgaagctcaacaagcaataaaaataatctaatctatcctgttgttgggcagtgaggggaatagcagcatttcatcagtgtccaggagagtagcatttcatcactgtccaggagagcttcaagatgacgcgttcttcctagctgcgtaaacccggtaagcagctacgcccacaactgcaacagccgctcctactgcaaattattggcacaccatcagttgtgttagaactcaaccaacttaagataaaaccactattcagtttcaactcaaaatcataaataactattacttttagattttattgtcttactaaacctgtgctcttactattctgtagtaattggcatgatcgatttgtgccagagcataaaggcaaatacagaaacacactttagaggcagaagcttgacactaacttacctgagacaaccgtgagggaacggttcagaagttgacggtattgcctgtgtgttttcccagcttcagtct

SEQ ID NO: 8404 - DNA, 4485 bp, Oryza sativa
  unsure (1)..(4485): unsure at all n locations
tcgtccatgactgccgccacctccacgagcaccgggaccgccatctccacaaactccgccacctctgcctcgtctacgaccgccgccgccaccttcgcaagcgccgccgccggtcctctcagatccgggcgccgccgagtgcctccgcccctagacggcactaacggtgagtacaaatccgtccatcccatcccacctcaatcccttctaccaaacaaaaaactataaccatcccataccataaaccaaacagacaactggaaccatcccatcccacaaaactaggataggtctgacccatcccacttcgtccccaaaccaaacactaccttagcgaattctactccttaccattttactctttcctagagtgacaaatcagggtgcatttttatcatgtttgcaaaccagaaattcttcctacaatgaaatatctgcggttgcataaacagatttacaggattgatccattctgcatgtctttttacaagagagtaaaatttttcagcattttttcatgtctttagatgtcagcattttttagtagtatatagtacaacataacatgatttaccatacaatcaaacaataactgcattgttctctttttattttcctcaacaaacttctaacaatatgaacttctctagatatatgtttgcaatctttagacttatatacaaatatggcctaaaagtaactgattgtagcttatttgaagtaataaaggccagaatgaattccgttacctagaaggagagtaaattttgcaaaactataaaaactttcgatgaaactatattacaaaactattaaattccagcagcggcctaacaaaacaataatgcaccaaattattaggatactacatatgtaaattacgatatcacaaaactatatatttccgcgtaaattcaccataaaacttcaaattcggaggttatagatctcttgcgttattgccaattggatttcaaaatttatgattttgcgatactatgatttataaagttgtagtgtagtttttattactgctccctcggtttcagattataagatgttttgactttagttaaagtcaaactgcttcaaatttaactaaatttatagataaatatagtaatatttatattaccaaattagttttattaaatcaataattaaatatatttttataataaatttatctttggtaaaaaaatattactattttattctaaaaacttggtcaaacttgaagtagtttgactttgaccaaactcaaaaacatcttataacctgaaaaaaaaaagagggagtagttaatttgatgctatataggcatgtaattttacaatatcataccttaaatatgtacatacttaagttttgtgataataattttattattaggaaacactactggagtaatttctgaaatttactctgtttgcgattatttgcaattttattatctcaactcatattcttccttcccctgcaggcaatcctgacctccacgcaggccacatccatcccgggcacccccaccgcgccgccgccgccgcgccgggcctactccatctcctgctcgtcgccgcctctccgccgcgaccccgccgtcccgaagaacatctcccagacgctctacctcgcgctatcctcccgcccagcctgcgcccgcgtccccgagccccagccactcccccctaccaccaccaactcctcctgcccggcctacttccgcttcatccacgaggacctccacccatggcgagccgcgggcgggatcacccgcaggatgctcgagcgcgccagggacacggccaacttccgcctcgtcgtgctccggggccgcgcctacgtcgagcgcatcgcgccggccttccagacccgcgacctcttcaccatctggggcatcctccagctgctccgccggtaccccggccgcgtccccgacctcgacctcatgttcgactgcgtcgactggcccgtcgtccaagccgatcggtaccagggggagaacgccaccgccatgccgccgctcttccggtactgtggcgacgacgagacgctcgacgtcgtcttcccggactggtccttctggggttggttagtctacttctcctggtcttcacatcattgtatttttcttgatggagtgcttgcagattaacattatattctactggttaacattagaatgaatcccaatatcccacaatcaaatcacaggttatttcctatgctgttattgctacgctactgttactagaagtagcacaatgattgtgttcttcatgatagtcaggtccagtaagcataccatcagtgtgcattgtgggaggatgcacatgtttatgtctgctgctgtgtttctgacacagtaaatatatgtgcttgaccattgcagtgcttagattaaagatcattcctaagactgcaccaaaattaagtatgttctttttacgctttcattcggacaaagcaccagagcttaaatagactgtctgtgatgataggccagagatcaacataaagccgtgggatgcactgcagaaggatttggatattggcaataagagggtgaaatgggtggatagagagccttatgcttactggaaagggaatccagatgttgcaactaaaagaaaagagctggttaagtgtaatgtctccagtaagcatgagtggaatgcacgaatttacaaacaggcaagtatttgtgcctatgatttactgtgcctagtcgcacttcaattaagtttaatagtcccctgttctcgcaagtttagtccttcatattccttttaaaagaataattatattttagtatgtgagttatttatcaagaaaacagttatgatgatgtttatgattgattagctattttgcgcatgtttctcatatacaggattggatcaaagagagtaaggcaggatacaaacagtcagatttggctagtcaatgcacacacaggtgtgttttcttttgttaaaaggaatataagagtcattttgctttgttgacagtactgaccattgtgtttggtgacaggtacaagatctacattgaaggatcagcatggtcagtcagtgagaagtacattctagcgtgtaattcaatgacactggttgttacaccaaaatactatgatttcttttcaagggtgctgatgcccactcagcattattggccagttcgagatgacaataagtgcagctccataaagcacgctgttgactggggcaattcaaacaagaaaaaggtatcatcttttatataacatttaaatatcaagcaacaaagttatgtggcactagatatcagttttgatcatgattggctatttctatgagctgaaacacattggtcaacaactattaatttgagctgaaactccatattcacaaactacttcgtgtgatatgctcaccctgatagtgtgggaatcttttgcaagataaaaaatttaaagcttctaatgttctatagaaagtgatgcccttcctttatctatttaatataagcacattgatggagctgtaaataattgcattgtttttctcgtgtatttcatctgaaagttttgtgcaataaccaaagcattgatgaactaatattcaaaactcgaaattatttcttgatgggaagttatcaaccgtagatcttaatccgtgctgacttgtccaatatttagtgaactagaaatttttacttgtcttttcattagtaatgatcatgtttggagtcaaaggttacatttttctataacatagaatattttaccatatcgtcctgtgatagtaatatttatatgaaaagcatactctcatatctcccttctaaaaactgttgaaggcacaaaaaataggaaagcaagcaagcaacttcattcaacaagagcttagtatggactatatatacgattacatgtttcacctgttaactgagtatgctaagctcctacggttcaagcctaccaaaccacctgaagctattgagatctgtccagagttattggcatgccaagctataggccgtgaaaggaagtttatggaggactctatggttaagtctgccaacgatgcaggcccatgtgatctgccacctccattcagccctgaggaattcaaagaattacaacagaggaaagagaagtcaatgaagcaggtggaaacatggcagcaaaaggcttcgcaaacctgaggatagcaagcattgagagttcactgtttttcctttcctaacgacatgcatataaagttttggtcaattatttagggtcaatggtctatacacatattctgtagtggtaataatgaagagtttttcttattcgattgaatcaaatgcataacatctatagaacttacaaatggttgnnattgtgtgnnannaaccccccccccccccccccccctccaaaaacaaaaggaaaaaaaacacccttcatgcttgttaaggaaatttttacttctaactgtcattttttatactttgttt

SEQ ID NO: 8405 - DNA, 23997 bp, Oryza sativa
tctgggcctggggctttatctgcaggaataattctaatgagagtatccatttcctgagtgaagaaaggatccacagggttgtccagacaaacatgatcagggaaaagctcattcaaatcaaaccccattgtgggcgaattagagacacccattctttctctaaaacttttatagaacaaagctgctttctgctcatgcagggtgaccacctaaccatcatggtcctggatttgggagattgagttagctctatatatttatgtagcaatggactgaaagaactttgtgttttcttcacccagcaacatccatctattggtgcatctttttttccagtacattttcctgaactctaagagcttaattatgtggcactacacaatctccctgaaactcctctcttgtcagagacctggcctcctcaacaaggtctagaaaatcaactgctcgattgcaatttgcaagcagaacatttagtttagataaatttttgctccagcttaacaaccttttcctaagcattttaagcttaaaagagatgcattttgcagggtcctcaaagtcaggatccaaggcccaagcagaattgactatatcaaaaaagccctccacctctacccaatagttctcaaacctgaaaattggggaccttggaattttagtatcaatcttgaccacatagggcacatggtctaaaatgtttctagtcatgggtagcacagatgtattggggaagttcagtgtccaggaggcagaagtgaaaacccaatccagtctttcaaggagagggttttgttgcatgttactccaagtgtacctcctgcctttaagagggatttcaagaagacctaaggagctgataatatcattgaaaatgaagatgtcattcatatcaactccagccttattcgtgtcctccactgacctgtaaaagttaaaatctcccaagaaaagccaattctgctgactttctatgtgaacattctgcaaccaggcaacaaaatctgctcttgcagggccagtacaagaaccataaacacaggtgagagaccaaggctgtgaggattgtctggaggtgaagtcaacagtaaccgaaaattgattgacctcttttgccacccccatgaacaccttaggcaacaaatcatattgatatgtgttaggattcaaaattcccgaatgaaattttcaaaaaacatttttgtgaatttagcaaaatatatccaaatttgatcacattttgttcaaattttaaattatttttggaagatagaaattgccaaaccgatagattaaacctttatctcggttgtgttatataactactagcgcttatataggtagctaattacaagaagtaaaaacaagataatcggtataggttggtttgctttgtgtaactaactaacgacaaagtcagaccagctaatcacgcatgcatgcactttacctccagtgaagaagttaatccagctaatcacgcatggatgcactttttacaacgagtgaaaacaaggcaatcagtgaagaagtttatcatgcatgcatgctatttaccaccagctaacggaattgaggtatggcgagtgccatatctcgtcataccggaagctccgccactggcacaggccatgcacatcttatatagtgaaagcagcaagctttcttacacgagaatgtgccacatcatcaaaaacatattagccgtcggataaatagttcggataaataatagtcattggatcgaaagagtgcatgtattaaaaaaatcacaaatgggctaaacatatggaaatttccagaggtttcgagtatctattgtcctagcaagtatagatactttgtaaacaaattaacttatatcaaaaccttattaagagctaaggtaaactaatagaccatatataaaagttcttaaacaggaccaaaagttgcgcaaagcgtgactatatggctagttttattgaatatagtggaagaaaattgcattccctaaacaccaagggttaaagaaatccacaagtttgccatgtacagatatagctacgatcaagaagatgttttaccgctgcaagcgtccacatccttgtcttctcctttatatttgcaaaaggccaggtgttgaggtctttttgtgctcgaaggtttttggttccttactttctatatctcccacacgaccaacaggatgagcgtgcacatttctctcttgggcatgccttggtgacttgcgagcattttccaacactcaaacattgatctcggactccattggcttggtgtgacttgttgataaactacaattttgtaactagttcccaaattctcctaatgtatttgtattgaagaacaggtgagaggatgattcatttgcattgtgatagagatgaagtgagtgttgttcggtcaaacacgactaccaggcatgcatctgatgtccacgctctattttgtatcaccagctaagtgaagagcttgcattttgttggcgcctaaggcttccaaatgagggcattgaagtttgtggtaactcagccaagacattgtgctttgtaaacggataaggacgtacattcaccgtggttggttagcttctacggctatgttcttatgtcaaggttcccaacctctactcattcgtttcccgcgcacacacttcccaaactactaaatggtatatttttattttaaaaaaaatctatagaaagatgctgtaaaaatcatactaatacatttttcaagtttttgttaactaatacttaattaagcatgtgctaataagtcgttctgtcttcctagattggttcccatccactggtgacgaacacaaccttatgcatgttggatcacattccataaggctactaggtccaggatggtttgcagatgaggtcttgtatccaggtcttattcttcaagtcttggtgcattgtcctttttttttctttagatgttacattcattggtcgcttatgttgattttggaggctacaacaaagagggttttgtttgtctcgtcacaaggcgtttccatgcccacccatggcttccaagattctacccatttgtgccacaaccatttaagccttagggatttgtaaatttctcgagatcgagcgtcctcaacccttcatttgccataggtaagtgtgttctctttcagtcgatcttgcatttggctccaatgaagtttccggagccaacccatatgaatcgctagcattgcttgccaatcttctccaacgacttcttgttgactgtaagagcagtgattacatctgaggtggtggcatttacatgcacaaatatagttttagacgatatttgtaacggaactctggctacaaggtacaaatgctcacttccctattaagtacttgggcatgccgcttgcgtcgagaaagttgtgcaagccacctttgaatggatggcggggcatctaggaggatggtaaggaaggaacatcgggttagcaggatgcacaacccacgtcaaatcaaagctttccttttttctttgcaaagaaaatgatatcttcaaagaacaagcccacaagagacttgtagtctactaagtctcgtcatgactaatttttttcctaaaaggcgacaattaatcttaaaaaaatgtgttatatatgccaacatcatgtcatatcatgatattcatgaggatgacaacgcaaacggctagctacatgagcgccacgccgtcacgtcaacctaatttagattttcatttttttttttgaattgatcgttgttaaactttgtaaagttatgcatgataaaaacgtcctaccattcggtaagaaaaattacgttgtgaagacaatacttacgtatttgtctttctagcagaccgacagattaatttcctgccaaagtaatagccctcgtgctaatagaagtatagaacttctgtaacttttggggaacttttgggtggtcaaaaaaaatgtgaaagaaagtcgttccaaagaattttagttactgttataactgaactttctaatactgccacttggccagtgactcggcgagaggtacataacacccagtttttttgtaagtattccatgttaatttggacgtcgacagatgcaaaaattattttgatatgacgtagaggaagcaagaccacagagaaattagatttatgtattacaacaaatcaccggcctcgacacaaattatttttcgccgtacttttaagtcgtgctcaacgactggctgcattatatgcacagttactttgggcccattaaattattaaaatgctttaatgtaaaattttgctgctaaaaatgcttagtctattcgttgcatcggtggaaaatgccctcaaaaccagaagataggacggtgatagataatattgatgtcttttctgtgtttgttaccctccatttgtagttctcgatgtcgttttattgagttgtgggacatttgtgtcttgtgccttacgtggaactgcatatgttcctgatgattgcatctgatgatctaataagtcctttggttttggtataagcagagtttcgctgtaaataattactcccttcgtcccactcactatgtcatgtacgtattttaaaatttaatttatatttgatcaatgaatattttattataagttaaatattatttgatgaaaataatatcattgattatcatttaaatttacttttatatgattatgattttgttgctacaaacattgtagtatagtaataaatttaaatttaaagattagttagaagattgtgccaaatttaaatgtatcttagtgagtgggacagagcgagcattgttttacaaatgttaaaaactacttaattctattcaaagagatttgctccggtccagcacaaagtatctcaaagtaccggtaactcacggtaccaaatcgttttcgatcattggatctagctgggcaggatgggcattgttagatccaatgatcagaaacgatttggtacggtgaggtattgatacctcgagatactttttattggaccggagcaaatatcttagagtggcattttccttttcaagcttcagactagtagtatttcacgaaattcctccttttcacataaagttagcgtttcttttataccgaaagcaaacttgaatttctcgggactattcggtggagtagtaccaaaatctccaggatgccctgagagcattacctattccaatctgcaaacagttgtacttcgttccaatctcaaattaaagtccattagtccaagcaattcatcagtacagaatacgagtataacagctctgttgacttccaagttcaacatgctcctcctccatcttgatctggtcctcctatcctgcattgtattgatacctgatcaagaatctatgggctttgctaaattgattgcctctatcccggctgtaccgccgtaccaactaggcaactatgtacaattcaaaaaggaaaaaagaaaagctatatatgcaaccatagaaattggagcatgatattattagtacttaggagtgtatatgaattcagttgttagtgactctaaatgggcagagtttctcccatttttcaaaaaatatcacttctggcattattgtccttgtaaataagtaagctattgtgctcgtgagtaaacgccaattggggggtgtttaggtaggctctgcatgagaaagtcttgaatgtcacgtagtagcggtcagtgtcatagttgttagtagttactgaccaacccagtactaggtacaaaatatgaacataacagatcagcacatgacgcgtctggatcatggagtttatgcacgtctgtctgtcttgagcccctgacttacaagaagagattgcctactggctactgcgataaccctgatttgtctacctttttgtatagtgagcaaaaataatctgatgagtcatgagtttctttcttcaaaaaatatctgatggacttaacattagcacttcttgcccacctttcacgaacactgacgtttcctgaagttgtgcagtggcttcggtttcgttctctcgtatggcccttgatcatagttactctgtcaaagcaagccggatgcgttacaacttgcaacactctgaacacaagaacaagaagtcagatcaaagaagaagaatctgctagtaccatgcatggaccaagctaaaggcatagagaaatgccatgtatgtttagtgtcctagacgattaaggcatcccatcgccacagataacgtagggtcgtcacacaggaagactgtcgccaataattgcatctgtcaatataaaattgctgggatatcatcggaacaagttgtgttaagccgccaaggctcgtgtatcgatcggtttcggagaagatcggaagaatgcatgtctgatttgagttgttgcacttctttcagtataatgcatgtgctcaattgtgtgattgcagtgatgatgtaagatacaagcacgtaactcttgaagtttggcggcttcctactctttgcgaactgcggctatcgatgacaatatgggctggtggtcaggcttgtacctgctgctgcaattagatgcagtaggccggagtaatcaatctgcagttcagtaacagtttgttactgtttacagaagcacgggggaattggaggttcaaatcaaacttgagcagcatcttagttttcgtcccatagggaacttgattaaaccataaaggctgcacaagggcacaattatctttttttaaaaaaacgatccggcactatacatgctaattttattgaatagagcaggactaaaaagttttgtacaaatataaaagaaaaatataaaaaaaaaagtaaaactaagtgataagctccgagagacgttctgctaaagttcaggtcttggtttcctcctccattttttgccacgagcactattgatggattttatgaatgttaaaatccattggtggagaactttttgatgaactgcattggcttattggtcagtacattaaaatcatcggatcaaatttcacactacaaagtggtagctactcaatcaccgtaaaattactcatgattcaacatgaatgtatcttgatcaattttatggtctgagaaggtaaaaaagatgccacatttgtagtacaaaatttgttaacaaaacttacactaaaaatttaatgtatctccctgtacctcccaaagtccataaattttttctatattttggttccgttttgaacttatttcatttacattatttgatggattattaccgtggattatctacttcattgtaggttatattaaatattttagaaaataaacacacaaatagcttaaaacaacctaaataatataatagcagaatttttttaagaaaaatatttttcgaagcgtggagaaaaatccgtttcaataatctaatgaataatcgaaaaaaagggccaccagaacactctgtccttgaattaggacatctaaaacgcaagagtgagaaaaggtcacagaaattgacactacctactaatgcaactgcataccataagttaatgatcacagtcaggaaacgactttagggagaccacatacgtatattttcttagcactagctagcataagcatatctttctgcagagtccaaaacccagtttgctaccctaacaaaatcccctcttgggggaaggattgtatttttaagaagcatggatctgtcttgtgcaatattaattggggtactagtactaaataaactccgtagagaaatgtcaaagaaaaaaaagtattgtgcaatactaaactccatagagaaatgcaacagaaagaaaaaaaaaaggaaatgattgtcaagcaatatgcattcacctactccacgaggtgattaagtttaagaaacagtcagcaaagccagcagcttagcctttcgtcgtttcccctgccctattcagccaaaatgcaaaagaaaatgctcccggctctcaaacttgagagttgagacaatatcaatcaatcaacaactacgcacatttttgcatggtgcattttgcgtccattttatcttgacgtggtcgtgatctcactacgactctagaaggagtacaaaaatacttgctcgttgtttgcatgcgtacacagcgaaagtcccctcctctctttgtagccgacagaagccagccgacattttgttccgtcaggctataccacttgtagtcagtagagtgatgttcagattgtgacagtgaataccaaatactgcacatgtctgtacaagtggcttgcgtgcttgatcgtataagggatttataattatataaatggagaggctaattcaagaaactagcccgtgaaaggacaaaacattacttcatgtattcccaataaaatactccatccgttcaaaaaaaaaaagcaaaccctggatttctgtgtccaactttgactgtccgtcttatatgaaatttttttataattcgtatttttattgttattagatgataaaacatgattaatactttgtgtgtgacttgtctttttaatttttttcataattttttcaaataagatggacggttaaacgtttggcacgaaaccagggtttatcttttttttttttgacggatggagtatgtgttcagtacaacaaaattctctgaacgtcactaaataggtttattttagttcatcccagttcataggctaaatatttgtacgtttcgtagctgtccgtgagcttttaattatgagaccaacatatatgtggtcgtcatgaagtatatctgtgtatacgaagtgttattataccactttgatacagacactctaccgtgcgccagtagttctctgtcaacgccaagcaggggatacatgcaaaacaaacatctggagttcatgtgtccgcttcaaatgctgttgcggtcaaattttattgaactatcaaccttatgtaagatttgattgagttcttgtaaatattttttcaagttttaatgaatagttgagctctctgctttactttaaagaaaaggaccgagttcgggaaagagaaagacctcgcttcactagaagacatatgtccacataaagactaactgaaatgcacaacattaacgctttgacaatattattatacgctaggtccaatcttcaggcatactggtcgcaaatttgtttatttcttgagataagatacgctctgattaatgaagattgcatttttcactggagacagacgagaggtatacttgagtagtggttcttttgttgagagacaaatcatataaaaataatgagcttggttaactagaaatgatatcgtaaaacacagcagtctccaaaagctagtttttttaacgaaaaaaaaagctagttttgtgtactctcgctattggtggatcgcagaagtccacaaccaacccacatttatgtatgtgaactggcaatttcaaaatcagatgataagggaggattcttgcttaattggctgcaggtatcattcttctgaagtcgtttgtaccaaccacaaaattaacaaaaggggttccatcatctcctgattgcaggtgttgctgaaccgagcaaacgaattctctactgcacagttgtacttcgcctcgtcagaaaagattagccacagtacgtccttaaaagccactttgccattataaactagtactaatcatgagctctgtacaatgcgataagatttgttcccatgagcaatcatgcattttgtggcggccactgtatatatgtcccccacaggttaacaggatgggatggaagtggtgccataaagttacgtataacctaattaggacccattcttgaaatcgacaaaagcaagaaataattctaagcattttttcagagaaaagattggtgtgtgtcatgcagatatgcagttcgctggcccggcgaaaaaagatatgcaggtcgctagttcagatagatttgagggcactagtcggtctactttactgtatcaatagctctaaaattcaaagttagtgattacaaaattcaatatatataatcaaccattccaacatactacttttgatttctgttttcttaaatttaatattcgaaaaatttataaaataatagatacaaagttattatactcctacttgtcatatggccttcattttagtttttcttaattaaataatataattctgaacttggaattaatcattacaaagttgtcctcggtacggactatatcagtttatagtatttgactattgccagatttatttgctactcctattagcatgagatttttctccaagtatcaatttagtgtgcgtgtgtgtgtataatgggaaaagaagtgcacttgaactatttgctcaatcctgtatgtaccttttgttacaaatttctcttttgtagcagttaatgtttgaagaatggtcaactgtagtccttcattggtacatgagaaaaaagaaatactttaccgtgtaaagtccactgaagaaattttcgatgaaaaccgactttttcttaatcctttatgtctccgactacttgaaaatgtggataaacattatagttgtattaatgttcatacgagtaggatacgtagatacctgtctacacttctactgtgtttttttttaaaaaaataagtttacagtctttatgccttggactacttagaaatatgaatgaatattatagttgtattgttcatacgagtaggatatgcctgtacatgtttataatggtatgtgcgtatgtacgagcgtgtgttaatctgtaccgtgctttaaaaggagaaaaaaaaaacataagctgtcctacgagtcctcctgaccatgacaatttgtcactagcatccgaggaggaaaatctcctcaccgttgctagagacttgggacgatgcggggaatcttccttggaaagaggtgcgagagaactagagaagggcgttatcaagatgcagggaaatcctccattcctcccatcaaatgcaaagaacaaatgaagtggcgggaccgcgctcccctgctgacagtgcactcggcagcctacaacagcagcagcatggcatccccttttttctctcgtagcgccatgcatgcacgatcagcacctacgcccccgcaatattattatatggctgtcacgatcccacccctttgatgagaggcccatgcatatgcacggttacatcacggtgcacacgaacgacgcacccctctcgtcctcactgtccctagctcttttaaatttctttatggttccttctcttctagtactcgtgaccttctcgcagctctccacacggatgcatatgcttcacccctctctgtacattcacaccttctgtcggtgtgtcgattttaacctgaatcatctgggcactatcacactactagtagtttattcagctgttagtatgttactgcacgacgtgcacatctgtacttgttcaggctcctgttgcaaacgcacaagtcccactcacatcgaacagtccatacagttttctttgtgtgggggagagcatgaaggggaggatcccccacgatttcaccggggcctagtgctcctcttcccgattcggccaactgggcagctcccatccctgcaggtggccacgtacaccgtatccctgatttcctatgcgtgtccgctggccaccgaaacagataagcttatttcctactcctagctagcttagctatctcctggcaggctggcaccaccaccagctcccggctcctgacaaaccgaaccatccaacacgtacacgtacacgcgcgtgcgtcgtcgctgcaggcgacaccgggcgagtgatggcaacgtccggacgtcgggtcgtaacctgtgcatgccatgccaaccatcctggggatggaccggatccactgctcacgtcgacgcgacgtagcgtttccaattgaccgcggcggcgtcggtggggcgacgacgagaacgtaccagcgcgcgcgcgcgcgtcgcgcgggaggaaacgagacgagaggtcgatcgctagcgcccgcacgcggcacggggtgaaacgctggggaggccacgttttttttttcttttttggccccgttctcgtgcggttttgcgccgtcgggtaagcggttaaaatccccacacctaatcaaacgcgggctcgatccgtagccgggggagatgtggtgctcctcctgctcatcatcatatggcaatcttggcggattgattagcaggggggagggggcagcacaaaagcgtggcgttggttccgggtccaacggccccgaatctgaaactctgaaactttcaacaacggcgatcgatgatgagtatcatcggccagtatggctgattgattacagggtctgcgtggctgcaattcgatttcgtttccatcttttggactttctgtactcgcgcggcgttgaatggatagaggggacgggacagggtgtgagcccctgtgttggttcctgctgtgcctgtgctctgctacatcattcttcgcttctgccacaagtcacaaggcctcctttttctcctatatatggagaaaaaagcgcaaataaatattttccgctttttagactctgctgcgctttgggataaaaacaagtgaggaaaatatgcaaaagaaggaagagttaattaattaatcaacgctacgtatatgcgcgccgtgttacgtatctcttgctgactttataggtaggagtactgatttttcctttttaccgctgatgatagtatatacaaacgatgttacttaccaagtgacaagacgtggacgtgttgctcacaatagtttgaaaaataagtaaagaaactaataatgcgtttttagacgggccgcgagaggccagcaaggcgaagagaaaaacggtgccgtttggtagtctttaagctggctacgtcatcgcacaatttgatcgttttgcccccaccacggggactcggggagaagagccaagccatctctgcagctggcttcgatgattttatgaagtgcgtagtacgaagtttacatgcacggcttgactttctttacgacctctctctcacatctcacctcgtgaccaagctggatatagcaggaacagtgccatgcgcccatgcttgcccgtgagaaaaaaaaggggagaagttaagtaaggtgagaaaaaaaaaagtttaaccaggattcgactggatacgcctttgcgtatttatttgcgaaaaaagagaagaagagagtgagaggaaaaccaaacacttcttttattaatcaccaccgttcacgtcgcctataaaactcgtacctacctgtctcctccctgttgaaacggcacaaagctccatccgttctgaaggctttgtggccgagttctcctcccccacctcctcctcctcctcctcctctgtagccgagctgaggccaacgcgagtagtgacattctcctgcaatggggtgcaagtcgtgcgagaagcccaggccgaactaccggaagggcctgtggtcaccggaggaggaccagaagctccgcgactacattctccgccatggccacggctgctggagcgcgctccctgcgaatgccggtaagaccaatcgccgcccgccgatgccgccgacgcgtaattcactacccctgccggccgccgcatgcagcatttgcgctccccaagcataattcgcgagctctaggcgcattgcaccgacaattatgcaccgaggcacacacacaaaatcggtgaattcgcgtagcctggttgcatgcggttctctttgctgaatttctcttgccgacccgtctgaattatgaaccaaaccgttctctgaacaaacaagactctgtttcttagccaattcgtgattaaatgtgcattgtgtgttgctgcttgagagctggtctcacaagaatttgtccggcgatcggtgcagggctccagaggaacgggaagagctgccggctgcggtggatcaactacctgcggccggggctgaagcacggcgtgttctcgccggaggaggaggagacggtgatgagcctccacgccgcgctcggcaacaagtaagcttttctaactagcaactcccccgacgagtctcgtcccagtcgggtccgtgcccagtccccacacacctcaccggcagcgcgcactcgatcgttcgcctttacacgcaaaatgattgagcccggagacaattctccacgttgtgcttgctagctgctgctgctgatgctgccttttcctttttcagtttagtactaatctctctctccacacttaattaagctacctagtgtagtactagtactactactactagactagactattagtaccaacgcaacagcggcactaatctttttcgtgagaaagctagttactctagctgatttgtcccagtccgggcgcgctagtgccgagctggcaattcgggttctagaacgcgctgattgacagattgtgagtgacagagtgagtgaaaggagaggaggagcggagcggaggagcggagaaatcaaaatatgaaatggtggaaagggagaattaaccggggtgatgctggctggccgccaccgcgaccttttccgtagtggagctgatgctgacgcgcacacgctccaagaacgctcctgcgcattcgaaaaccgcgagatttttcggtgcacgttgcgatgatggctagagaaaccgttgtgtgttttttttttcccctttcttcctttcgcgctagtacatttgtttattgtaaagtgcgggccactctggctgagcatgagcaacaaggacaagttgaggggggacggctaggataatgtggacttgcaacgctaaatgccacacagtacagttgcgtgcgtcccagaacaagttagctcgaattaattttttttttggggggggtctatttcttcgatttttctatcttttttgtacaggaaaaacggacactattcattttagttgtacagcgacgacgataacatgtcgtcgactggttggaccaatccgttctcagttgcgagttaatgaaaacagctgccttcacaatgcgaaactgtcacgtaggagtactagtctcgcgagaagattagattctttattgggcgtcgcaattatgtgcttccttacaaaaataaaatatcaaaggattagtggtccacatgaatagactacgtacacgcttgtccctttcaccccacaagtgacacattacatttctttaagctggtgacagaggaaaaggaaacgagaaattggaaagaaacctcaacttgtcaatgcaaaagctttgggttttccactaacccccaccgacagaaaccaagattagtgaattttaagctgtggcatactactaaccgtaaggcagagagagactgatcgatagatcattccaaaaggataaaaataacctgacttaatcactgacagcaatttttctactgcaggtggtctaggatagcacggcatctacctgggagaacagacaacgaggtgaagaactactggaattcttacctgaagaagcgagtggagagcggcggcggcaagacgagccaagggccaccaaccacgcctgcgtcagccgcgagctctcccgccgattcagacgactcgcacagcctgcagcagaagccgcacgagccggccaactccgactcgtcggagccggcgcacgagtcgtcgtcggcgtcggccgactcgagctgcctgacggtgaccacggaccacccgcccgtctcgaggccccacgcggcagtgacacccaaggtcatgttcgcggactggctcgacatggagtacatctgtgggcaggtcgcggcagcacctggtctggacgctgccggattcgcggtggttggtggtgctgcaggcgatcagcagcagcagcagcagcaggtgatgagccaggacggatcggttcatcaggccgatgggccatcgtgcggcgtggacgattcttccctgcagcagcagcagcaggaggggttcggtggcaacggcggctgctgggattttcaggagcagttcgacagcatcgaccagatgcaggcgagcggcggcggcggcggcttctgcgacctgctctccatgagcgacttcgacctctgggccgagctggaacgtaccgcgtgatgggggaacgacgtgctcaaggatcgatttttaattagagcttgttaattcatagatgtcccgtggaaatcaaattaaggggtgtttgtaatactactgcattgtaaattatcgcggtgtatttatagagctgtttaaattagcaacatatataaggaagatcagaggcatgataagtcacttctgtacgaatttatgtttgccactttgctttggagagcatgggcaccgacagaaagatggaaaggaagaaggaaagctgtagagaattgcgcctatggatgcaattattttggtttgtttattgttgacattatctttgtgcttatagtgatagcattatggaacaatctattcatatctcactttcaaagacccgctgtgaagttccaagttttgttccactccatgaactgtcagtgtatcagaggtcccttcctttacacgtaggctttcatttccacataactcgtaatgattaaaagtgttcttgtaaatattggatcaatttcaactagtgttaagaaattgcaccctcttttataaagaccaatctgttagtgcctccactttcttcccttttcttcctgcagaactttaattttatttctttttcttccattcatctctttaaatgtacatatattagtagaagctcccacttaataaacgtcatagggttcatttgttttaaggaaacaaatcctataatattattgtccccatgacgtggttaatggcatgtgagacccattccccatgggcccacttatcagctaccacgtccctactactctatgttatattttgcattactcactcctaagttgtcttttttttggacggagggagtatatttttatgtttgactagaatatcatcgttacattttttttattacatactccctcgttccagaatataacaactttgagcactcaacatttgtcccaaaatataacaacttctccccagcaatctcgttccaaccaatcataaccctctaccattcacttttcccacctaccttcactacttaaccaatcataactgtaacgtcccgccttcccccaggccgggcccgcttacatctgatagctttcataggtcatacactcgtgtgcacccgagaagaatttcccggtcggtcacccatcccaaattgctccaggccaagcacgcttaaccctggagaaaagaagttgcaacttgccctaggtcgggatgttacaccttcacccccttaagagagatcgacgcccccgtcgatcaaccctaggccaggtcccacctaccttcactacttaaccaatcataactgtaacgtcccgccttcccccaggccgggcccgcttacatctgatagctttcataggtcatacactcgtgtgcacccgagaagtgtaacgtcccgccttcccccaggccgggcccgcttacatctgatagctttcataggtcatacactcgtgtgcacccgagaagaatttcccggtcggtcacccatcccaaattgctccaggccaagcacgcttaaccctggagaaaagaagttgcaacttgccctaggtcgggatgttacaccttcacccccttaagagagatcgacgcccccgtcgatcaaccctaggccaggtcccacctaccttcactacttaaccaatcataactgtaacgtcccgccttcccccaggccgggcccgcttacatctgatagctttcataggtcatacactcgtgtgcacccgagaagaatttcccggtcggtcacccatcccaaattgctccaggccaagcacgcttaaccctggagaaaagaagttgcaacttgccctaggtcgggatgttacaccttcacccccttaagagagatcgacgcccccgtcgatcaaccctaggccaggaacgtcctctcttggccacgtccatgtgtccagtgccagcgcatgcgccatgctgtgtaaccactcccggtctacaccagccatgcgcaccatgccatgtcttttctgcacactttgtcctcactcgtgtgcacccgggaagaatttcccggtcggtcacctatcccaaattgctccaggccaagcacgcttaaccctggagttgtttggagattggcttccggaaaagaagttgcaacttgttgatatgagtattctattaatcctattaagccttaggtcgggatgttacaataaccctccattattcacttctatctattttcttaataaccgtgttcaactctaaaaatgcttatattctagcacggaggtaatactttttatttctaattttccaacagtgtaacaaaaaacaatattaccatatttcaacttaaaaaatttaatctttcggttggatctcccatcaatgtggagtttcagctttattctatactgtaccttcggttgtatggtatactatggttatgcatcatcccgtatacgtgacgtagaagataggaatagacatagagcattatttaagaaggataaagctttcttcaatttaaaccaaaagaaaattgatcgtaaagaggaaaagtaaatggcaaatatatcaatagtcatttcttctttcatgttcttctaaatggctataaaagcatctcctttgttgatcaaacaatgttagagatggagttcaggttcgagttcccttaataacaacggaaaatacttgttttacaaattagacttgacttatcgagccaggaaattcctatgcatatgcaacatcttgtgatgtctcacgtctctctttgcttgccaaggtctaagtgagtgaagatcaagcacacccttaataacaaaagagagaagttatgtttcaactaaatatataaaacatagctcgcccaaagtttagcatctctaaagcagattatttccgacttccatcctctgttaagagggaatccacaaatgccccatagatcatacgcagactctaatttgactaatttgaataataattcaaaactattttaaagagacagtgattacgagacattcatgctagtatgttgccattcaaaccttccaaataacaacggtaagctatggatttttttagaactacggtaagctatgttgatatactctttatgcttagggtgtagtcacatacatgttcttttttaccccaattaaatatcatcttttggcacctaaaattctattttcatattatttgtcgtagttacacttaataataacaattaaaacactacaacaaccatttacgatatatctatattaattatttagtcattatatttctatgctcctgctaatagattaagggttaaacttgatagatggaataccaatcacaagtagattaaaaaaaaagtaaaagggtctcattgtttgccttatgtttataagccaaagtttaattttgaatatgattttttgttttcttcatcatagtttattttacatcatttgtttttgagttgctatggacatgtatataaaattttactcataaataatttttatttgctaacaactgtggagattatgggtaccctatacccacacggcatggttatccgactagttataggggataacttatatctatagaatatgtaacagattatgacttgggtattacgtttccttgtatattacggaacggcctaaagtcctggtttgataagattgtaaagtagatttaggaaaccgataccatattggttaaggtttctatcttgtaatcctgccccccgtcctatataaagtgggcaggaggccctctagggggcatatgagcacatatgatcgttagatctaaactacatctggcggattcaaatcctcaaacaggagtagggtattacctctcattgagagagcctgaacttgtctaaatctttgtctccgcatccatccacttttaggtctcgtgcgctaccccttttattattgccgaattcatgtttcgacaacaacatatttggagtctaatcggtagtgcttactgcagcagcgcagccgcagccaaccagcccaaatctacacaaaacagttgatttgcagcaacatcaacaaggtgtgtgctacttgttggctgctgctgcactgtggcagccagcacaaactcaatgccttagataataagggagtgtttgaagagaaggggattgaggagattgggaagatacgcaaaacgaggtgagccattagctcatgattaattgagtattaactattttaaattttaaaaatggattaatatgattttttaaagcaactttcctatagaaattttttgcaaaaaacgcaccgtttagtagtttgaaaagcgtgcgcgcggaaaacgagagccaatctcccctatcacccctaaacgaacgatgcctaagtactttgagtaagcgaaacaatggaactggaagattgttttgaatttaaaaatacacataaaaaagtttgaaaagaagaccctgatttatcagcaattgagcatctcggcaaggttctcgccgctcggcgtcccggcccagccttttactcgtgggcataaaatagacagggccgatatcgtaatttcctccttcacaaatcccaaaccgccggtgccctagctatcgacgactcggcggcgacgcgcctccctggctccctcccgtcgctcctcctccccgacccacgaactccccccaatagggcagaaaggaagttcaaatttgctcctgatccgagcgccaaacgcctagattccaccacccaagcctcctctcccaatccgatctgccgttccctcttcgaatcggctcccccttctcgccgattaccgacgaatccgaggccctcctcctccttcgaatccatggatccgcgcgccaggtaccctcccggcatcggcaacggccgcggcgggaaccccaactactacaaccgcggcccgccgctgcagcagcagcacaaccaccaccagcagcagcagacgtcggcgccgcaccaccagcagtacgtgcagcgccagccgcagcagcatcaccaccacaaccaccaccagcagcatcagcaacagcagcagcagtggctgcggcggaatcagatcgcccgcgaggccgcgggaaccgacaggaatagcgagccgaaggctgtggcgcaatccccagccgtcgacggcatcgattcgaggtgagaccgtgagacgcgtaggccttagagtttggcgatagattatgtgatgttcaacttcaagggatgaattaaggaccagtgttgtgggtggcttgtttgtttaatttttttgtggcgaaattggaccaaatgcagtttgagacatatgctttccctgcagcatcctgcgaagtgagcactgcaatttcgtattccgtagtggcaatcactgaatgttttttgtccaaatatgtgttcatatgttgcctaggctggtactggaactagggtttgctgcattctaggtttgtaatttgtgaaactagaagttctacaaacagtaggtaggctggtgaataatatatctgatcattggcgcagatatggttatcacattgatcatatgctcaccttttgtgcagttcacaagactggaaggcccaattgaagcttccacctcaagatacacgatacaggacagaggtaaatcgcatttataaaattttcccctattttttcttcaaagccaggcaaccggtgctttgtatgctaaggattacacttgacaattgtaattgcaaaacatgttgactgtcatctgcgctttgccctacctatcaattgttattctgccaaacaattcagtgtggcaggagttcctttacctttatgattttttggtgtcgcacattgtaagctaattactatctccagtcacaaatacatgtcttgaaaattgacatggccttccaaatacagctttgacactaatttctaatttaatgtattaatagaacccactaaagttataatgttatgaaaaatcacctttcaagacaaatttacatatattatgttcatgtatccaatctaaatattgtaaatggtcttgaaagttttactaaatgcttgtccaaaacaagaattatttgtgacccaagggattattaattccgatgattgaaatttaatttgctaaactgggtttgaacatcttttcacacccatgagatatcctaatgttgctaatcgatgctctttatttctgttatccaattcaaacaaacaaagtttaatcctatgtggtcattgtaatatcatgttgataccttcttgtctaaaacaaaataataccttgatgacttaaaacatgcacattaagtgttgttaagctggaatgccccaagctccttactatcctggaggccacatgactcagttaaataattaaagtttcatcttactgagttactgtgctcttatatgttttcccttgtgctctttaatcttatttgtataattttatctttgtatagttcttccccactgtcttgattgaaagaataattgaattttcaaaagaatgtgctctcatggcttgagtttgctctggatatcgacattcttattttcttgctcttattttttttgcctattcttttattttatttggagatattatttatgagtttatatgatgttggtgtcatactctctgcatactttattatattctgctgttgttgcacaggatgttacagccaccaaaggaaatgagtttgaagactattttctcaagcgtgaacttctgatgggaatatatgagaaaggatttgaaagaccctctccgatccaagaagaaagcattcctattgcattaactggtagtgatattctagccagagcaaaaaatggaactggcaagactgctgcattttgtatccctgcactagaaaagattgatcaagagaaaaacgctattcaaggtttgttccagaatccaaactattaaacttattttgtaccaactctcacagtcaaacatgctataaacctgtgcctttataatgcctgttggacctcctttggtaccgtttattttatattattactttttttggggtgttggggggggggtggcctgtaggggatcttctttagtaaatataatattatattgtgcaagaatggttcaatgattgctcttgttatttgtagttgttatattggttcccacaagggagctggctttgcaaacgtcacaagtttgtaaagagcttgggaaacatctgaagatccaggtcatggtcaccactggaggaaccagcctgaaagatgatatcattcgtctctatcaacctgtccatttacttgttggaacgcctgggcgtattttggaccttacaaagaaaggtatctgcattttgaaggactgctctatgcttatcatggatgaggtaattcatctattctttgcaattgatattatattctcatgaaaactgttcagcagttcagtactcagtgccttcccagttgtatatgttatttcatggctcaaaagattattttataaggagaaattagggattgggctaaaaagaatagtaaaaatctcatttacaatcaaacaattagtgacaaaaaaaattagtgtttctatatacttaatgcaagtattttttttagttgctctttcctaagtttttccttcaaattaatgtttgcatccttcttgggttgtgctgaaccaatgaaccccgtttcttgtgtttacaactgattattctgcttgccaatacccatatgctgaattcttgttattacactatcccttgtttgtacttctttccagatatgtttgtctttagtaaatttcacgaaagcccaggttttcaggcatctgtaatgcaaaacccattgtattttaatttgttttaatgaaccccagattttgggaaacacttgactacctattgca

SEQ ID NO: 8406 - DNA, 20728 bp, Oryza sativa
tatagaatactcgagctgccatgcttgcaggtggactctaaaggatccccattcagccatgaggaattcatagatttacatcagaggatagacaagtcaatgaagcaggtggaaacatggcagcaaaaggcttcgaaatcttgagtatagcaagcattgagagtcctctgtttttcctttcctaccgacatgcatataaagttttggtcaattattcagggtcaatggtcaatacgcatattctgtagtggtaataatcgagagtttttcttatgagattgaatcaaatgcataacatatatagaccttacaaatggttggaattttaaaaaaaaaccccccccccccccccccccctccaaaaacaaaaggaaaaaaaacacccttcatgcttgttaaggaaatttttacttctaactgtcattttttatactttgtttgagctggaaagaaagaaaggattttgaatcccactggaacagtattcctgaaagtttttaccggtcattttgtaccaattttatgagaaacaaaattgctatgaaattcttagatcatactttctataataattaattatttgaggaaatttatgattaagggcatgtttggggagattctagctgttgcagcttctcccagaatcagaagatcccttaaacagtcagttttttatccagattatgagaagctgtagttgtagaatccagaaaatgaattagaagccagaagctgggtagattatgagaagctgtagttgtagaatccagaaaatgaattagaagctagaagctgggaaacctagctactccatattttcagaagctagctaccaactagttactctcagaatgttaagctttccccaaacaggccctaagtacagcatatcctagccgcccctttctcaagggaaatggcgcaaggctaaaattagaccgttttatttgtcttgccctgtccatagaagtctttaattttagctgccttagcggcttcaaaaatgactcactatgtccataaaagactttaattttagctaggcatattaagtaagatattaaaagatcaatatgacattcattaatatggagagaaaacaagaagcagaggcaaataaggacataaaggaagtgtaacgccccgatttccgcgtggcgttaaaagctaattcaccgaaaaccctaattgcgaaagttttgattcttttgagtgatgagtctaagttgtgccaaagatcacaattaaaatccctcaaatgtctcgataccctgttatcaaagatcgtctccacaaaatttccatcctaatataatcccgaagtttgatcccttctattcggagttccgtcctgaaaccccacccgtgaactttgtcgaatgtccgaaccctaacccactccaatgattcacctccgattcctaaactctctcattagttccttcaaaccgattctcaaatccgaattcaatctctcaggttttgattcatctatctttctctctttatcggttcgtcaatctacccttgttttccttctcgaacttctgacccaagtctgaatatgcaaatcgagaccacttccacccttgaactctaaaccccaaggttcaatccctttcgccttgagttcttcccaaaaggatatccgttccgaaataatctcgaagtccgaacccttctattcagacttctcttctaaatcccttacccgcatatcccgtcgagtagtcaaactcaagctcccaagttacaatttctttctctaaattatccatctccctttgactcgtctctgaatattgttcccttccttgactcctttctattctcccgagaccgagtatcaacttcgaattcgaatccagactccagccctaaaacctctccaattaaacctctctgtgaacgtctaatttaccccccccccatggtggtggattcccttctttcatttcctcccaggtccacctcttcctactcttccggcccatatctctctccctctaaagtctagacctatcaaatctacctatttatttcgcccctctctctacatcgatctacctagcgatctatctatcgatcgatcgatccatttatctatctactatacctacctatctgtttacctatccatccgtcaatccatctgtctatccgtccctctacctatcgacctatctctctgtccatctatctatctatctttgaactctttcccaaacaattgtcccaactccaagaatactaggttccttttgaatccctctcaaataactcttgagccgccaaacacagaaatattccagaaatatataattcccgcctttgaagcccttccatgacacccccatatttgccaggatcatatatccgattggaatccaattcccgactcaaatgctcctcaaattccttaaagaaattcccccgaaagtctatttcacctccctcttggtcgttgggccgtttttccctttgccggcccatctccacctctcggccgctcctcctcccccgcacgtgcgttgcacgcgactgagtcgaaagagagcgccgctctctccctctctctcggtttctctctctctctccctcgatcgatcgatgccgtccctctctctctatttctttctctctctctctctctcacgcgccgacgctgatttcccaccaacatcgctcaaacctccaccgccttcgcccgttcccgcgcgctcgcgcgtggccgaccgcccggccgccgccgcgtcagccctggtcccgccactagccaccaaagcttggaggcagagaagctcgcctcgtctgccgcatctcctcaaaatgggaaaagcaaaaccccccctttccactgcctcgtcctccctttttccttcccgagctcgaccgctctccccctgtcctcgtctctttgcacgcagaggcagagcgccgctgatgatgccgcagcagcttgcgcccccactttggccacactgcgcaaatcctcccgccctcgcgatttgattctcgccgtccaacccaccgcctccaccgcgccctttgcatctacgccgtcgctcgttctcgcgccgctcgtgactgcagccgagcgctcgaccaccaagtcggtttccccctccctaaaccgacctcgcctccgctataaaaacccgagcccctcccatcgccctctctcgttgtctcgcctcctctgcatgccgcaccattgccgccttgacctctcgtcgtcgccgtcgcgcgtgctggtgaagccggcgtgcgcgcggggagcggaagaggactccgggcgccatcccttcttccccttccccggcccgaggccggagagctctcccgcgccgccgccgctcgtcacggcgccctgtcccgacgcggtagccctccgttcctcttcctcgctcaccctctccctcctatagctcgcacagtagctcggatagccctccggtagttcgtagaagcccccccaagccccgcagccgcctggcatggcctcgccgccattgccgcccgctcccgggggccgccgccgtcgccagccctcctcggtgcctctcctccccatccggcgcctgaaacggattccccgagccccatagatactcccaccgccttgaatcgaatcctcatcgcccctccgccgtttcccccttttctcgtcgccggcgtgcgccgccgcgattcgtcgtcaccggcccctcttcgaaggatccgatccgttggctcatcccctctcgtgctcccctttgtaccggtgaactccctctcgatcgaatctccgcgtcgtgcttcggtgaagccccgccgtcagccgccgttggttggagctcctgtgcatcttcctcctctcgcgcggcccgcgtggctgccacgtaggcgccacgtcggtgccaccttggcaagaccgagtcaaggcagcccagtcagcctccccctccgtccctttcccctgtgcgcgcggtccacgacaagtcgagcggctgcaagtaggcccgccgcactcccgtccacaccggcgcaccacccaaaccgcgtccacccaaaccctagcgtcgcatcccgcgtgcaccccttccaccgtgaaccttgccgccgacaagcaggccccgcccgggaccccgcgcggtggaccgcgtacacccggtcgaactccccctcccacgcgcccctaatggaccgatcacccgcgcccgcaccggcccaatggcctgaccgcactgcgcatgaccccttgggccgcgcctaagccgcccgaggaagtctaaatgacatccctcctatccttttcttttccaagggatttaatataaccttttccctttgttccataaatcaattccttattccaaaattccataaaccatttcctttggtccagcacgtcagtgactgtcaataatgttcttgagaatattatttctataaattccataaaccatttctctattctagaaattccatttaaacttccgaaattcatatctctcaatccgtagcttcgattgactccgttcaacttccagtaattccgtaaaattgagatctatctaatggtactattaattagtctaaataggatctttcttttggtcttttgtttaggttttcgattgtttgcgtatagttgcggttgcggatttttgtcgatcagggatttctcgaagattcgtgagatcaagaccctgagcaaggcaagccacctttgaacatcttgagcctataattgaacttaattatattgcttgcaaaatattatgcattgataggattgcacataatatgtttgccccgtctgcgaggcagatcagtgggcatacctaacttgttgcatttgatccttccattgttaaattgttatatcatgtttccttgtaaccacctggtcgagcctcggtattcgtgcactcggtgcgagtatcgacggtcgccgtcaaacttaaaatatggtaaacatcttgggtaaaacttggtttacaaaacgattggaaaacccgacgcctggatcggtgccttgtgaaagaaattgagatttaaaaataaaaatcgtgacacaaggccattcctgggcggaatgcttgtgcggtcgcatttaaggaccgattccttcataattacatccgagcatataatagtgcaaccacatgggtggagtgggacacccctggctgagtaattagctaatcaggggagccttgatgccgagagacaagtggattcgccggggtagtgtcggggaggacccctaggcttcctggcacagtatggtctgggacctaacctgttgttggtctgggacccttctcgtcggcatatggtaaacctgtgttggctttggaaatgccttgtcatgaaagcttggaggtctcccgacgtggctgatccccacaggctgggtgatccgggttagtaatgtcatgtgggtaaagtgtaccccctctgcagaggttaacaaactgttcgaacaaccgtgctcacggtcatggacggatgtgaggtgattccttagcgtagtttttcgttttacccagttttatgaaaaagtgataaggtttgggaaacccgatatttggaaggcaagtggctgtcagggagacagcgggacagggagtccctaaaagtgactggttgtttggagacaaccaaaactctgaaagtctagaaaattggtttggtttgggaaaccagctttgaggccaactctgggagttgtgcaaatcttgataaaataatattgttcactcctcacccccggccgagttgagacttgtcttgctctggtcgcggaatgcacacacttagattgtcaaaatgcttgcaaataaaactgattgaaaaataacagccttcccttgaagcttgcattaaccacctaagttcccctggcttgttgagtacgtaagtactcacccttgctctctatataaacatagttctgccagctctgaagatgaagttgaagcaaagattagggtttcatcctagttcccagccttcgcctgtggtgttgggtgttagaccgttggttccgctgctgctgttgttgttgttggtgtttcctcgtccgcgtcgtcggttgtattctcgggctgttctgagctgtaacctaagttaaggtaaataagtcctctatttaatttaaggattgcaatgattcatatttatcaccgtgggtaccagcgctatatcctaggactggtactgagattgcggtttcgtaggaagcggttcgcaccgtttttcctacgacacgctcctgtcaggtgccgttgtacgacggtaccgaattggggtgtgacaggaagtaccattggttcgatggctaaaataaaaagaaaaagatcaagtagtatttaacggatttaatgaacaaattttcaagcttaagagagtttttagggaccgatggagtatagaggtatattcaaccgcttcaattaggatcatggttttttttacctacttcattggattattgttacaaattatatgttccatgcttctaaacatatgttattttttagactactcgtggcgtcgctgcccaggcgccaacttgtgtgcgtgccaatttgtattgatctgcgtgttcaccttcatttcttttctctagtaataaatattaagttcctgcttgttatccatttatttgttttaaaataatgttttttgtgaaaaaatgttcttctatttgttaaatttatttattaaaatatttaatttattctctataacatagataattcgacacaataatcggatggctagtctattttaagtggaaaatctaggtatagcatagaaagccactccttccatccgttctaaaatataatcgtttataacatttgaaatttgtactataaaaatataagagcaagtataataaagagttataagaaagctgaatgctgagctggatgagagaggagaggagagatattagaagcggactgtaagtttacagccggcttaggcacatgaacaaaaaaaaaatatgtgagacagacaggtggaccatgtatgatggttcccaacctctccttctcgatttccgcgcgcacgcttttcaaactactattttgatgtgttttttataaaaagtttctatacaaaagttgcttaaaaaaatcatattgttccattttcgaaaaaaaattagctaatacttaattaatcacgcgctaatggatcgttccgttttccgtgctagagccaaaagttcccaacctgctctctagaaacagaaacagagatatgctataaagctctagtattagcctttgctctaagcatttgtaagcattattgagagcaatacttgtcccatcaattaatgagccagagggacaattgacaagctagagatgcttgtactactttcgtcccagtataagtgtagatacggtttccgtatccaatatttaatcgtccgtcttacttacaaaatatatataattagtatttttattgttgttattagatgataaaatataaatagtaattaatatgtgactatttttttagtattttcacaaatttttcaaataagacaaacggtcaaatattggatactgaaacccacaactgcacttatattgggacggaagtagtattttgaaatggaggaattgacagcttagcatggccattttatgctttaacccattgttttgtttgttatacagattgtccgcattccaatccgcagaaaccttcttggtataaagctaaccaattgaacaaacacatacagatgacaaaagctggggccataattttgaagcaacactgttcatatatattgaaaaccaacagtaacgaaaatcctgctccataagattcacaaggatccagcatatacatatcgcaagccataatgttaagggaagtgtcatatttacaggtgtcaaaagatgaatacaattgaccaaaaaaaacttatactcaaacatgctaaatggacagacgacttattgactggatgcagtagctactgattggaatttgatagtcagaaattacaagaggaatcaggtcctaagataagacgatcatgagttggtacaaatggctaacacaacagacaaggcccacgactatcaactctttcacagaaaagtggaacaagatatatgatcacagacgctcatctcttaatgagaaaaccaagcaggattcccagaatagcaataaccagcacaaaaactagtgagaaaccaccgtgctgactccccatttgcctccttagaagatcctgttcaattccaatagaagataaatgaaactacgtgagtgttgcagtttagattcagatttcattgatgcacaaagccataatagacaaacaagatgatatttgtagataacgaaatacatctgtacttgtagaaattagtgggttgcaaataaacttgacaaaaaagtaaagaaaaacataaagcgcatgtaaactggttattctgtctatctaactcaaagctaaaaaacgtattagtgtttttttcgggtggactggtcactgctggcctcagtaaaagaacagggaatgagtaaatcatgtggtgattatttattggagatgcaaatttatcgacatagctgttgcttaaacctaactagcttatgcggggggataaattaatctatttcttactgccaaagtaaaaaaatatattgggtcactaaatgtttgcataatcaagctaaccagttcttctcgaagcttcatgttctgttgaatggcagaactcttctcctccttcaactttgaaatcaaggccaatggctgcacatagttgtgaaagagatcagcatattgtgctttggcatcattgtcaggtagcataggaagtcggaatcctctataagaagacctctcagttcctcagtttgtaacaaaagtaaaatgctaacaaagtcaagatatgctagaggatgaagcatccctcagattaagttatcattggcatctaaatatgttgagatgaagagccatgatttatgcaaggagaacattaatcaaaagatcatacatgtagagtggagcaagaagattgacaagcaaaaataaatttatagtagtatgtgaagttaggatttagtgataacatagcattgtcaaatttaacaagagaacattgcaacacatatatcaagaaaagtacatagttttcctcagggaaaaaacaaagtgcatagcataaaacagcacacacatagttctgttggatcagagttctaaaacaagtgtcatgcagaggactaggaaataagaagagcacagcaacactgtaaaatataattaaacaacttctgaagcaatgctcttggataaaatcacacatagtatctctaaattatgacacctatcacaagaaaacatagatgtttcccatctgaagatgcatacctcagaggttactgtttctgattctctagatccttttgttgcctgcaaagagaagttcgcaatttgtttcagatgataaggcaatgaaggatcaatgcactaacaagaaacgacggcggatagctgttagacatgaaattgatgaaagccttacttcttgataactcaagcttcctagaccttcctcagacccgccattgagagatgtcgggtgaggttgagtataaacaacctttaacttcacctcatccaccacattacctgattctttcgtaaactacataggatcactcattaggacacaaagaaagcagccaacataagctacaaatgcaggacacactagaaactagaaagtcggttggttaccatgtctccggtgatatccttcggtgtgagctcttgtgtcactatggcactctgcacaaggaatttgtccttgcattgcatgtccggtggcgcctcccgctgagcttgcattgttactagatttgataatcaattgataactaaattcttagcataaaaggcagtcattcagaataagataatactgacgcaattcatcaaattaccaagaacattggatgtggactggggagccacaatgccgttatttggacggacgcagtacttctttggactagttgtcttaacctggagaaacgatgttgaattaatttagttacttattactgcaatgcatatttcctcggaattagaggccaaaaagattttattaataccttaaacgtgacatattcatctgtcttgtttgttaggtgcagagaacacgagatttgcttctttaattcgactgcatgattaaaaaaaggatgcgaaaggatgaatattctgaacaagacaatattatcatcacatattaaagaattaccaaaatttgcacaaaagaatatgcttaaaacaaaggcaaatcggactatcggtgaagtgaacaatcaatattagctcaaaaaagaaggaaaaattccccctgagaacaaccctgaaatttcttcatacataaatttctcgaatgaggccgcattaaaatacacccggaaatccatcggaaccaccgaatgaactgcaaaactcccttcaaaaaacccccaaaaagaaattctcgggacaagaaaacgcacaggggaagatgagctccgggggatcgatcccgagcagctccctggagtcggagctcatcgccggcgaatactcccgaggatcaaacgggaagcgatccgctccgacgggcgccccagaggcaaggcctccaaagatcgaatcttttttcgcctcctgcatccgactattctccagcaaaatattattcctggagcagaggaggaagcggagcaaaacggggaactcgttggaattttggaacggaagagagagagagagagagagagagagagagagagaggcgctgctgtctggctgcttgcaatgctaatcctgaagggaaacgatgcgacggacggacgacacaacgctgggaatcctccaagtgtgctgtgctgcgcagcttgctgccactagaggcacacggcgaaatgcgcgtcgctctctgggacccaaaaaaaaaatactcctgcaaaaaaacaacataagagaggctttgtgtttctcttctcttcgtcgtcttcgttttctggaggcggcgagaaggaaagggaaaggggagagctgggcttacttatcgttatcgacgctttctggccgtatttttctgctcaatggctgcttagctttgctccgcgatcaagacatgtcaaaggtgtggtagggatgtactcccccgtcccgaaaaaaatgaatctagaactggatgtgacatattatagtacaatgaatttagacagaggtatgctcaaattctaggttggttttttatgagacgatgagtcgacatgtttttgggaatacgcgaggtgcgcatttttattaagaaagaataaatgtatgtacaagacgggccgaacaaattaaaaatgaagaggacagggtacaggaggggggaagaaaaacagaaagcctaatcttctagggaatttggtgacccatctatcaaagaaggaactaccatggccggtatggctgccctagccatccaccaaaggtccgcttcacccgtcatagccctagcgatctccggccaggttctgctttcctggttgaagagccgattgtttctttacttctagattgtccaagctaccagtgtggctatcgtgtcaaaccctcggctatgatccttggtcatcctcttgcggctgtcacacaaccaaacatggaaggactgctcgttgattggaagacattcggaatgtatgtaagcgggtcgacatgtgaatctacttatatatatatcaaataagtgataattaacaggttttcatatcatggtccggcttattatcatacctagaaatataagtgatcgatccataaacttatttatagattaaattagtaggtaatccacgagttaatctacggccactaaattttacttataagtgggtttatgggttggtaacttgatacacttacatccctagctagaattatatggccagtgggaggaatacgatcgctccggacgtactgagagccggatctactcctgttgcaaatctgatgtgaacaactgcaatttagtccggtgaaattgactaagctcctccacaattacttgttttagataggtcatcggtcaatatattgaaactttgagtatgaacataagatgttttttctttcctcgcaatataacatggacatgctttttaagtggatttgtatacctcttttgcgctaataatttggagagcatataactctttcggacaattctagactctagagtgcaatgtatgattgtatctgctcttgtcaagctaacttgggcgtgcagcctgctctttgaaatttaatcggcacgcttggcaggagtaggttctctactgtccttttcagaagagatatggtgcagcgtcagaatcaataacatatgttgcccatccaaacagtaagtgtgtacacaaatcagcgtcagccttttccaagttctccaagtttggtggttccttccaactactacctgtaagtcagacagtccctctaataaggtcctttttgtttcattttaaaattattatactctagattattaagtccaattgctagctataagctgaataataataaactaaattagaataaattgtaagttgtttgtttctctgaattatttgatacatgaattattgggtttgaaatattaatgtctatcatcttcttggctattttggatgcttgttcacttttttatcactgtatataggaaatatataattggtagtggctaaaaaatattgtcatatatatactacagtggcaatataaatttttcttggtagaattttgtgacatcaccattcacggttactcgtattagctattgtcgttgtccatacactgcatacaaattataggagtactcccagttcttttattacacatgaagaatcattgtctaaaacaacccaaatctacaatggcatagagcaccttgaaaacctgtatagcctattttgttttctaattaggatgtaacttttcttgcgaaaactttatagacatgaagttgctataaaatattaaataaatactttttcacttttaaaacttaattaattactacctccatattttaatgtatgacgccgttaactttttgtttaacatttaaccattcatcttattaaaaaaaattatgtaattatcatttattttattgtgacttgattcattatcaaatgttctttaagcatgacataaatatttttatatttgcataaaaattttgaataaactgaatggtcaaaggttggttgaaaagttaacggcatcattcattaaaatacggagggagtataagctaatggtttttctcctattatttgtatcacgatatctctgaataccaggaagtcaagtcaactagccatcgtgacgacaacgacatgccacccataaggagttagtactgtacactatacatatacgaatcgtcgtcctatacaaaatccagttgcgactgtaccagttagttcgggaagaaaaggtaaattataggcggcgttagctcacacgcacggtccaacaatgcgacgcaccagcagtccgtccagcaccccaactccccgcgagtcgtggtccggtccactgcgacggaaataagggaaagaaaacacgtaggtgtggtactatttagtatatacgtcaagacagatcgatccagccacagtgtggtacgtggtggacaggtgctacctgcccgatcgatcgctgggtcttcagtcttctgccgccgttgctcgatcggttagttgagtgagacgtgcacgtacggattggagtgcgtagctagccgtgaagtcgttcggggtgcagtgcaccaaggaggcgcagtacggtgttgcgtgacgactccggccggactgccgcccgcctgcggcctgccggagggctggtgtgatgcggccatggcccgtgggggcgcgttccgtttctccagcgagaccccgtattcgggcccaatggaatatgcatatgggccccttctccgaaggcccgtttagtgtttacaggacgattagaggccaccggtatcgctcttgaggaaaaagtgcaccgaaggtccctcaacttatcatcgagttacaaaatcgtcccccaactgcaaaaccagatatttggcgtcccataactaataaaaaccggtcacaatagctccttcggtggttttgaccctagttttgtcttacgtggcagctgagtcagcgtgggacccacgtggggcccacatgtaaggatgccacgtcatccttctctctcccttcctcctctgtctctcactcttctcatgttctctgggcaaagccggctggcgctggggaggagggcgaggtaggagaggaggaggcggcgggcaacacggcagcagcggctcccacatgatagtcccaactcttttctcttctttctgtctcgcaatggccgccagcggagaggggctgttgctggcctccttcccccttctcttctctccctagatgcaattggcgaatggcagaagaggaacaagacgacgccgaccttcccggccttctccttccttgagctcctcaccgatgcccatgtccacccgccttcctcttcctccacggcgcagctcgcagccgtgctcgcctgagcgtcggctgactatgcgcggcggtggtaatggaaaggaggggctggcaccgaggtggtcgcggaggtggcgcccatgcgggccggcctagccgcgcgcagggtggcactcgcggcgtggtggcggccccaagcaagacgaagaaggcaacaatcatggcggcgtgggccgtgaagacgtcgctgtggcgcggcggtcgccacccgcgccggccgtacctccccgccgcccacgccgttcccgtctccccgtcgacgcccgcgcctccttgtcgcccgcgaccatgcggatgccgcctctctgccaccgcgctcgcctgccgacgccgcctcgccttgccgccgcccaccccttctcccgtgtctccgccaccgcgtcgcctcgcccccatgcggctatcgcttttcggcgtcggcagcttcgagaactccccctcatctcacctccagctcgtgctccccatgctcctccaccgggacctcctcctcctcccgccagaatcctccgcccatgctgacctcttcgaccccgtcctccgcggttgagcgcaccgccgcgacggcgatgggcttctccgtgccaggcatcaacgacggttgctgccaccaccaactaggcgcatgtgcctccccgtcgcccgcccgcgccgccgtgcttccccactgcggccgtcaccgccggccgccattgcggcaccgccctcctcctctcccgcctcgccccgccgaccggcgccctacaggcacatagagagagagagagaggaggaatcgaggaagagaagaggggagagagaaggatgatgtggcatccttacatgtgggccccacatgggtcccacgctgacttagccgtcacgtaggacaaaatcggggtcaaaaccaccgaaggacctattgggaccgattttgattagttaagggacgccgtatatctgattttgcggttgggggatgattttataactcgataataagttgagggaccttcggtgtactttttcctcgctcttgattacatatggaggacggactgattgattcacaaaaatttataatttgatcctctccgaaaactaatttcacaaatgaatcgcgaccaaaacttatttaaaaatgacccttttgttaagcgtcaaatcgtatgacgctgaacttagacacctcagcatcacgtcaactggcgctgaatgctgtgccaccgcggatgggaggctgagtcggcgtgccaacgtgcattcaacgccgtgctatttgacgctgatatgtctaagtttagcgccatacgatttgacgctaaataaaagggtagttttggccgcggtttatttgcgaaattagtttttacaaaaggtaaaattgtcaaattaaatgctgattgattgatattggccatccggcgcagagccgatgctctcgatggaagtatttcagattttcatcgactgctgaatttcacggtcatctacagtatacattgccgcgcgcagggaatgcaagcagcaaacaggccgtgcccggtgcactatattcacattgcttgtcatatgacgacggccagtgaggcaggcaggcacacggatggcccacgcacgcactcagtcgaggtagttgtgatcagaggagataagggcaagggcaataaaaaagacgactgcttactctaatctttatacacgttatttggaggtaacttaatagataataaatataatagttgtctctttacatttactgcagcacacatatcaataattatttaattacttctctctcgctccttcccagcttttctctttcctccaagccaatcaggaaagattattcatgctaattttttgttccgtcgatggtgctgtcgatagaaaggcttcaaaccagtgctaggtgtattggtgcccgtgcatgatcgtcgacagattaatcgacgatgtttttctcttggtactctctctccaccacgtaggtataaaatccaacgtaagcttactattagccggtaatttcaagttattgtacttgccgtaagaggcaaagctcgcggcatcaccgtatcactagtcacctcatggggtcacacccgagcgtgattcagggccggccgggctctcggtctagcgctccgacactccgcgcagcaataaaagagcagcagcagcagtactgatcctgtgcgatccactccacatcccggttgaccgcggcacgcgcgggcgtacatcgcgtacgggcggctcgcgctagctagctccacacgtcgcgtcggatcggatggagcatcgtcgcgtcggatcggagacagcatatacatgcgcgcgcgcgcgtgcgggcgtgcgcgcggccggccgccggccagcacctctccgcgtctcggcgtctttctgtttctctcgactcttgctttctgggcctatatacgctacggcagggagggtgtgtgcgactgtgcggtacgctcatcttgggtggggagacaaaaaggcacggagaaataggctttgtatatacgcccgggtccgccgaccggccggtccatgcgagagaaaaaaaaaagggagtatctagccgggcggtgatggatcggaggtatgctatctttgcggcagtgttgcttaatggattactttttttaactttgcttgaaatacaataactatacacatatatcattaccggagactgatctttactgggtcatgtgaaaatcatattagtatagacatagtagtacgactttcaagaaataggtggaattggttttctttttgaagaaattaaattaaatctcgtgaaaacttttaaaataatgcattcattcaaaaaaatatatatatgaccgtaccaataaattagagggtatgtgcaaacgattgtccattttaactatttgtgtcctttctatattgaagtagcagcagcacggaggcaaaggcggagggtggaaggggacgattgtttgctttgtaggtcaagcagtctgttcttgaagcaacaacaaacaataaatagaatacacaacattaagatgatcaccgctccaatcgtagtcgtcctctaggttctggtttgcgagcgtgagttgtcacatgcaacatggacgagtcatttagagggttgggaagatggcatcactactaccaccattgatgtgtcaaaatactttcagaggttagtttttgatgtagacgttgtcaaaaatccagccaccatggctaagctgagatctaaccaaaacaacactccattgatttttcgttactttcgaacaaaacaatttaagatgcacattttgagagcgcacccacagtaatcatgatgaaatatcagaagaaatcaagaatactataaaaattagggtgccaagtcaaaccagtatgtgcattgttttatttggtcaataatgaatatatttatggactacgataaaattttgaaagaaatctaatgtaactacaacgtaatataatggtaatgtaattatacgatggacgaaatattggaagtttttctcttgatttttgatcgacgaaaatttagcaaatccttatattgagattgacgaaaattttcatataactaaattataggtcgttatattttaataattcgagctaaggcatgcaagttcaattaatttattttaaaccaatatctttgcgtaccaaggtccaaaatactactccatacattcctttatattttgttgtgtcttcagctagcaatttaaggatgaaactactccatacattcctttatatttatctctgttcgtactcatcatggaccgctaaaaacttttaaatggttagattatgataaatgaaaatttaaattaaatttatgtttagtatgtaatacactttgataagattcatctagttaagtatttagattttttaagaaaaaagataaatgatcaaagtttaaatatgaacaatgcttatattagcgacgacaaatataaaggaacagatatagtaattaaccaatgtcgtggtagtcgattatatatctggcaagggatttttgtaactatcatagacagagtgtaaaagttttttttagttgaaggaatcaaagaagttatattattctctttttgaaattttacaaatttatttgccaaaatcttagcactaagcacttaatctcataacgaatgtatggtgataaaaacccaaaacattttctattgaagaaaagcacatgaaatattaaagaaagcaacgcatgcatgcatgggtttctagaatttatattgctagatgatgttcatgagttcgtaattaagacacgtcttttgggacacaatcaggcaacggaacagcaacttctctacactctacaggtgaatagggagtacgaagatagtcctgaaagaaagaaaggataaaaaaataaagaaggaaaagaaaagagaaaaacagggaaaaaagtctctacgaggaatatggttataagcataaacctaggcactcaacaggattccccatctctcttctacacactcagaagtactctaattaagcaacacacatgatattaagagatgatgatctgatgctaattaaacccttgctatatagctagaatggcgccacacatgagagcgagctagggccaccaccaagaattcggtgcttgcggccgctttgccaaagctcgctagaacggagtgacgcccatgtttgcggctgcagcggcggcggcggctgccgcagcatacaggctatccttgagaagaatgtcttcagaaccatcctgaaaatcacgacacaggaagcggctacagatgaattgctcgcaaagcactaaagtaaataagagcagtgcatatgcagtgtttgccgggtgggtctgaattctgataaggctatatgagtgttcaggttacacagataactaggttatgcttgtgtctcccatagtagtatacgttaattctctcgggattctggttacctgaggcttgaaggtcttcttgaacccctgatccggcatgaggccaaaatggatgtgagggaaatgggcccactgattgcaagcacaaggaaagtaaagccaaagcaaaggcaggtttggatcagtaaaggagatcgaaacaaatccgaacgaaccctagctatagcagctgtggggctaaaagctcccagaaaccacagccgcttgctctcggcatctcgcaagcggccgggcacaagctgccgctgtgtccgtgctgacaatgtaaggtgtccagtcaaatcaagacacgcgaacagctagcatcaagctagatactacaggatgagtaggagttcattaatgcgcggatcagacgaagaaagtttacattctttgcggctgcactgaacgcctcccggtggctgatgtccgggttgccggccttgatccgctggatctcatccctgtgtagcaattcattataagcagaattaattttttttacgagatgataccacgaatactgattaaccaaagctcaaaggaggatccatcagttttaattaggcagaaggtttatagagaaatcttacttgatgaaccggttgtacgcagatgggactctctgacgcttctccggagctgcaaaagttttggatcagacagcatccgaggaaacatggacaaatgggtaagctcacctaagctatcagtatacatgctgtctgcaaatactgaccggatcgatcgaagcatgggcttacatggccctgccacaacaagacatgatcgcatgccttgttgatctgtactatcatttctagtgctgaggagcgttcttcaagtgaatatagtacatattaatttcacacactcgaaagaaacactggattgaaatttgaaattcaacacgtacactagtacgctaatgtgtgcatatatgcctaagtaggagctataagtagctaattaacccctcttagcaagctttctgttcttaaacctcccaaacaacggtgaataagcaacaagctagcaggagaacacactgtggtgcataagtacctttgactacaaaattctagcgtttcaaagaaagaacac

SEQ ID NO: 8407 - DNA, 81479 bp, Oryza sativa
acatattggtatgtgcttttaaatatgttttgttatatagtccttaaggagatactatgagataccaatttttatattgtaaatttggtatcacttagtatctaggtactatgaggtaccaaatagtacaatttggtacttcatagtaccttctcaaagatcgtaaaattgctcaaatttttggtacctccttaaggacggtaaaatttctcatacggtaaagttttcaagctttgaccataatgaaaaaataatttatatttatcgattttacggttctagagaggtatcaaaaggtaacacatttgacactttgattttacactagtaaatgtggcactttcaagtacctatgttcaataaaatttctcttgattaaatcatccatttacaagatattgcctcgttaattctacctatcatacccttaactattgatgattcataggtcaacaatgcaggaattttgggggttacatttgattttggcaacttagatcttaataaagcggtgagtatatcacgagacgacctatattgtggatcaagagtactgtgtgctgcgaagttaagtatgtttcgtgcaacagattgagggcaagagtgcaaacgagacgctggaatggttgatgcaacacaccgtggagactgccgagaatgcagaagaatgcttgaaaataaactatcacggcaacaaaaaaaccatacaagcactccttcctctcctccaatcatcacctgatggaagaattgtaactgtttcctctgtttttggacaactatcggtatgtacatatgcacacattttagttataaatattcgatgtgtagaaaatgattcagtgagttaaaatttcaacatcgaatttaactagaattagcttataaaatccaataaatttatgatattatgatgtagtttttgagacaaatctacatgtactatttttttaaaaaaaactaagcatttgagaaattattgacagttaaaatttaaaaaagataagaaaatcttattctaaacaatggtggactgaacacatcaaagcagcttgctgttctcttaaaactaatctagtttcgatctgctccagtttttcagtggggagaaactcaaagaggagctcaacgatttcagcaagctaagcgaggagaggatagacgagctggcagagctgttcgtcagggacttcaaggacggagagctggagtcccggggatggccagccagagccgacgcgttcgcggcctacaagacgtccaaggcgctgcagcacgcttacacgagggtcctcgcgaggaagcacgcctcctcctcctcctcgccgttgcgcgtcaactgcgtgcatcctgggtacgtcaagacggacatgaccctcggcaccggggagctgacggtggaggaaggcgcggctggccctgtcgcactggccctgtcgccgccgggaggcgccacgggcgtgttcttcatccaaaccgaaccagcgtccttcgtctgagcgtgattcctccggaaaatcagacgcagcttgtttctcatatctaggggtgggcattcggtctaatcgagaaattcggttcggttcctcggtcttctgaaaaattcggtcttcccaaccacaagaccgatcggtcttaaaaaaactcaagaccgagcatttcgatcttcggttagttcggttcggtctcggtcatagaccgaactagccatagcagcagtttaaacagcaaaaagaattaataaaaaaaaactccatacaagatcaatgaatcgaagcaactcggatgaagaactacaatatgatgccactagagcatgattcagaaaaaacaagaagcaaatcaaagcaaatcgatctccacaattccacctcaagctccagatcccgtcgatctcccaccatcgctttcatccccgaccgacctcctcagccatctaggtctccagcgcaggtgaaagggcggcgccgaggcggaggcgtcctggctggaggcggcaccgaggcagaggcggcggccgcggcgagatgggtcggagggcggaggcggcgccgacgcagtgggtggaggctggaggcggagggcggaggcgacaccggcgcctgcgcggtggaggctggaggccgagggcggaagtggcgcggtggagacggagccgcggaggccgagcggaggtgagcgcgaacgtgcgatgaatggggaggaatgcggtgctgactcatgaggagggagggtggggcgtgacgcgtgggggcaggcagtgagagagagggtggaattagggtttatgttactaggcttattgggcctcctaagtttattgggccacaattcggttatctcggttaattcggttaaccgagcccaatgaccgaaatacccgaaataaattcggtcttttgatggctgaaaccgaactactaaccgaatttctcggtctccgtcttttcggttcggtctaaatatgcccacccctactcatatcaataagacaatgagcacctttacggtggtcttcaactctccgtaataacggtattattatcgattataagtggtcccaccgtcccaagggttaatttataagttctacttcaagtagaaaaatggtttttctactgtcaatagttaagtagtactataaagaagattgtaaattctatcaaactataaagctaagctaacgtccattaacttctaaaactcaatatgcaaatatgtgacatcattacctcttagcaataattattatttagagtattttaaatatcatgcaaatatgatatattatttacaattttattatatttttagaatttaatatgcaagcaatgtccaatcattatctccacatcatttcacattatttaaatatatacatctatcatttctattataatacgcgttaatccatatataccgcaatgaagcgcatggtatcaactagtactataaatagttactataaatcattgcaaaatacctctaattaagacaactagcatggtggcccccgcagattgcgcggctagtatcattatattttctctcatataatacatatatgttttctcaatatattattcaaatatattaaaatgacaacataattttaaattttgcaataactttatgaaactactaatgtataatattcatgttgcattttatatacgtattagttattaattatttttaatatcaaattttagttatttgtaaattatatatattcctatatagactctagactcatcttttaatatttcttttttttaattccgaattttctgtaaattgtatttctatatagactctaggctcttcttccaatattatttatttttatttctgattttttattatttcaaattgtatttctatgcggactctaaactcatctttcaatattctttaatttttaatttcgaattttagttacttctaaattgtatttctatattgactttaaactcttcttcccatgtttttcttaatctcgaattttagttatttgtaaattgaatttttatatgaattctaaactctacttttaattttattatgtttattccgaactatagttagttttaaattcctatatgaactctatactctacttctaatattcattattttttaatttcgaatttctatttttttcttaattgtatttctatattgactctatattctacttctaatattccttatttttaattctgaatttctattatttcctaattgtatttctatatggatatggactctataatctacttctaatattcctttttttaattccgaatgtcaactatttctaaattgtatttctatatggactctagtctcctcttctaatatttcttattttttaattccgaatttcagttatttctaaattgtatttctatatggactctgccttttctttttcttcgattaatgtgagaatttttagaccatgagagcgaacgtggagacttctttttatatttattccgaactatagttagttttaaattcctatatggactctatactctacttctaatattacttattttttaatttcgaatttctatttttttttcttaattatatttctatatggactctgtactctacttctaatattccttatttttaattccgaatttctattatttcctaattgtatttttatatggatatggactctataatctacttctaatattcctttttttttttaattccgaatgtcaactatttctaaattgtatttctatatggactctagtctcctcttctaatatcccttattttttaattctgaatttcagctatttctaaattgtatttctatatggactctgtcttttctttttcttcgattaatgtgagaatttctagaccatgaaagcgaacatggagacttttttttctattcctttaataatataatagataattgaacaatgtgttggggcaaacaaaagaagattgcaatgaacagattcttgccaatgtgccaatgtcatggctccatagcctcatacagaaataagtacaacagttgcagtttgtcaaagaaatgataagcaagttttcggtctttaagaggtggaacaaaaagaaagaaagaggaagcaagggaggataatacatcaaattactagctgataattgaggatttttcttatgtctatatatatatatatatatatatatatatatatatatatatatatatatatatatatccggttctgttttccccctaatctttgctctatgtcgcgtcttgtgggggcacttcctgttctttctcgctggcctctgtggccgccaccggtgcagcctcctcggactctttctgcttcgattgtgcggtctggatcaagtggttgtagctgcccttctccttgaacagctgcgagaaatggatcttgcagtagaggatcccgttgagcgccgcgtaggaagacgtcgtcaggatgcagcccccatgcgagcacttgaagcaactcttgtggtaagactcaccctccagagttagctgaacaaaaaaatagattccatcaaatcagattggtttagagcaggtacaatagcagactataagccagctataaacatattttaaagagataaaaaatgagagataagagtagcgggctacaaatttgttgccagttgtagcacatacgtaagaatacatgtgtgtatgacaggtagaaccagacattaattatgtagtacatgtttatgggtaactattgtatgaattagctattaaattgactatagatgatttgtagccaatagttagctatactattaaacttgctcttatactcgttcaatttcaatgctatcatctttttaaattttctttaacggttttgacagattgaaatttgtgtgacgctactttgcggtcgtaactaggcagcattctgtaccttctccaatgggtacacagttttttggcaggctgcacatttatcttgagttccagagaatgctgaagatagcttgctaggagctcttccctggaaaaagtttttgcagagtgaatagtttgcggattatcaaatttggtgatatataactaataaatgcataatgtgtgaattgggctataaacaggtctgtggggtttgtacctggtcgctcttctctgaagatttaccacctgagtaccgggacagagagagaattcagaacacaataacttctcaataatgtccaaacatctcgacagccactgtgtcttagcattaccttgcgagaatttctttgagaagctccccgtctctttgaagagctgctcaaagtgcgtcttgcagtacaggacaccatccatcgaagagtagttacacatctgcagatgcgtaaatgttttgaacgaaaaatgtgatagttgatttaattacctaataaaaactgaacatgttgcagggccgatcgatgccatatatacataccgagagggtccccttgcagtggctgcacttgaagcatgtcttgtggtaggagacgccgtcggcggtgaggaggtcgatgaaatggacggtcttgtcgcacgccttgcacttgtcctgcgtgccggtgaacgacatggcggccggggtacgtatactagcaccgggtgattcaccgatcggtcgatggaaaaccttcaggcctcggtctggtccagctcgaggaatcaccgtagctatagcttcccaactcccaactcttccgatcgatcgacggaggagatcgattcagggcgagacgagaggaacgtgggcgtggcgtctccagagaagggagggaggagagatgggcagacagcaacgggcgatggtttaaagggcggggcggcgtgagcacgggagcaaagataggagacgggatgggctccgggccacacagatgacagacggacgaacccggtcgtgcaaaccgggagagaggcttgtttaattttgggaggggcgagcggacaagaattttctatgcctattctatgcctaggtgtcatggcatccatcatttgcatgtgatttaaatagttatagaaaaaattaaaacaatcaattatgatgatacaagtctatacacaatcatacaagaactgaactagagaaacaaaaataataatatcagacagtgaatagtacccgtacaacgcagataaaatttgttatttttatttcttcatatgtagattgattttagacttacatgtttgtatagtatcttatattatcgcagtctatcttatctaattttataatatttttataaaattatttaaactacatgcatacacctagacgccatgatatttgggtatagaaaatattttcccaggccttcacacgggggcgcgcgctcatgtcgcgcgcgctcaactccggctgtggtccttcttcaggtcgtgcgagccgcgaaatcacaacgtggctccatggatctctgcgagacactgtcgtgcggggcagttcgttcttgattatgcagatctctttctggttgggtttgtgtactgggcttcgatccgctctgctcacgacagtctgggtggacaagcgtacatatctgtcacagataggcccgtataggcccatgaccgaataaaggaataagtccattatacctctctcaattattcccctttgtcgaattacatccctcaaccacaaaaccaggtatattacctcctctaagtgttaaaaccagtacaaaacaactcccttaatggtttctgacggtggttttgctgacgtggcatcctagtcatcgaaaaaaaaaattaaaaaaatacgtgagggcccacatgtaagtggcatttctactcttcctctcctccaccactctcctctctcctcccccttctctctccctggacaggggaggcgccggaggcgcggaagatgtggggaccgccggaggatgcgagcgcacgccgcgagggagaggatccactatcagcagcagcagatgcaggtggtggcggcggtgacggggaataggaggatgcaggggctagggccgaagcggagctcgaacaaggaccggcacaccaaggtggatggccggggacgacgattcggatgccggcgttgtgcgccgcctggatcttccagctaacgcgggagctcgaccacaagtccaacagcgagaccgtccagtggctgctccagcaggtggagccggcaatcgtcaccgcatggggacgggtgtcggcactgacatacaggggccctccctcccttccccaaactgcgccctctccaggtcgcaccaccaccaccaccacatgtgggctgccgccgcggcaccgcccgccgcgtccgcggcgttcgccggtgccacatcgggttcgcgaccatgtttgccggctacgtggcggcggccatgccggggctagaactaggactctcacaggacggccacatcggcgtgctctccgcccggtcgctcagccagttctaccaccaggtcggcgacgctagtgccgccggtcaactgtcgcacccacaccaccatcaccaacaccatcagcaatagcaggaggacggggaggatgaccgcgatgacggcgagtccgatgaggagtccgggcagtagtaggcgcaccgccaattgttcatctatgcgtctcacgttgtctctttggagaagaaaaagagaattccaggaaggggcatgcagctaatggagggggtatgcttttgttactgttgggttgttcttcatggggatttttatgtctgatttttcctcgtgtggtgtcgaagctggaagaggctactacttgctccagcgacttgttgggatggatcatgatcatcttcagttgttactcctgctgctccatggatggtcgccggtttatccccctccaagtgtttaggtgaaagctcaatctttttcactccacagtcagcacatgacatgctctttgaaaggtagcttgatgagcttatgtattttgccggaggttggcggcgcgaatagacagcgggaggatgcgttgccggcgagcagatcgacgctgtggcaggtgaaccctccccgtgcgggcgccgcggccggcgatcctctccctcgcggcgtgcacccgcatccttcggcggttcccacacctcccgcgcctccggcgcctctccttgccgtgctctgttcgaggagagagaaggggaagaagagaggagagtggtggagagaaatgccacttacatgtgggccctcacgtatttttttaatttttttcgatgactaggatgctacgtcagcaaaaccacagtcaaaaaccaccaagggagctgttctgtactggttttaacatttaggggaggtaatatacccggttttgtggttgagggatgtaattcgacaaagggcaagaattgagggaggcaaaatggacttattccccaaataaatatcaggccagatacactttaattgctttgtataagcgcaatgggctagagatatacacgggccataaaatgcacaatcacgtgctttgcttgcttatgcgaagaagaaaaggcacgtcaaccttttctttttctagatctttcatgaacatgtttttgaccgtgatacggattggtagatttgtctagagctattgtcttctttaaaagaaaaaaaacagcacagaccagtggcggaggacgagaaaaaaataaggtgtggcagcatcaacacagcgaaaacaacataatagggcgaacgctatggatttgtaatgtgctcccatgcaccgctaaaagttactgcaaaaattgttttgatgcaacaaatcattttttttgaccgagaaaactaccagggcttttcctagtagtgtattttcattaaaacaaaacgtatgtacaaagatatagggaaaaaggagcttttaaagagttacaaagtttgtatccaatcaagaactatttgttttcaaggctccttcattctacaaatatgcagaagaacttcgtttctgaataggcgtttccacgactgaaaggatggcacaacattctaaaatattagcccatttctctgtttccaaatatgccaagaagcgatgaaaaagatttcgagaaaaccttttcgagcaaaattcaatcttcctaagattatcatttgaaagaatcctatatgatgattccagttaattcccaagtgttgccaacacctaacactgaaaggacaagtgaagaagagatgaagtctggtttctctctggcctgcattgcataggacgcaagttaaatcatcattctcttttgcacaatgcctcctgtccggcatatcctagtgtttagcttgtcactgaaaagtagccatgcaaagaccttgattttcatgacacattttgtcttccatagctagacaagaggtctggggggctgcagtggcacaaagttgagcttgtataactttttttgcagtgtatgaagatgaattccaaataaagctccaactatcaccttgccctggctgcaagtgcaaaaggttaagttcttcttccagcagcaggaattcctcatagaccagggcagataaaggtagcaagaaagaatcctctaggggtcttgtactcatggccaacacagattcctctttatgaatcaccagacagtagagtgttggatacttgctgctcataagaccatcactccataaatcttcccaaaataaagctgaggttccagttataagagtgcatttaccaattcccctgaaaatatcagtgagggctaaaatgtccttcagccagaaagaacccttgttaagacacatgtgggggactcttgcaagatagtaaattttccatactaagtcaacccaaggcaaatcaactccattgtaaagtttaactaggtgtttcataagaagagcacaattctgaagcttcaggtttaccactctcaaaccccccttttcttttggcctgcaaactaagtcccatgaagccaaggatcttcttgtggagtttgggttatttccccctccaaagatagtttttccttgcattatcaatcgatttgatcactgtgacaggtagttgcaaggaacacatgaagtaagttgggatggctgacgggactgaatttatcaaagtgagacgccctccttgggggagaaacattgaacttgttgttaatcttctttccactctatccaccaaaggggcaaagtccacaatcttaggccttgttgtccccatgggcaaacccaaatatgtgaaaggcaaagatccaattgtgcagccaagtaaaccagccagatgattagctttttcagaagagacatttagggggtataagctagactttctgaaattgactttgagacctatggactaagcaaagttattcaaaagagctttgagatagaagatctctctttgtgaggcttttagcagaataagggtatcatcagcatattggattattggaaagcccttaccatcattttcattgttgggtttagagagaagaactaatgagaaagctttattaacaattctctacagcaattcagcacccaagacaaagagcaatggggacaaaggatcaccctgtctaacccctcttttgcagccaaaactattaccaggcactccattaagcagaacaacagagttggctgtggataaaatcatttggacccaattgattcactgtgctgggaaacccatattttgcataacggatattatggctgaatgctcaattgtgtcaaaggccttctcaaagtccaatttaagaattatgatttctctcttagattgctgacattgatgaatgtattcaaaggcccaggccaggcaatcctgaatggtccttcccttaaggaaaccatactgattctcactgatcacctttaaaataaccccttgtaatctgtcagccattagtttggtgagaaattttaagctaactcccatgagagagataggcctgaagtcattaacagtttcaggggaattcttcttaggcactaaagtgatgaaagagttgtttaaagactgtagatcagtacatcctaagtggaaatgtgcagccaatctataaaagtcttgggcaataatgtgccaacatcttttgaggaaaacaccattaaagccatctgggcctggggctttatctgcaggaataattctaatgagagtatccatttcctgagtgaagaaaggatccacagggttgtccagacaaacatgatcagggaaaagctcattcaaatcaaaccccattgtgggcgaattagagacacccattctttctctaaaacttttatagaacaaagctgctttctgctcatgcagggtgaccacctaaccatcatggtcctggatttgggagattgagttagctctatatatttatgtagcaatggactgaaagaactttgtgttttcttcacccagcaacatccatctattggtgcatctttttttccagtacattttcctgaactctaagagcttaattatgtggcactacacaatctccctgaaactcctctcttgtcagagacctggcctcctcaacaaggtctagaaaatcaactgctcgattgcaatttgcaagcagaacatttagtttagataaatttttgctccagcttaacaaccttttcctaagcattttaagcttaaaagagatgcattttgcagggtcctcaaagtcaggatccaaggcccaagcagaattgactatatcaaaaaagccctccacctctacccaatagttctcaaacctgaaaattggggaccttggaattttagtatcaatcttgaccacatagggcacatggtctaaaatgtttctagtcatgggtagcacagatgtattggggaagttcagtgtccaggaggcagaagtgaaaacccaatccagtctttcaaggagagggttttgttgcatgttactccaagtgtacctcctgcctttaagagggatttcaagaagacctaaggagctgataatatcattgaaaatgaagatgtcattcatatcaactccagccttattcgtgtcctccactgacctgtaaaagttaaaatctcccaagaaaagccaattctgctgactttctatgtgaacattctgcaaccaggcaacaaaatctgctcttgcagggccagtacaagaaccataaacacaggtgagagaccaaggctgtgaggattgtctggaggtgaagtcaacagtaaccgaaaattgattgacctcttttgccacccccatgaacaccttaggcaacaaatcatattgatatgtgttaggattcaaaattcccgaatgaaattttcaaaaaacatttttgtgaatttagcaaaatatatccaaatttgatcacattttgttcaaattttaaattatttttggaagatagaaattgccaaaccgatagattaaacctttatctcggttgtgttatataactactagcgcttatataggtagctaattacaagaagtaaaaacaagataatcggtataggttggtttgctttgtgtaactaactaacgacaaagtcagaccagctaatcacgcatgcatgcactttacctccagtgaagaagttaatccagctaatcacgcatggatgcactttttacaacgagtgaaaacaaggcaatcagtgaagaagtttatcatgcatgcatgctatttaccaccagctaacggaattgaggtatggcgagtgccatatctcgtcataccggaagctccgccactggcacaggccatgcacatcttatatagtgaaagcagcaagctttcttacacgagaatgtgccacatcatcaaaaacatattagccgtcggataaatagttcggataaataatagtcattggatcgaaagagtgcatgtattaaaaaaatcacaaatgggctaaacatatggaaatttccagaggtttcgagtatctattgtcctagcaagtatagatactttgtaaacaaattaacttatatcaaaaccttattaagagctaaggtaaactaatagaccatatataaaagttcttaaacaggaccaaaagttgcgcaaagcgtgactatatggctagttttattgaatatagtggaagaaaattgcattccctaaacaccaagggttaaagaaatccacaagtttgccatgtacagatatagctacgatcaagaagatgttttaccgctgcaagcgtccacatccttgtcttctcctttatatttgcaaaaggccaggtgttgaggtctttttgtgctcgaaggtttttggttccttactttctatatctcccacacgaccaacaggatgagcgtgcacatttctctcttgggcatgccttggtgacttgcgagcattttccaacactcaaacattgatctcggactccattggcttggtgtgacttgttgataaactacaattttgtaactagttcccaaattctcctaatgtatttgtattgaagaacaggtgagaggatgattcatttgcattgtgatagagatgaagtgagtgttgttcggtcaaacactgactaccagctgatctgatgtccacgctctattttgtatcaccagctaagtgaagagcttgcattttgttggcgcctaaggcttccaaatgagggcattgaagtttgtggtaactcagccaagacattgtgctttgtaaacggataaggacgtacattcaccgtggttggttagcttctacggctatgttcttatgtcaaggttcccaacctctactcattcgtttcccgcgcacacacttcccaaactactaaatggtatatttttattttaaaaaaaatctatagaaagatgctgtaaaaatcatactaatacatttttcaagtttttgttaactaatacttaattaagcatgtgctaataagtcgttctgtcttcctagattggttcccatccactggtgacgaacacaaccttatgcatgttggatcacattccataaggctactaggtccaggatggtttgcagatgaggtcttgtatccaggtcttattcttcaagtcttggtgcattgtcctttttttttctttagatgttacattcattggtcgcttatgttgattttggaggctacaacaaagagggttttgtttgtctcgtcacaaggcgtttccatgcccacccatggcttccaagattctacccatttgtgccacaaccatttaagccttagggatttgtaaatttctcgagatcgagcgtcctcaacccttcatttgccataggtaagtgtgttctctttcagtcgatcttgcatttggctccaatgaagtttccggagccaacccatatgaatcgctagcattgcttgccaatcttctccaacgacttcttgttgactgtaagagcagtgattacatctgaggtggtggcatttacatgcacaaatatagttttagacgatatttgtaacggaactctggctacaaggtacaaatgctcacttccctattaagtacttgggcatgccgcttgcgtcgagaaagttgtgcaagccacctttgaatggatggcggggcatctaggaggatggtaaggaaggaacatcgggttagcaggatgcacaacccacgtcaaatcaaagctttccttttttctttgcaaagaaaatgatatcttcaaagaacaagcccacaagagacttgtagtctactaagtctcgtcatgactaatttttttcctaaaaggcgacaattaatcttaaaaaaatgtgttatatatgccaacatcatgtcatatcatgatattcatgaggatgacaacgcaaacggctagctacatgagcgccacgccgtcacgtcaacctaatttagattttcatttttttttttgaattgatcgttgttaaactttgtaaagttatgcatgataaaaacgtcctaccattcggtaagaaaaattacgttgtgaagacaatacttacgtatttgtctttctagcagaccgacagattaatttcctgccaaagtaatagccctcgtgctaatagaagtatagaacttctgtaacttttggggaacttttgggtggtcaaaaaaaatgtgaaagaaagtcgttccaaagaattttagttactgttataactgaactttctaatactgccacttggccagtgactcggcgagaggtacataacacccagtttttttgtaagtattccatgttaatttggacgtcgacagatgcaaaaattattttgatatgacgtagaggaagcaagaccacagagaaattagatttatgtattacaacaaatcaccggcctcgacacaaattatttttcgccgtacttttaagtcgtgctcaacgactggctgcattatatgcacagttactttgggcccattaaattattaaaatgctttaatgtaaaattttgctgctaaaaatgcttagtctattcgttgcatcggtggaaaatgccctcaaaaccagaagataggacggtgatagataatattgatgtcttttctgtgtttgttaccctccatttgtagttctcgatgtcgttttattgagttgtgggacatttgtgtcttgtgccttacgtggaactgcatatgttcctgatgattgcatctgatgatctaataagtcctttggttttggtataagcagagtttcgctgtaaataattactcccttcgtcccactcactatgtcatgtacgtattttaaaatttaatttatatttgatcaatgaatattttattataagttaaatattatttgatgaaaataatatcattgattatcatttaaatttacttttatatgattatgattttgttgctacaaacattgtagtatagtaataaatttaaatttaaagattagttagaagattgtgccaaatttaaatgtatcttagtgagtgggacagagcgagcattgttttacaaatgttaaaaactacttaattctattcaaagagatttgctccggtccagcacaaagtatctcaaagtaccggtaactcacggtaccaaatcgttttcgatcattggatctagctgggcaggatgggcattgttagatccaatgatcagaaacgatttggtacggtgaggtattgatacctcgagatactttttattggaccggagcaaatatcttagagtggcattttccttttcaagcttcagactagtagtatttcacgaaattcctccttttcacataaagttagcgtttcttttataccgaaagcaaacttgaatttctcgggactattcggtggagtagtaccaaaatctccaggatgccctgagagcattacctattccaatctgcaaacagttgtacttcgttccaatctcaaattaaagtccattagtccaagcaattcatcagtacagaatacgagtataacagctctgttgacttccaagttcaacatgctcctcctccatcttgatctggtcctcctatcctgcattgtattgatacctgatcaagaatctatgggctttgctaaattgattgcctctatcccggctgtaccgccgtaccaactaggcaactatgtacaattcaaaaaggaaaaaagaaaagctatatatgcaaccatagaaattggagcatgatattattagtacttaggagtgtatatgaattcagttgttagtgactctaaatgggcagagtttctcccatttttcaaaaaatatcacttctggcattattgtccttgtaaataagtaagctattgtgctcgtgagtaaacgccaattggggggtgtttaggtaggctctgcatgagaaagtcttgaatgtcacgtagtagcggtcagtgtcatagttgttagtagttactgaccaacccagtactaggtacaaaatatgaacataacagatcagcacatgacgcgtctggatcatggagtttatgcacgtctgtctgtcttgagcccctgacttacaagaagagattgcctactggctactgcgataaccctgatttgtctacctttttgtatagtgagcaaaaataatctgatgagtcatgagtttctttcttcaaaaaatatctgatggacttaacattagcacttcttgcccacctttcacgaacactgacgtttcctgaagttgtgcagtggcttcggtttcgttctctcgtatggcccttgatcatagttactctgtcaaagcaagccggatgcgttacaacttgcaacactctgaacacaagaacaagaagtcagatcaaagaagaagaatctgctagtaccatgcatggaccaagctaaaggcatagagaaatgccatgtatgtttagtgtcctagacgattaaggcatcccatcgccacagataacgtagggtcgtcacacaggaagactgtcgccaataattgcatctgtcaatataaaattgctgggatatcatcggaacaagttgtgttaagccgccaaggctcgtgtatcgatcggtttcggagaagatcggaagaatgcatgtctgatttgagttgttgcacttctttcagtataatgcatgtggctcaattgtgtgattgcagtgatgatgtaagatacaagcacgtaactcttgaagtttggcggcttcctactctttgcgaactgcggctatcgatgacaatatgggctggtggtcaggcttgtacctgctgctgcaattagatgcagtaggccggagtaatcaatctgcagttcagtaacagtttgttactgtttacagaagcacgggggaattggaggttcaaatcaaacttgagcagcatcttagttttcgtcccatagggaacttgattaaaccataaaggctgcacaagggcacaattatctttttttaaaaaaacgatccggcactatacatgctaattttattgaatagagcaggactaaaaagttttgtacaaatataaaagaaaaatataaaaaaaaaagtaaaactaagtgataagctccgagagacgttctgctaaagttcaggtcttggtttcctcctccattttttgccacgagcactattgatggattttatgaatgttaaaatccattggtggagaactttttgatgaactgcattggcttattggtcagtacattaaaatcatcggatcaaatttcacactacaaagtggtagctactcaatcaccgtaaaattactcatgattcaacatgaatgtatcttgatcaattttatggtctgagaaggtaaaaaagatgccacatttgtagtacaaaatttgttaacaaaacttacactaaaaatttaatgtatctccctgtacctcccaaagtccataaattttttctatattttggttccgttttgaacttatttcatttacattatttgatggattattaccgtggattatctacttcattgtaggttatattaaatattttagaaaataaacacacaaatagcttaaaacaacctaaataatataatagcagaatttttttaagaaaaatatttttcgaagcgtggagaaaaatccgtttcaataatctaatgaataatcgaaaaaaagggccaccagaacactctgtccttgaattaggacatctaaaacgcaagagtgagaaaaggtcacagaaattgacactacctactaatgcaactgcataccataagttaatgatcacagtcaggaaacgactttagggagaccacatacgtatattttcttagcactagctagcataagcatatctttctgcagagtccaaaacccagtttgctaccctaacaaaatcccctcttgggggaaggattgtatttttaagaagcatggatctgtcttgtgcaatattaattggggtactagtactaaataaactccgtagagaaatgtcaaagaaaaaaaagtattgtgcaatactaaactccatagagaaatgcaacagaaagaaaaaaaaaaggaaatgattgtcaagcaatatgcattcacctactccacgaggtgattaagtttaagaaacagtcagcaaagccagcagcttagcctttcgtcgtttcccctgccctattcagccaaaatgcaaaagaaaatgctcccggctctcaaacttgagagttgagacaatatcaatcaatcaacaactacgcacatttttgcatggtgcattttgcgtccattttatcttgacgtggtcgtgatctcactacgactctagaaggagtacaaaaatacttgctcgttgtttgcatgcgtacacagcgaaagtcccctcctctctttgtagccgacagaagccagccgacattttgttccgtcaggctataccacttgtagtcagtagagtgatgttcagattgtgacagtgaataccaaatactgcacatgtctgtacaagtggcttgcgtgcttgatcgtataagggatttataattatataaatggagaggctaattcaagaaactagcccgtgaaaggacaaaacattacttcatgtattcccaataaaatactccatccgttcaaaaaaaaaaagcaaaccctggatttctgtgtccaactttgactgtccgtcttatatgaaatttttttataattcgtatttttattgttattagatgataaaacatgattaatactttgtgtgtgacttgtctttttaatttttttcataattttttcaaataagatggacggttaaacgtttggcacgaaaccagggtttatcttttttttttttgacggatggagtatgtgttcagtacaacaaaattctctgaacgtcactaaataggtttattttagttcatcccagttcataggctaaatatttgtacgtttcgtagctgtccgtgagcttttaattatgagaccaacatatatgtggtcgtcatgaagtatatctgtgtatacgaagtgttattataccactttgatacagacactctaccgtgcgccagtagttctctgtcaacgccaagcaggggatacatgcaaaacaaacatctggagttcatgtgtccgcttcaaatgctgttgcggtcaaattttattgaactatcaaccttatgtaagatttgattgagttcttgtaaatattttttcaagttttaatgaatagttgagctctctgctttactttaaagaaaaggaccgagttcgggaaagagaaagacctcgcttcactagaagacatatgtccacataaagactaactgaaatgcacaacattaacgctttgacaatattattatacgctaggtccaatcttcaggcatactggtcgcaaatttgtttatttcttgagataagatacgctctgattaatgaagattgcatttttcactggagacagacgagaggtatacttgagtagtggttcttttgttgagagacaaatcatataaaaataatgagcttggttaactagaaatgatatcgtaaaacacagcagtctccaaaagctagtttttttaacgaaaaaaaaagctagttttgtgtactctcgctattggtggatcgcagaagtccacaaccaacccacatttatgtatgtgaactggcaatttcaaaatcagatgataagggaggattcttgcttaattggctgcaggtatcattcttctgaagtcgtttgtaccaaccacaaaattaacaaaaggggttccatcatctcctgattgcaggtgttgctgaaccgagcaaacgaattctctactgcacagttgtacttcgcctcgtcagaaaagattagccacagtacgtccttaaaagccactttgccattataaactagtactaatcatgagctctgtacaatgcgataagatttgttcccatgagcaatcatgcattttgtggcggccactgtatatatgtcccccacaggttaacaggatgggatggaagtggtgccataaagttacgtataacctaattaggacccattcttgaaatcgacaaaagcaagaaataattctaagcattttttcagagaaaagattggtgtgtgtcatgcagatatgcagttcgctggcccggcgaaaaaagatatgcaggtcgctagttcagatagatttgagggcactagtcggtctactttactgtatcaatagctctaaaattcaaagttagtgattacaaaattcaatatatataatcaaccattccaacatactacttttgatttctgttttcttaaatttaatattcgaaaaatttataaaataatagatacaaagttattatactcctacttgtcatatggccttcattttagtttttcttaattaaataatataattctgaacttggaattaatcattacaaagttgtcctcggtacggactatatcagtttatagtatttgactattgccagatttatttgctactcctattagcatgagatttttctccaagtatcaatttagtgtgcgtgtgtgtgtataatgggaaaagaagtgcacttgaactatttgctcaatcctgtatgtaccttttgttacaaatttctcttttgtagcagttaatgtttgaagaatggtcaactgtagtccttcattggtacatgagaaaaaagaaatactttaccgtgtaaagtccactgaagaaattttcgatgaaaaccgactttttcttaatcctttatgtctccgactacttgaaaatgtggataaacattatagttgtattaatgttcatacgagtaggatacgtagatacctgtctacacttctactgtgtttttttttaaaaaaataagtttacagtctttatgccttggactacttagaaatatgaatgaatattatagttgtattgttcatacgagtaggatatgcctgtacatgtttataatggtatgtgcgtatgtacgagcgtgtgttaatctgtaccgtgctttaaaaggagaaaaaaaaaacataagctgtcctacgagtcctcctgaccatgacaatttgtcactagcatccgaggaggaaaatctcctcaccgttgctagagacttgggacgatgcggggaatcttccttggaaagaggtgcgagagaactagagaagggcgttatcaagatgcagggaaatcctccattcctcccatcaaatgcaaagaacaaatgaagtggcgggaccgcgctcccctgctgacagtgcactcggcagcctacaacagcagcagcatggcatccccttttttctctcgtagcgccatgcatgcacgatcagcacctacgcccccgcaatattattatatggctgtcacgatcccacccctttgatgagaggcccatgcatatgcacggttacatcacggtgcacacgaacgacgcacccctctcgtcctcactgtccctagctcttttaaatttctttatggttccttctcttctagtactcgtgaccttctcgcagctctccacacggatgcatatgcttcacccctctctgtacattcacaccttctgtcggtgtgtcgattttaacctgaatcatctgggcactatcacactactagtagtttattcagctgttagtatgttactgcacgacgtgcacatctgtacttgttcaggctcctgttgcaaacgcacaagtcccactcacatcgaacagtccatacagttttctttgtgtgggggagagcatgaaggggaggatcccccacgatttcaccggggcctagtgctcctcttcccgattcggccaactgggcagctcccatccctgcaggtggccacgtacaccgtatccctgatttcctatgcgtgtccgctggccaccgaaacagataagcttatttcctactcctagctagcttagctatctcctggcaggctggcaccaccaccagctcccggctcctgacaaaccgaaccatccaacacgtacacgtacacgcgcgtgcgtcgtcgctgcaggcgacaccgggcgagtgatggcaacgtccggacgtcgggtcgtaacctgtgcatgccatgccaaccatcctggggatggaccggatccactgctcacgtcgacgcgacgtagcgtttccaattgaccgcggcggcgtcggtggggcgacgacgagaacgtaccagcgcgcgcgcgcgcgtcgcgcgggaggaaacgagacgagaggtcgatcgctagcgcccgcacgcggcacggggtgaaacgctggggaggccacgttttttttttcttttttggccccgttctcgtgcggttttgcgccgtcgggtaagcggttaaaatccccacacctaatcaaacgcgggctcgatccgtagccgggggagatgtggtgctcctcctgctcatcatcatatggcaatcttggcggattgattagcaggggggagggggcagcacaaaagcgtggcgttggttccgggtccaacggccccgaatctgaaactctgaaactttcaacaacggcgatcgatgatgagtatcatcggccagtatggctgattgattacagggtctgcgtggctgcaattcgatttcgtttccatcttttggactttctgtactcgcgcggcgttgaatggatagaggggacgggacagggtgtgagcccctgtgttggttcctgctgtgcctgtgctctgctacatcattcttcgcttctgccacaagtcacaaggcctcctttttctcctatatatggagaaaaaagcgcaaataaatattttccgctttttagactctgctgcgctttgggataaaaacaagtgaggaaaatatgcaaaagaaggaagagttaattaattaatcaacgctacgtatatgcgcgccgtgttacgtatctcttgctgactttataggtaggagtactgatttttcctttttaccgctgatgatagtatatacaaacgatgttacttaccaagtgacaagacgtggacgtgttgctcacaatagtttgaaaaataagtaaagaaactaataatgcgtttttagacgggccgcgagaggccagcaaggcgaagagaaaaacggtgccgtttggtagtctttaagctggctacgtcatcgcacaatttgatcgttttgcccccaccacggggactcggggagaagagccaagccatctctgcagctggcttcgatgattttatgaagtgcgtagtacgaagtttacatgcacggcttgactttctttacgacctctctctcacatctcacctcgtgaccaagctggatatagcaggaacagtgccatgcgcccatgcttgcccgtgagaaaaaaaaggggagaagttaagtaaggtgagaaaaaaaaaagtttaaccaggattcgactggatacgcctttgcgtatttatttgcgaaaaaagagaagaagagagtgagaggaaaaccaaacacttcttttattaatcaccaccgttcacgtcgcctataaaactcgtacctacctgtctcctccctgttgaaacggcacaaagctccatccgttctgaaggctttgtggccgagttctcctcccccacctcctcctcctcctcctcctctgtagccgagctgaggccaacgcgagtagtgacattctcctgcaatggggtgcaagtcgtgcgagaagcccaggccgaactaccggaagggcctgtggtcaccggaggaggaccagaagctccgcgactacattctccgccatggccacggctgctggagcgcgctccctgcgaatgccggtaagaccaatcgccgcccgccgatgccgccgacgcgtaattcactacccctgccggccgccgcatgcagcatttgcgctccccaagcataattcgcgagctctaggcgcattgcaccgacaattatgcaccgaggcacacacacaaaatcggtgaattcgcgtagcctggttgcatgcggttctctttgctgaatttctcttgccgacccgtctgaattatgaaccaaaccgttctctgaacaaacaagactctgtttcttagccaattcgtgattaaatgtgcattgtgtgttgctgcttgagagctggtctcacaagaatttgtccggcgatcggtgcagggctccagaggaacgggaagagctgccggctgcggtggatcaactacctgcggccggggctgaagcacggcgtgttctcgccggaggaggaggagacggtgatgagcctccacgccgcgctcggcaacaagtaagcttttctaactagcaactcccccgacgagtctcgtcccagtcgggtccgtgcccagtccccacacacctcaccggcagcgcgcactcgatcgttcgcctttacacgcaaaatgattgagcccggagacaattctccacgttgtgcttgctagctgctgctgctgatgctgccttttcctttttcagtttagtactaatctctctctccacacttaattaagctacctagtgtagtactagtactactactactagactagactattagtaccaacgcaacagcggcactaatctttttcgtgagaaagctagttactctagctgatttgtcccagtccgggcgcgctagtgccgagctggcaattcgggttctagaacgcgctgattgacagattgtgagtgacagagtgagtgaaaggagaggaggagcggagcggaggagcggagaaatcaaaatatgaaatggtggaaagggagaattaaccggggtgatgctggctggccgccaccgcgaccttttccgtagtggagctgatgctgacgcgcacacgctccaagaacgctcctgcgcattcgaaaaccgcgagatttttcggtgcacgttgcgatgatggctagagaaaccgttgtgtgttttttttttcccctttcttcctttcgcgctagtacatttgtttattgtaaagtgcgggccactctggctgagcatgagcaacaaggacaagttgaggggggacggctaggataatgtggacttgcaacgctaaatgccacacagtacagttgcgtgcgtcccagaacaagttagctcgaattaattttttttttggggggggtctatttcttcgatttttctatcttttttgtacaggaaaaacggacactattcattttagttgtacagcgacgacgataacatgtcgtcgactggttggaccaatccgttctcagttgcgagttaatgaaaacagctgccttcacaatgcgaaactgtcacgtaggagtactagtctcgcgagaagattagattctttattgggcgtcgcaattatgtgcttccttacaaaaataaaatatcaaaggattagtggtccacatgaatagactacgtacacgcttgtccctttcaccccacaagtgacacattacatttctttaagctggtgacagaggaaaaggaaacgagaaattggaaagaaacctcaacttgtcaatgcaaaagctttgggttttccactaacccccaccgacagaaaccaagattagtgaattttaagctgtggcatactactaaccgtaaggcagagagagactgatcgatagatcattccaaaaggataaaaataacctgacttaatcactgacagcaatttttctactgcaggtggtctaggatagcacggcatctacctgggagaacagacaacgaggtgaagaactactggaattcttacctgaagaagcgagtggagagcggcggcggcaagacgagccaagggccaccaaccacgcctgcgtcagccgcgagctctcccgccgattcagacgactcgcacagcctgcagcagaagccgcacgagccggccaactccgactcgtcggagccggcgcacgagtcgtcgtcggcgtcggccgactcgagctgcctgacggtgaccacggaccacccgcccgtctcgaggccccacgcggcagtgacacccaaggtcatgttcgcggactggctcgacatggagtacatctgtgggcaggtcgcggcagcacctggtctggacgctgccggattcgcggtggttggtggtgctgcaggcgatcagcagcagcagcagcagcaggtgatgagccaggacggatcggttcatcaggccgatgggccatcgtgcggcgtggacgattcttccctgcagcagcagcagcaggaggggttcggtggcaacggcggctgctgggattttcaggagcagttcgacagcatcgaccagatgcaggcgagcggcggcggcggcggcttctgcgacctgctctccatgagcgacttcgacctctgggccgagctggaacgtaccgcgtgatgggggaacgacgtgctcaaggatcgatttttaattagagcttgttaattcatagatgtcccgtggaaatcaaattaaggggtgtttgtaatactactgcattgtaaattatcgcggtgtatttatagagctgtttaaattagcaacatatataaggaagatcagaggcatgataagtcacttctgtacgaatttatgtttgccactttgctttggagagcatgggcaccgacagaaagatggaaaggaagaaggaaagctgtagagaattgcgcctatggatgcaattattttggtttgtttattgttgacattatctttgtgcttatagtgatagcattatggaacaatctattcatatctcactttcaaagacccgctgtgaagttccaagttttgttccactccatgaactgtcagtgtatcagaggtcccttcctttacacgtaggctttcatttccacataactcgtaatgattaaaagtgttcttgtaaatattggatcaatttcaactagtgttaagaaattgcaccctcttttataaagaccaatctgttagtgcctccactttcttcccttttcttcctgcagaactttaattttatttctttttcttccattcatctctttaaatgtacatatattagtagaagctcccacttaataaacgtcatagggttcatttgttttaaggaaacaaatcctataatattattgtccccatgacgtggttaatggcatgtgagacccattccccatgggcccacttatcagctaccacgtccctactactctatgttatattttgcattactcactcctaagttgtcttttttttggacggagggagtatatttttatgtttgactagaatatcatcgttacattttttttattacatactccctcgttccagaatataacaactttgagcactcaacatttgtcccaaaatataacaacttctccccagcaatctcgttccaaccaatcataaccctctaccattcacttttcccacctaccttcactacttaaccaatcataactgtaacgtcccgccttcccccaggccgggcccgcttacatctgatagctttcataggtcatacactcgtgtgcacccgagaagaatttcccggtcggtcacccatcccaaattgctccaggccaagcacgcttaaccctggagaaaagaagttgcaacttgccctaggtcgggatgttacaccttcacccccttaagagagatcgacgcccccgtcgatcaaccctaggccaggtcccacctaccttcactacttaaccaatcataactgtaacgtcccgccttcccccaggccgggcccgcttacatctgatagctttcataggtcatacactcgtgtgcacccgagaagaatttcccggtcggtcacccatcccaaattgctccaggccaagcacgcttaaccctggagaaaagaagttgcaacttgccctaggtcgggatgttacaccttcacccccttaagagagatcgacgcccccgtcgatcaaccctaggccaggaacgtcctctcttggccacgtccatgtgtccagtgccagcgcatgcgccatgctgtgtaaccactcccggtctacaccagccatgcgcaccatgccatgtcttttctgcacactttgtcctcactcgtgtgcacccgggaagaatttcccggtcggtcacctatcccaaattgctccaggccaagcacgcttaaccctggagttgtttggagattggcttccggaaaagaagttgcaacttgttgatatgagtattctattaatcctattaagccttaggtcgggatgttacaataaccctccattattcacttctatctattttcttaataaccgtgttcaactctaaaaatgcttatattctagcacggaggtaatactttttatttctaattttccaacagtgtaacaaaaaacaatattaccatatttcaacttaaaaaatttaatctttcggttggatctcccatcaatgtggagtttcagctttattctatactgtaccttcggttgtatggtatactatggttatgcatcatcccgtatacgtgacgtagaagataggaatagacatagagcattatttaagaaggataaagctttcttcaatttaaaccaaaagaaaattgatcgtaaagaggaaaagtaaatggcaaatatatcaatagtcatttcttctttcatgttcttctaaatggctataaaagcatctcctttgttgatcaaacaatgttagagatggagttcaggttcgagttcccttaataacaacggaaaatacttgttttacaaattagacttgacttatcgagccaggaaattcctatgcatatgcaacatcttgtgatgtctcacgtctctctttgcttgccaaggtctaagtgagtgaagatcaagcacacccttaataacaaaagagagaagttatgtttcaactaaatatataaaacatagctcgcccaaagtttagcatctctaaagcagattatttccgacttccatcctctgttaagagggaatccacaaatgccccatagatcatacgcagactctaatttgactaatttgaataataattcaaaactattttaaagagacagtgattacgagacattcatgctagtatgttgccattcaaaccttccaaataacaacggtaagctatggatttttttagaactacggtaagctatgttgatatactctttatgcttagggtgtagtcacatacatgttcttttttaccccaattaaatatcatcttttggcacctaaaattctattttcatattatttgtcgtagttacacttaataataacaattaaaacactacaacaaccatttacgatatatctatattaattatttagtcattatatttctatgctcctgctaatagattaagggttaaacttgatagatggaataccaatcacaagtagattaaaaaaaaagtaaaagggtctcattgtttgccttatgtttataagccaaagtttaattttgaatatgattttttgttttcttcatcatagtttattttacatcatttgtttttgagttgctatggacatgtatataaaattttactcataaataatttttatttgctaacaactgtggagattatgggtaccctatacccacacggcatggttatccgactagttataggggataacttatatctatagaatatgtaacagattatgacttgggtattacgtttccttgtatattacggaacggcctaaagtcctggtttgataagattgtaaagtagatttaggaaaccgataccatattggttaaggtttctatcttgtaatcctgccccccgtcctatataaagtgggcaggaggccctctagggggcatatgagcacatatgatcgttagatctaaactacatctggcggattcaaatcctcaaacaggagtagggtattacctctcattgagagagcctgaacttgtctaaatctttgtctccgcatccatccacttttaggtctcgtgcgctaccccttttattattgccgaattcatgtttcgacaacaacatatttggagtctaatcggtagtgcttactgcagcagcgcagccgcagccaaccagcccaaatctacacaaaacagttgatttgcagcaacatcaacaaggtgtgtgctacttgttggctgctgctgcactgtggcagccagcacaaactcaatgccttagataataagggagtgtttgaagagaaggggattgaggagattgggaagatacgcaaaacgaggtgagccattagctcatgattaattgagtattaactattttaaattttaaaaatggattaatatgattttttaaagcaactttcctatagaaattttttgcaaaaaacgcaccgtttagtagtttgaaaagcgtgcgcgcggaaaacgagagccaatctcccctatcacccctaaacgaacgatgcctaagtactttgagtaagcgaaacaatggaactggaagattgttttgaatttaaaaatacacataaaaaagtttgaaaagaagaccctgatttatcagcaattgagcatctcggcaaggttctcgccgctcggcgtcccggcccagccttttactcgtgggcataaaatagacagggccgatatcgtaatttcctccttcacaaatcccaaaccgccggtgccctagctatcgacgactcggcggcgacgcgcctccctggctccctcccgtcgctcctcctccccgacccacgaactccccccaatagggcagaaaggaagttcaaatttgctcctgatccgagcgccaaacgcctagattccaccacccaagcctcctctcccaatccgatctgccgttccctcttcgaatcggctcccccttctcgccgattaccgacgaatccgaggccctcctcctccttcgaatccatggatccgcgcgccaggtaccctcccggcatcggcaacggccgcggcgggaaccccaactactacaaccgcggcccgccgctgcagcagcagcacaaccaccaccagcagcagcagacgtcggcgccgcaccaccagcagtacgtgcagcgccagccgcagcagcatcaccaccacaaccaccaccagcagcatcagcaacagcagcagcagtggctgcggcggaatcagatcgcccgcgaggccgcgggaaccgacaggaatagcgagccgaaggctgtggcgcaatccccagccgtcgacggcatcgattcgaggtgagaccgtgagacgcgtaggccttagagtttggcgatagattatgtgatgttcaacttcaagggatgaattaaggaccagtgttgtgggtggcttgtttgtttaatttttttgtggcgaaattggaccaaatgcagtttgagacatatgctttccctgcagcatcctgcgaagtgagcactgcaatttcgtattccgtagtggcaatcactgaatgttttttgtccaaatatgtgttcatatgttgcctaggctggtactggaactagggtttgctgcattctaggtttgtaatttgtgaaactagaagttctacaaacagtaggtaggctggtgaataatatatctgatcattggcgcagatatggttatcacattgatcatatgctcaccttttgtgcagttcacaagactggaaggcccaattgaagcttccacctcaagatacacgatacaggacagaggtaaatcgcatttataaaattttcccctattttttcttcaaagccaggcaaccggtgctttgtatgctaaggattacacttgacaattgtaattgcaaaacatgttgactgtcatctgcgctttgccctacctatcaattgttattctgccaaacaattcagtgtggcaggagttcctttacctttatgattttttggtgtcgcacattgtaagctaattactatctccagtcacaaatacatgtcttgaaaattgacatggccttccaaatacagctttgacactaatttctaatttaatgtattaatagaacccactaaagttataatgttatgaaaaatcacctttcaagacaaatttacatatattatgttcatgtatccaatctaaatattgtaaatggtcttgaaagttttactaaatgcttgtccaaaacaagaattatttgtgacccaagggattattaattccgatgattgaaatttaatttgctaaactgggtttgaacatcttttcacacccatgagatatcctaatgttgctaatcgatgctctttatttctgttatccaattcaaacaaacaaagtttaatcctatgtggtcattgtaatatcatgttgataccttcttgtctaaaacaaaataataccttgatgacttaaaacatgcacattaagtgttgttaagctggaatgccccaagctccttactatcctggaggccacatgactcagttaaataattaaagtttcatcttactgagttactgtgctcttatatgttttcccttgtgctctttaatcttatttgtataattttatctttgtatagttcttccccactgtcttgattgaaagaataattgaattttcaaaagaatgtgctctcatggcttgagtttgctctggatatcgacattcttattttcttgctcttattttttttgcctattcttttattttatttggagatattatttatgagtttatatgatgttggtgtcatactctctgcatactttattatattctgctgttgttgcacaggatgttacagccaccaaaggaaatgagtttgaagactattttctcaagcgtgaacttctgatgggaatatatgagaaaggatttgaaagaccctctccgatccaagaagaaagcattcctattgcattaactggtagtgatattctagccagagcaaaaaatggaactggcaagactgctgcattttgtatccctgcactagaaaagattgatcaagagaaaaacgctattcaaggtttgttccagaatccaaactattaaacttattttgtaccaactctcacagtcaaacatgctataaacctgtgcctttataatgcctgttggacctcctttggtaccgtttattttatattattactttttttggggtgttggggggggggtggcctgtaggggatcttctttagtaaatataatattatattgtgcaagaatggttcaatgattgctcttgttatttgtagttgttatattggttcccacaagggagctggctttgcaaacgtcacaagtttgtaaagagcttgggaaacatctgaagatccaggtcatggtcaccactggaggaaccagcctgaaagatgatatcattcgtctctatcaacctgtccatttacttgttggaacgcctgggcgtattttggaccttacaaagaaaggtatctgcattttgaaggactgctctatgcttatcatggatgaggtaattcatctattctttgcaattgatattatattctcatgaaaactgttcagcagttcagtactcagtgccttcccagttgtatatgttatttcatggctcaaaagattattttataaggagaaattagggattgggctaaaaagaatagtaaaaatctcatttacaatcaaacaattagtgacaaaaaaaattagtgtttctatatacttaatgcaagtattttttttagttgctctttcctaagtttttccttcaaattaatgtttgcatccttcttgggttgtgctgaaccaatgaaccccgtttcttgtgtttacaactgattattctgcttgccaatacccatatgctgaattcttgttattacactatcccttgtttgtacttctttccagatatgtttgtctttagtaaatttcacgaaagcccaggttttcaggcatctgtaatgcaaaacccattgtattttaatttgttttaatgaaccccagattttgggaaacacttgactacctattgcactattttacttggattgtaaatttattgcttaagacaacagcaatgacaacacaactaggaatattttggaacatcctgcatacagggaaaaataagcacaaaaaaaagatttgagtagcccattcagagtgtgcggtgtgtctatgataggtacttggccaccgggaggtagggacttagggtgcgttcacgaaacgagaaagctcattaacacatgattaattaagtattaactactataaacttgaaaaatggatttatttgttttttaaaagaaacttctacatatattttttttttcacaaaacacactttagcactttggaaagctaatggaaaacaaggaagttgttgcttggagttgaagcttagagcagggccttagtattagtccttctaaaaagaaccagtgtaatggttcatgaggcgaagtagtatcttcaagtgagaactgagaaacatcgtggtttttcttttttgcaccatttaagattctagtgaactatatgaacctctgttttttgagaatctacgttgcatgatttggcttgataacgataatttgttttggttgtgtagcattgaacattttagttgataagaatttttatcttcttacgagtgaaatattgccttctgttcaggcagacaagcttctctctcctgagttccagccttccgtggaacagctgattcgttaccttccagcgagccggcaaattttgatgttctcggcaacgttccctgtgactgtgaaggagttcaaggacaaatacctgcctaaaccttatgttattaaccttatggatgaacttacactgaagggaattacacagttttatgcttttgtagaagaaaggcagaaagttcattgccttaacactctcttttccaaggttttaccgatgagcacctttgctttgtgttcagttagccacttttacctcccttatagcctgtaaatcatgcacatttgttttgatgcagcttcaaatcaaccaatcaataatcttctgcaactctgtaaatcgtgttgagcttctggcaaagaagatcacggagcttggttactcttgcttctacatccatgcaaagatgctgcaagaccatcgtaatagagttttccatgatttccgtaatggggcatgcaggaacctggtttgtacaggtatggaattctccgtgttccgcatcaactcttgactggttctattcttgatggatatttgttactgttcactgtctagtgaaatctcattaatgtcctactagaactaattgtttcagccgatctgaatgtattttgttacttcatccctgcttttgtatattctttttcttcttaaaaagaagcgttgatgacagtgttggtgtgctttatttacccgcaatccagatgttccgtagatggatttatgtgaatacgcatgtgttatatcttattttactaatgtattcattatttgtacatgtgcatatgttgttgttagctggtggtataattaaaatgtatgcaacctttttgatccaagtgtaattaattttcaaactcacaatgtgtcatacatatatttgagatgtgtggcaacacaggtacaatgaaaaggaggaaacaatatgctaattttaatacttcactaccaagttctgtttcttgcaagcctccataattcacttatatggaatagttttgaaatgttgtgattttgtgcaagtatatagaaatgtgtggatatattgcttacggctacacgaaattctgatattctttcttctattttaacttttcatttcttttttctttgcagatcttttcacaaggggaattgacattcaagctgttaatgttgttatcaattttgatttccccaaaaccgctgaaacatacctccacagggtatggcatttgaataaattcagcttttgatcttaggctttaatctaattaggatgtcatatgctgctatgagaataatattctagaaactaatcttaaccagtaagatgtttgtactaagaagaaaatgcacacacaagtgttagatcaaatgtggaaacatgcacacatatgttttatcatgtaattggttgcccctgtaatttgttcatagtttggaactaaataccaactgttattgtcatggtatctctcctttgcaatgttgtgtaggcagtgcagttctttaactgttattttgttggcctttttctaggttggtagatctgggagatttggccatcttggcctggctgtgaatttgatcacctatgaggatcggtttaacttgtatgaacaattacccaccacaattttattcatgtattttattctgacgtttggttcattgaactaagttttctttctgggaacaggtataggattgagcaagagcttgggactgagataaaaccaattcctcctcagattgaccaagctatatattgccaataatttgacagagttccagcgtgtattcactttctctaagggtaataagaagacaattcttgtaaataccagctcatcaggtaacttattcttatgatgaacaagggcaatgcttagcttttaattttgttatttcacaactaccgcaatggaaactattgttttctgttttttttagttagcctggttttactgtcagaaaatgcaatctgcacatatccatcaaaggcttttttagttaacgtatgtccacatgcgaatgtggcatatcactggtcacatttagtccaaaatgaaggtgactgtaagagcgaaatctgctgcatgaacatattagtgacactaaaatgaatgtaactgggtgttttggcatccctcggttgtcaataaccatgcaaatcatccatgctgcagcacatacatctgagtttgatttggaggttgaaaagcgaggtagatggcagatgtcttggaaatgtaacttttcatacataaaacagtgttttcaactttatctttttttctgagtcttgcctactttattcaaagaactaggagttatcactatttctttttctagaatttttttgctgttgtgcattttgtcatggcatgtgcatttgttactttattttgccttaaaagtaccatcatagtatttaaatgtggcagttccatgttcactcttttaactttttaacaacatagcagacatgatctccgtttgtatatgtgttttgcatgctgagattgcttgctcaagagcttataaattgccaaaattcaggagctttagttgacattgtgttacatgtgcaggttttatcatggatctcctgtggcatatgggaacattcatttttggagttttatttgagatgagacagactactcttccgatggacaccttgtgcttatatcattttggctaactaaattcaaacgccctcactgaggcacacagtagtgtatattgctaggtgcctgttcatgtgcctgtcctggcctcttagctcttatgataatctctccccttctctagatttcgttatcggctatttctcacaggacattttaaccctgttagtggttaactggttgtgggctgtgccatgtcagtgcacacattccagttgacgtgccatcgggtgtggacaagttcatccaacttgtgctctgaactgtcaatgaacagtaagcagcacaacaagcgtcttcagatattagcgaataaatctgtcgcaagccgcgtttctgcatccgtgccatgcagctcttctcttgcatgaggcttgtgccattatgtttagattctgcctcttataattgagtctaatggttctacaaactgagtttacctgtcctgagaactgggtaaaacatgtggtgaggcacatgcaacttgataaataaattttttacttaagtgaaattctcactcctggttcattctatgtttgcctttaaccgtgctggaatattttcgctgatggttaccaaatccacggtgctatggttggtgaaatcttgaaaagattatgttaaatagtcccaattaattacagctatcttgaaggatatcatctgttactacttgcaatgatctactcataataccttgtttgggtgtcttaaatcccaagatacagtctgttatacgggttcgtcgaagggatttgtgcaccctgccatgcttgtaccctgcatatgctatcggtggttctgaaatcctagcacatatccctttcgtttcataataaaacaacgtaatattgagtgtgacacgttctaaaattataaatctggatctctatcagatttgtagtattagtttgtgtcacattttttatttgttataaggttggtttttcatgggattgatggagtatagcatactgtagcagccaagaacagaaagggaaatataatcatgcgcaatgaatgggtttgcgtatcaatctcccttccattgctggacaagcccctctgcacagccctcacgggcgtttagcatggtaagctgagagtggcaagtgttctcaagcaacaggggtggggtggtcgtcaatggctccaacgtgtactaggcactactgaaacatacaccccctgattcccatgcggtcgactattatatgcttgtgctgcgccttgcattcaaacagtaacagtattttgtgttcttttctcatagtcgatttttgcagttgcagtgccatcacggtcaggggatatttttctccggcctgccactcttttttagataagtttctactcatctctgatgctgcgactgtgagaacgacaacacctgaccttgctacggagtattttgtcgtaactcttgtcttgcgatcgtcctggaggttattcaaagctcgactaggctagtttgaaattggaccaccaattgcatatccagaattgatgcactggaaagcgacgccctgtatacgaaatgggcagtgttgcagatcttgaccaatactggaggatctttatcctaagaaaattgtgggaactaggaaaattgtgggactaagaaaattatgaaactgaatactgaggagttgtacatctctctaccttgggtgaagtagcaagactctatcctcctctcctgttccatgccgtctcgactccatcatacaccatgaatgagaactgacactgcgtcgccttggagaacaaaaaacgtggtacatttggctcatctggatcgtctggctgaaaagagcgccacactgcatcggaaccgctacagtgcttcgcctacagcatcaacgacagaaacagcaccggtacatgtaccaacagattaaccgaacagtggcactccgagtcccccccaccaaaacacctgtccgtttgagatcatcatggcgacgcccgccccgcgcccagcccacccgcttcaaccacgagccctcccctctccctgcgagcctgcgtctgcgactgccactgcagtgcagcggccacagcgagcagtggatcgcagcgaggcaggaactcatctctgaactccacatttacttcgcccctctctccctctctctatgtgacccatacgctttcccagactcaaaatccgagctacgctcgtttggccagaagcctcatttaagattactccccctgcttttcgtctcggcatcgccggccttgctcgcactattactcccacgcagttgctgctgctacccccactcatcacactggctgtcaacgtgcggcgctgctaccgtgctacgctcaccaacgaaagctgccccgtgaaaggctgtaggggagcatggagttccttgaaatgcatggtaactggtagagatgttttaaaaataatagccatttccctataaatttctataaatttattgaaataatggagatttatagtaaactggtagagatttatagggaaacttgcgatgggaaatagccatttataaattttaaaaataatgatttatttccattatttttaaaatttattgaagattttttttttgaaatttatagtaaacttcttcaataaattttaaaaataaaccatacattaacttttttttgaaacaaaaccttcagctacggttctagccatagtgtttggtgttacatgctaggatcagtgcactgtaatattattagggggctattataccacgagattatgtctaaaccaaatgataccaataaggaattagactctgatacttatcagtatcagatatagtacatcaattgatacatatggataccagccgatacctaatgataccaggcagataactactagtaccagacttggtacccgtcgggtatcatatatgaagcttagaggggagggagaggagcggagatggttaccggctgcgattctctcaccgtgagacgatggcgaaaaacgcaggcgatgccaaatctaccttccttttccatttcccctccatttcctatattcttcctctttccttcacatcttcctcctctgtttcttctaaacgagacccatcccgtccttttgcattgtgtggctataggagaccaaattgccccctatctatcaatgttaaggcttcgtcacagccatcagctcgaccagtccagtccataccatcaccgcccctgtgtgtgaagaacccgcactgcaccaacgcaccacaaacagccgctgcaaaatctagccaccaccgtgcaacaatctcgtcgtggaatctagccatcttcaggtcgttctttgtcatagcggcgcgaggaagtgagagatcccgtcccaaacacgaggaatggatttcctgtacctagcattcccataaatattatgatggagttaattttgctaagagcaatatagcttaaaaagagttactaactgtacccaaaatttaaacatttcaatctaaatttagctagaaatgcttgtattttaggatcggccgaggaggttgctagatgtacacttgcgtaggacggtaggagtaggcccaaatgcgacatgaggtcacggccacaaagttatgatacacttgcgatgggtacccaacaattagtactactagtggtgcttatcatacagtaataaatacttcatctgaattactcacttgaatgcttgatctgatggcccgaagttactcttcggctagtttgctttggtacaaagtactccccatgaaaggacatataccagtgatagttctatctctcccccgcttgcgtatcccggccactcgactactcgagtagtggcagcagcacgactgcacgacgctagtacccgggcgtcaccgtcgccgttgcgcgcgcgcgctgtacttgcaagcaaaagcccccctcgtcaattgaatgcgtgcgtcgcgcaacgcaacgcaagcacgcgccgggttttattttcttttcttcgtcgtctcccacactctccgcttccgttccgtctcgttgttgttgctgccgcagcagcgcaggtgaaaatctccggcatttaaggttgcgccgcgggggatcctcctcggccacaaacaaaaccaccctcgtcctccgcgcctctgctagcgagtactcctacatagactagccacgtctccccccaaatcttttcgcacttcctttcccctccctttcacccactgaatcactcgaagtcgtcgtctcgtccacggccctgctgcctcgtgcgctccggcagctttgccgggggtgggtgggggagcgcgcgccatggggagggcgccgtgttgcgacaagaaggggctcaagaaggggccgtggacgccggaggaggacaagctcctcgtcgactacatccaggccaacggccacggcagctggcgcctcctccccaagctcgcaggtaccggctggcttctctgttcttgcgaggcaatgctttgcttctgtcacgttttcgtgttcgcgtgccgcactagtgctgaactgctgatcagcacattctgagaatctgtcttgatgatttcggccttagatgctgcttatactcgattgcatctgcataccttcaagctgcaataatcacccacaagctcgattggggctaaaatacacaaattatttcatcgtatacaaagtaggagtactgattaagtcgtacactcggcgagtactaggctcactcgtactactccctgctgggttttccttgatcttcactccaggcatcagcattgcctccagctacgaacactcggtcactcactccagggctccaggctcctaccattaccatgcccatgttgtgctactctcttttcgtgcatgagaagtactcggtattattcacaggagctgagagactctagtccgttccatctggataacacttcgttttgcgttgcatgcagggctgaaccggtgcggcaagagctgccggctgcggtggacgaactacctccggccggacatcaagcgcgggcccttcaccgccgaggagcagaagtccatcgtccagctccacggcatcgtcggcaacaagtaaagtcccccttgctcgtcttcatctccttcacctagcgagcgagtagccgagcaggactggcagactgaccagctcacatcgcacagccactgtgtgctagtgtgcactgctcggtgcgcagctaagctagcgcaccacaccgtagcactgtacatgcacactgtgcatggctcctcactcattcaatgttgacacatcgcattctccgatcatcacatcatatatgatatatcccaaaccggccggctggtgtactaccagtatatatagtagtggtacttgcttgtttggagtatgtacatgtctagtttagcttggagtcccagtgtatatttaggccattccactctaaaatttttctccctatcacatcgaacattttacgtttgaacacctacgcgaagtattaaatataggcttaaaaatgactaactgcacagacacaactaatttgagagacaaaactttaaagctaattgctccatgatttaacaatgtgatgctagattaattaggcttaataaattttactgatgaattctataattagttttttttattattgcccaaacaccttatataatactcgattataatacccgatgtgatacgcaaaatacttacatcccggatctaaacaccccctttactcatttactgtagttctatactgtggtaaatattcaatccagttagatatcactagagtgtactactactagcagcgcattgattagaagtggtggcacacacctgctgtttgttctggccaggtggtccatgatcgcggcgcagctgcccggccggaccgacaacgagatcaagaactattggaacactcacctcaagaagcagctgcgccggatgggcctcgacgatccgccgcccgggccggcggcgggctgcccggcggcgcgtcacatggcgcagtgggagaccgcgcggctcgaggccgaggcgcgcctctccctcctctcctcctccggcgccgcggcgacgacgacgatcaccgccgccaccaccaccacctccgcctcgtcgtcctccaccaccgcggggcccgtcgccgccgccgcgacgtcacccgcggacgtgttcctccgcctctggaactccagcatcggggactccttccgcaagctagccgtggtggcggcggggtcgtcgtccccttcgcgggcggacgtcacgaaggacgctgtgaagcaggaggaggaggcggcgccggccggggacgactcgtcggcggcgtccaacgaggtggaggcggcgaccatggcggtggacgagtaccagatgttcctcgacttcgccggcgaggagctgggcctgttccacggccggtacggcggcttctcgctcttcccgccggtcgacttgctcgaggcgtcgctggagacggcgttcaagtgacccgtacgtcgacgacgaccttgctcgccgcgcgccatgtacgacgtactacgtactccgcagccgcagcagcagcatcatgcctcgacgtaggagtatgtatataagcaagtgttctggggcgtccggacagtaggcgcgtccgtgtgaagggtaggacacacgtacgagacgtgggagaaaattttggggatcaattagggttctaaggataatctgtagcttggggtttaggcatggggggaacatcatggtgtgtattagtattacggccttttggatggcattctctggggggcaaggggcttaccggagatgctctaatacattcaatgatgttcgatctttcagtgttggatatggagctggttttatctgtgttggttgatctcagcaggaaaccaagagaagagagagtttgacgccaagaaagaagagaggaattcaggaaagttatctaccaggaaactacggcccttgactttctgtagaccaacaatggacctcgttacttctgctgattactcttcagccttcaagcactggagctgtgctatagcccctagtttatcctcgtgatctttctctgaggttgtgttgaatatatatacataatcggttatagtttagaacttaaatttatattagatattaggatagtagcgaatcttctgtgagcgtatcttttgagtttacttttactgtcttatgagcatgtcgtgactatcccgacgtacggtaagtatactatcaagattgaggagataacttcgatatacgatagaaacaacatgctactttgaaatgtgagacatgtgtcagaactaaggaagagatcaatttcacttgtgagcctgcctacataagaaagagtggtcgtattaggtggattatgatagaaagaccataaacatcatgaataacggaaagactgttatgactagtgagaggatgaggctcatgtttgtgcaagctacatggggacacggttataggtggagtcatagaagatgggtatgttggtgttgcagtgcacgttcttgaagaccgtgaggcaggcaaaggttcgtcgagtggcttgacgtgagcggcgaaaggaaataacttaagtctaggtacacggaggtttgcacattgagtaaattcagatttgcttgacatattcgctaggtggagtttgttaaaatttgtatctaatatatgtacgtaaatgattatgactcagagtcgaactatgttctaggctctcctaaatagagatacacatatgttctaaccacgtagcaacttagcatagatgattcttttaaccatagtggttatagtcaattatccagttccattcattatgcatgcatatcccttcctccctactctacatcttaggctgtgttctttccttcaagttcccaacccctctccctcgttttccgtgcgcacgcttttcaaaccgctaaacagtgtattttttataaaaagtttctatacgaaagttgcttaaaaatcaaattaatatatatatttttttaaaaattagctaatacttaattaatcatgtagtaatgcctgctccgttttgcgtcccctcctcccgaacgcagccttagatagcttgaagatcaaccccgtctccctgacttcccacccttttggtcccgttcgtttctgctttggattaagattaaaaacgggcatgtaaaacaaaaaactattagcgtatgattaattaatatttaagtactacaacttgaaatataaatatatttgttattttaaagctattttcatatatattttttcgcgaaatacgacgttttaatagtttaaaaagtatgctaatgaaaatcaaggtaaaattttaattttattgagaaaaatgtgctaacgaaaaccaaggtaaaatcttaatttcatcctccctcgcaattcttttgctccttgataatgcttctactttgagccattgatcatcttctgtacataatcgtctttcacatggcatcactttttttcatttcccaaggttcgcacatgtaaacactattattttatcaccctttagtatgtaactttggtggtgccattatcattatcaggatttactaaaccattgggaacaaggttactgtcaccccacggtttggtggttaccacggtagccatgcggttactgcgaaaattataaagtatatcgtgattttaaaaactgagaatattatcacctataataaccaccatagcacgattttataaactctggtcactatacataattcttgaaaatccgttaagaaggaatgtactttttattgataaattttatattatagtagtgctaatatgcatgcatcgagatgcatgaatttttatgtaggaatcagattacggttttctttagagctaacattgctataataccactttgcttaaaggatattgctaccactgagtaaaagcgcgtgggatcagaaaaaggggtccctgatgtgcagtggctgactctgtttgacttgtttctattcagaaaaaggagtaaatgcaccggatagccggtggggccagcccgacgagaaaacgaatttattgccacgctcagataaaaggccaaaccagagcagcgaaaggtttgccacgacacctgcagcacaggagcagcctgttgcctgtggtggcttcatcgccaggaaagaacagaaatgggcagggcaagctcgtcgcccctacgctaatgattctcttctgggagatactattaaatgccgtgccattgtggtcctttggatatgattgtcatttagagtttgtatagttcatgttaaaatttaaagtttggttgaaattgaaacgatatgacggaaaagttaaaagtttgtgtgtagaaaagttttgatgtgatgaaaaagttaaaagtttgaaaaaaaaattggaactaaactcggccttaatcaggactgtcgtgatggataacagtgaagaaacgattcttttttaggagtaaagtaaccttcccacactgtttgctcggtttgtgatcgcggcaaaattttcacttcatacccagggagaacgtaaaaattactacgtatgttccagtcatctagtagaatatttaggcccgctttattcgaaagaaaattatatgatttatatggattttattcctatatgatttttttcctcatatagtcctttgaatcaaattaatggtcactatagaatctcataaaatttatgcgaaatatctcattccgtctaagttttggagaaaatctaatatgaggtaaaaccttatgaatttttttttcatattttcatctctccttaaattcctatgtttttttatggtccaatcaaacgatcattctcatcttttttttttcaatcatgtatgttaaacttgatactatcaaaataatgtgtttttcgtgtttcttcattttctcagtcttgcattttaaaaggccctttatacttactccatttcaaaatataatcgtttctaattttatcctaaattaaactttcttagtcccaccgtgtttatagagaagagtattaatgatgatcatttggtgtcgcaaacactattgtcatttcaatacactcgatcaaatttagaataattcgacttaagtaggatgatgcttatgatataggacgaagggtcacaaatctgatccaacaacacgctgtagatggcgagtctttgatcttgtcagagggtagaggatcctagcaacttagggcacctttgaaatggaggattagcaaaagaattttggaggattcatttttctaaggattttttacctatagagccctttgattcatagggagaggataggaaaacttccatatgattgtattcctatgatcaattccataggaaaataagcaagaggttagacctcttgtgaaactttccttcgttgagtgtatactgtggtataatcaaatggctcttctctccatttcctgtgttttcaattcctgtagaattgaaaaaacatacaacttcaattcctacgtttttcctattcttgtgtttttcctatcatgcgtttcaaaggggccccatgtacaatggtctttattagtggtctatctttattgtcatgcaagcatatttggtgacgtggaagagagagaaggacaaagaaagatggttgctacgcatgacaacgacatagagtcgactcttagcattattaggaaattttttgttgcattgagtctaataaagaaaagataactagtaagaaaatattttagtacattaatggttagagaccgtattgtcttaactattgtaacgtgatagactctaattaacgtagagaccatactggtttttgtctttgtacttgcccttaaactccataacaatatgccaatccaaatcattatttgtcatgaataggctcttttggacatccaagtccttacataataactcccatggacaagagaaagaaggcattaatagaatgaacagcctaatatgttacacttaccgaacaacgtctatgtttggtcatgtgttctacaagtgatgttgtagttcccatatggtggagataatttcggtacttgctatatttcactcaagaaggtagaaggcaaattgctttacgcgatccacagagaagtcaacttgattcacttccccggccggggatcctatagataagaagattaggagagttgccaaactctaaccatcatgcatgtaccacacacttctactatgccaagggttgtttggttcaccatcaaactttatcatgtcacaattctggcatcccatagtttgttttatccatatttatttcataatcacacttatgagttaccgcggttaagctaatcatgctacaaacttgtaccctataatttattggcgacactttgtagtttaccataacttggatgcaagcttataccctaccaattatgccctatgttggtcctacagaccaaagacacaccaaggttctagactaataagccataacacctattaacaaaaaaatattttttgtacataaaacttttttatatgtgctattagcgacttacaagccaatgctagaaaataaaatacaatgaaaaataataaaaaaatgaactttaaatttaggttttaaaactcaaattttatttgggcatataggctgaagagcaaacaatagagttgcaaaatgtttaggatttaaggttttgtgtattttagaaaaaaaaactgatctactttcattttatatttcaagaaagcatgggtaatagaacatttaaagggatataactaaaagcaaaatatatattattacaataaatacatatgttgagtatatatactcctttatttaaatagactgcaaaggtggtgacagtgagtttgccaccctatctattcctatatattgtagttttatgtattacaacttgaacttcttaatatgacaagatagctaaatctaaatggatagctatatataaaattaaattaaagtgagtattctctaaaacaaaaggctggtaacatatttgatgaaaattatgccttttagtttcaggaaatattatgatttttttcctttaatcatattaaggcatggacatttagatagtgctacaaatagataaacgataaattacacttactttggtcttgaacaaaatgttttaaacaatcatgatttcagtggttgtatttgtattctactagtatatcctacgactgtaagtgtaacagaagatatcgtaaaaacaactcttccacaaccatcaatctgctagtacaatacatttgtctcggtttagaaattcccatgctatatgtgagatcatagtattgattatacggactacccacacttataaaaaagagtaaatttcacaaaactacaggtgttttgaccaaattatcacaaaactacagatttaaggagttgtatcacaaaactacatatttagcactaaatttatcacaaaattacagattttagattaagtatcataaaatgcatatttaatattgaacttatcacaaaactacaacttttggagtttaaatcctagcaccattgttatggtggagctataaacatcattactttgtgattaaattgattataaacctgtagtttcgtgataatttagttactaaatatgtagttttgtgatacttcatcttaaatgtgtagttttgtgataaatttggtgttaaatgtgtagttttatgatacatcgagttagatctgtatttttgtgataatttagtcatagtatatgtagttttgtgaaatttactctataaaaaaataatgcattcgctctaaaatatagaatattaataatatagttatatggataaattttctttatatttcaaaatggagatagtaacgaaagatatatactacgtgctcaatccttatttaatcttttgaaccgtcctgctttttgccgacccttagtttgtgtttagttcacgttaaaattgaaagtttggttgaaattgaattgatgtgatataaaagttggaagtttatgtgtgtaggaaagatttgatgtgatggaaaagtttaaagtttgaagaaaatgtttggaactaaactagacgtgtaaaatgccacgaaatttgtgggaggacatcacagacgcggcaataccgccaattggctgagatgcacccgatcgttggatgccacgtaccctagtctctatggcattgttggctctgaacaaacccaaagcatggcattttctggctatttactcccagctcctgggctcaaataatgctcaatcaaccagggacgatcggagctgagggagctttacaaacaaccgggtacgagacgagtcgatcagccggcgatcgacgcactctccaactctggggcgaaacgagagaagacatgcatgcagaagttcacgttgtcaaggaggcgatctcagagtaagtttaatagtagtataactctaaatcacctatagataatgtaatagacaattcatacaataattacttactatactattaatatccggtcccactatcatatacatattacgtcttggagtccgtactgcagctggctacaaatttatcgctcgctgctcttctctcttcttttatctttttaaaatatatttataactggcttataggctgctatggtaactgctctcacttttgctcggtgttggctctgggcatcatgcattgaatgcgcctaggacgacgaagagaacggagtcggagggagagaggcgatgcagttggggttggggccgctgcgacgacgcatgcagccgcgcagacaagcgtaggagcagcaggggaacagtagcaggtcagatagcgtgtgcggcgcgagcgagcgcagcattgattgcttgtgaatgtgcactgcctctggcacccacgtcaaattggggaaaagctaggccggtcgacttgaccggacgatgcgccgtactccaactctactactccagtcttttttctcggttgcacgagtactcggtgtaccgatcgggcgggccggcacgacgctacctcccccgtacgcgagaacgtggtgcctgatcggaggagtacgctacactatgagcggggaaagagcgcgggaggcagaagcagaaagagttagcgtgtgcctcagactttgattgcggtacggctccgtctcaggggcggcattcaatggttgtaggcatttggcgtacgtcgtgttttgctcgacgttttgtgcggttattcgttgatgagaaacagccgggggacgacgaggggtggcactgtactggtgggcctggtgtctggaggccttgggttccataaagttcagtttatcagccagattaccgcgaccagaccaggagtccatgccgtttattgagccgtgaagacgccgaagtaaacacacccttggcctacaacaaggtcttcgtcatccattgatttgatttgattgcgatttcagagctcaggccagatgacacgagcataaacatcgtgaaaataattttccagcaagtcaacctgtcacgttgaacgaaactgcttttaaaataactgaatgagtcaatttgtaccgatgtacgaaggtaaaggagatattatatccggttttacggttaaggaatacgattcaatccaaaaggaagagttgaaagtcgaaaacagacttatacgaagtgacgagccatcaaagtgtggacacccaagagcccaaaacttttgcaggctgtagcagcctatccactgcggatgtcaacgacccaaattcccgtgccagctgttgcggtgttgctcccttcacctcgtgagtcccgtgcccaccaccaggcgcgcgccccacgttgttgcccgttgggaccggagagagttcacgcggcacctgcgccgctcccgctccatcgcgacttccgcggcccgtctatgcgccgcctctttttttttttctttctttcggggcgatttcttctctgttagtgcaagataataatagagctcacttactattattagccaatcttaaagccaacacatataataaattagctataaagttggctacaattttcttctcatctctctatctctcacttatacattaattgtatttgtcttggagcttgtgttaagctagctcttgtatgagagccaacacccttaactttttgttacatctctcctccacataagcttatagtaggattatagctaacaattatacttgctcttagaatctttctcaataagctgataagaaaagttcgttttatgagaaaatgcatcgacgattatcaatcttaacgtgttattattaactgcactcgaaatgttttagaccacacaaagaaaaaatcatgagtcaatgacatgtaggacctacataagtcaatgacatatgggtcagatagcatatctcaaattttacaaaattataatggcatggttccaatttttccaaagaaaaaaaagtacacacttacaagttacaacccaacacaaataactttcgaaagagaaagaaaaacaagtatatggctcggatcgatgtttcttatgccccaaaacacccgatatgtttcttcggtgtcactccggttgcacggtacttagctgctatctcctcggccttgatcacttcttcaccgcgccgggccatcaccattgctctcttttcttcagcttccttatggacgattgcttccttgttcttcgccttctcagcgtactctgccttcttcctttccaactcttcctgtgtactcacaggttaattgtagaacagtgtgggtgatacacatttatgttgccaattctcaaacaagcaacatggactacttaaagaaccaatcactcatggattttgagtgtcaccagaaaacagagcaaatttcttccgtgtatcatttttctatgtactatatattgctcgtacttcacacgctgacaagttaatcaggaattcattgcattgcaattaaacatcatatcctttcccaaaataaaacaaaatccaacatcatcacaaaccattttgaaattcttatagatgagatgtgcagagtattcaaatttcaagcaccagaaaacataataaaattatctatctttttttattaaaaaatttatcttttttttcgcgaacgattaaaaaaaattatcttgacaagtgaaaaaacaatgaacttacttccttctttttcagttgagtttttattactgccttctttgtgttctcccatgaaataatatccaataacttcttagaggccctgacacagaaaagaagtgattcggaaggttatgtgctatgtttcctcaataaacacaacatgttgtaatggagccacatatgccctgacagtaagacatggtttcattttggtttacacatcatgttcgcacggagagagattctggccaatacgggcgattaaattttgattatgtacctgttctccgcttttgccttttcgttctcctcccatgctttgatcaacgattctcgcttgtctgtctccacctttgcaagggcaatatctaaaagtattcaggtgttaatttagctagaggccctcaatttgccagtgtgtaaagggaaaaggacagcataagttaatcacctctgtcatttgaggtccttgttggtgttgctgttgctgttgccttctcagcatgaggtttatcagcaacctctggtatgtgaaaaatcatgatcagataggtagaaatcagaagaatgacttaggtcgacctttgcatggcaaacaagctaaaaagctatagcgttcaagaaatcatgcacactagtctaatctccatttcatatgttgtttgaattgaaaaatgaaaagatgtgaatggctgagcattctcaaatagtattactataggtaaaagactgcacgccaaattcgacaaaactgagccagcaaagtactatactcactctcgacgaagacgacgagagccttggagtcatcggccggcggctccgtgtcatcatcggtcttggagatcaccggcgatgtcgaagccgccgggatgacggccttctcctcccccgcgttcgctgcggcgggcgtcgcccccgcctccttcaatgcctccccggccatcttcaccgcgctcacgctacgctactgactcggcgcggctgcttacaatgaaaccaggcaccgtactgcttttggtagctagtatactatacgtttggtcacgacgactcacgggctgctgcgtagtgcgtactgaataccgactgatacgctgaggcctgagctgtgggtctctttatatacagcttctacccggccgggcttctgcctagaagagcctggagtgagtgcgatcggtccatcatcaatacattagattttggatttgaatttgaccgtaaatacgagggatttggagtacaatctttctccatccatccgatcatcgtatttattgctaactggttgtcacatggctaacgtgattttttccaatcaaataaacttttagggacaacaacgtaatttttacttttttacattaaactctgctagaagcctagattaacttagatttattaagccgagcaggttattgtcacatagtattatctacttgattataaaagtaaattaaaaatttgagaaataaactaaacagatagattaaaatacgtgatcttaacaatgcaatggaacgaaatttaagtttagccgtaaaagtcatgttgggatagttcgatgaataatctttttaagagagaaaactgaaaatccattatagttatcgacggagagtgtacttattttagtaagtagtagtaagcagtagtaagcagtaacgtgactggagaaatatgcgggcgcgtacgtgcggcgcacagggtgccgtcctctccagctcgccgccggatcggtcgtgccatccatcctcaaccaagcgtaccgcgcgggcgatgtaccgcggctccgtccgtgtattccttgactacgtgcgttgcctctcagacgtggaaggcaggggagccgcgagttttccgaatgagctattctgctgcaatccgcaagctaatttacgttgtggctacttgtttctagggtgaaaatggactgggacgattggattatgacattcctattatcctatattctaacccatatttttttaaaaaaattcggaaccaggtacggataatgccgaataacatatcactcatctcatatcctatcccatattatttccttcgaatcggatttgggaacatgtctccatttgtatctctaattcatagatattaaatataataaggtactccctccatcccataatattagacatggtaaaagttacacggtctttaaaattaatctttaacttataatttctcatatgctataagagttgtagcaacaaaatctatctattatattattaaaacagccttgaaaggaggcaccacgttcgctgtgggggctagaaattcccacattaatcggaaaaaaaaagaagagtgcaaatagaaatacaatctaaaaataactgaaattcggaattaaaagtaagcaatattgaaagaggagtccatataagaacccaatacgagattaatcaaaattctaaataaaaatgaaataaaatccgaaattatcaaaaaaaagagagaagagttcgagtaggaatacaattttaaacggaattaaaaataaggaatattgaaagaagagtacatacatgaatccaatacgagattaattaaaattcaggataaaaaataaaaaaataaaaatagaaaaatgaaaataaaaagaagagttcaagtaaatacaatttaaaattaattaaaattaggaattaaatataagcaatattgaaataagagtaaatataagaacccaatagtagattaattaaattcggaataaaaaataaaataaaatatgaaattagaaaaagaaaagtaaaatttcaactaggaatataatttataactaactaaaattgttgataaaaataaagactattaaaaaaataccatctaaaacacatgatgagattaattaagtagcaggtctatagaggagcagagtggtggcggttcataggacatctaaaaactattaataaaacgccaaacaaaatcctaatgatgattaaaacgaaggacgacgggcaggtcgtgaatcaatcggtcaaggcggttggcggggcttctagaaagtaaaaaaataatccccaatgataatcatatttgatttttaaaatctcaattacaataaaaataaaaggcagctggcgggtcgtatatgagtacaatggcagagccaccgatggttgtgggtcttctataaagtaaaaaatgaattccaacgatagttatgtttgagttttataatcccaatggcaataaagagtatgtggcggatgggtcgtggaggagtatattggtagcgcttgataggatttctattatgaaaaaaatgaaacccaacaggacaataaactctaaaaactataaggtccaatttttaaaggttcaagcttctaaaaataaaaaaataaaccccaataataatcatgtttgattttaaaatctcaatgacaataaagaagggcggcagcgggcgagccgtagaggagtacagtgacaaagttgctgtagtttcggcggaacttctataaaataaaaaaatgatcctaaacaataattatgatatatttttaaataataatgataataaaaagaagatgtaatggacggtcgtagaggaatataatggcagcgtttgacgggacttctagaaattataaaaaagaagtccaacaggacaataaagtctaaaaagtttttagatctaatttttaaaggttataaggagaatgaaatagaaacagtggtagatcgagttatataataacgaataatatgatagaaataaagggtgctgatgtgatttttaaaaactataaaatttgaaacacgaggataataaggtttggctttgaaacacgaggataataaggtttggcctttcaaaatcttaagacatcgagataactatttaataaattttaagtaaaattatattaaaaaatatataattttatatgggtgctagccacgcaattgcgcgggccacccagctagttataattatatgaaagtaaatttaaatgtcaatctaatgacataatttttaacaaataaaatttatttcatattatattaaatgttggtcaaatgttttaaaggttaaatcttaaaatacgtgtatgccttattatgggatggaaggagtaattaaattattaaaagagatacatcagaaaaaaaacatataatattacgtgtgggcatgtaaaatagtgattaaccaatcttttatcacatttttaggtggacttataataaatttttgtacatattttataatacggaacatacgggtggatacatgtctttccgtatcctaacccgtatttttccaacgaatttggattcgaactcggttagtatcgggtattccttttttctcccatattcctcccgcgagtcttgagttgggtgggcggtcgggaaatacccgccccattttcacccctacttgtttcagccttctgatgatcgatcaggccttttatacgcgtcgtccagtgaaacttttatccgtttatggtgagtatttgcgccctccaagcatctccaccgtttttttttaaaaaaaaagatgcatctccaccctgcgtggctgccgcccagctgccacggcgtcgagtttgaggatttggatcaggtgcagtcacaatagtgactgcaacttaatcagtagcattagcaccattggatgcgaactggacagctcagatcgcgaactgtagcactgtagcacgggtactgttcacatggccactgtagctttacatctaaaccgttgatcagaaaaacggatggctggtgttgtgtgcagtgttaacttgcagttacaactgtaactgcaccggatccgaattccgagtttgagtatagccaatttaattagccacacaaccaatgaggggcagggttttaagttttaactgaattttgtttcgaatgcgaaaaatattacacatcaatatattatattagaaggaagaagttttaagcgagtgatatacttatcgattaaggccatatttgtttcagcttaagattattgtaatctagattattaaatcagattactctaagctgtattataataagctgacataaaataagctatgagttgtttgtttctctggattattagaggcatctaagagtagtggatctttagccactcaataatctgaaaaaagctagcttctctagaggagattattggattatagtaatctggcttatatgttataataatctagcataataatctacttgtttgtttcagcttacagttaataatccagattataataatcctaagctgaataaacaggggctaaaactagacacttgttagttgccgtgtttgttgcagcccatcatttctttcctattccttttccagcgaggtcgtttgcaaatatttagacgaaacaaattaaatatagtgatccaattgctcaaaaacagtggttgttgatacaaatcgcgcgctattaggtctgtactatcgtgcgttagtttttttatattttttctgttgtgtagtactgtatagtctgtatggaactagccctttattcagcttcccctaaactgtacttttttgttggcaaaactttttccgtccttgtatttttttttcagactataaatacaaacttttttgaaagaaaaactgcaaatacaaactatatgcactcccacacttatataactatataggactccctatctcatccttttcccctttcacaaagatgtatgcaatttcgtgctttgacaacaattgtgacttggaagcagttatctaactagcagcttttgattattctatatgcgtgttacattaagcacgtttaattggatcgtcactataatagtataatcaatggaggttggagattctgccagctagtagaattttactccttttttttccagaaaaaaaatgaattctgattctgctgaaaaaaaagagggtgttactcatgtcgaaaccatctgttgccaagtggtggtgatcccattctcatcatctacaagagtacggccctgtttaggggagttttagattctgagaagcagctgtttggtagccagcttctgagaatctagaaaagctctgaaacccagcttctccagcttctgccttcttagttcatttttcagaatatgtaactatagattctcagaagctgtggactgtttggggcagcttctagcagaagcagcttttgagaaaagctgcagctgagagaagctcctccaaacagggcctacaagtccgatgagacatccaaagtcacctcgccatcagcgatgccaatgactgtttggtggcgccaccacctaccgatgcgaaggatcatgagacaaaatacgattcaaactaccaacaaatttgcccttttgtgtgacagacttagagagggtataggtaggctgaactgcaacgatgatgtgagcggctattggatggtggcacaggaggacatatcaaggtgggaaagacaaagccaaagtaaaaaaaaatccacatgctggtagcatgggaaatatgatgtgagcggaacaaacgagtatttccaaaatcaggaaaaatccttgccgcagctgctagacaagatacagaatgaaatcaagctatggaaaatatgtggagcaacaaatatcgtgagatttatcggcctaagatgttttgattgattagtagcttttttctttttttttctctgcctctttttcctctcttttcctctttcactgtttggtgatcttgtaaatactccctctataaaaaacgaatctagaaccggatgtgacacattctaataaaatgaatttggacagagatatatccattgtagtactaggatgtgtcacatctagtactaaattgattttttataggacggagggagtactttcttcttccctacttaatataacacctgctttgctggctttagtttcaccaaaaaaaaaaaagcccaatccacacagctaccacgtagcattttcacctatcctcaaattaaacacgttaaaaaataggtttgtcctaacccgataatccatgtccctccaatcaaacgcatgctttcttactcacattaacacaaggattgttggccaatttgaggaatgccacccctcacggattgaaacgaaagagaaatcagctcggacggctagaaatgttcctttacacgaacatggcatggacggtagtgacacgtccgacgccttctatattaatatagattaaccacataacaaatacacacacaacaaatatgcatatttcctttctttgtatgtccagtatgttctttctttgtttcaaggggagttatatgaacaccagccaccaggtctcactgtggcaacaacaaacttctttggttgtgtttgtatatgctgtaaagttgtaaactacagatgttctaactttcagggattggagcatactcatgcggttcttcaacgcgagcaggagaaacagcagcaaccacgacggaagcaccgaatagcacaacaatcaaagccgtgaagttcaccaaaaatgcctctgcgccatatttgtcgagccctgagctttggaggaaagtgagcttctcaagaaatccgagttctgcggtggccagggctaaaatgtagacgaagagcccaaacagtatatgccaaggaagaacacccttcctcacgcttggcgaagcacgggggaagaagaaagcaacaaacccgaatatccactgcaatagacaggcgcattttacaagaagttgtcaacaatcaagtaaagttatatataaaaaaaactctcaccgggcagatatcaactactacaataaaacttcgcagttcaataaatgtgttgtagatctttcagctctgaaaagcaatccattttttcatgtctttcggtggccaggaaattattggtactaacagctactggtgtctgctaacttattcagattcatgagtttttagttgtgaacagcacaacaggatacagagtaatcatttaaccaaacacattcagaaattgatgcaacatcataattgactaaattgtaaaaaaaaaaaaaaaaaaaaaaaactcttctatgtgcatgctttaccagctattttaccagttggttctgttgtaagttgacggtttcagacaaatcataataattggactaagtcaatggcttatatggaatagaattgctgccatatgcaaggggttacctgaataccatacaaacaaattgttccaatcccaagccaagaatgcagactgtagaggttggcaattccactttcattgtgaaatttgaaagcgcagtatatcccaaccgcaccgaatacaagggcaattgcatggagaattagatggatcagcttagttgtatcatgcttccaagtaggaaggaccttgtataccattatagctgccaaaatggagaaggaatattactaaaacttttccacgaaccacagaaataataataataacaacaaaacaacttaccttcactgcctaggattatatagccaataagcataagaacagggtgaacctgcaatgtctcaacattagagatatgggcaaccgatttgaaacgctaatgtacagtagtatcctgaattactagtagtaaggaatatgcaaatgattagaaactgcagaacagaaaagaaccgaatatacagtttaaattttaaaaggtccatttgccgttaagtccaagtttaacgtcttttaaattgggcatgcaaaattaggtggcgcgtttacagaaatgtgtagcaagttgaaatgcaaaatacgattgctttttaacatctttctgtggaccaattgcatttttaacatgacgtcatgacccgcttcatctgatatgaattcaacatcatgcaatcattattcagccctccattttccccatcagatggacaacatgccaatgtgttgaccaacatggatgcatgagcataagagcatccataattcaatacccaacaaaaaacatgccaatgtgttgaccaacatggattcatgagcataagagcatccataattcaataccaaacaaaaaaccaaataaagaatacaccacatggtgcctagttcaataacctactccatcaagcaatcaaacgatccctgattagatgttcaaactgaacgctcaacactttggctaacttaacacatgcagcaaggcctgcaaacttatgaaagtcaacccaattctcattaagtagtcacaaatccgaacaggttagctaaaaaattgcttaactacatacgtatagcggggaaaaaaagcaatcttaacaacaattcatctgttcattcataaccgataacacaacctcgacaggactaaaatttaagcactatcctaatcaccatggcaaaattaacagcaaaaggtaaagcagatgccatcaacatcctgcttttcttgatcaaacgccaaacggatacgacggccaaagtatttttgcgcttccttccttcctaataaagctacctacccctactggatatgactccaaaattttcttttgggaaacaaaaaaagaaaaaacagcggcacccaaaattgtccatccaatccaatatctcgggacggtatcactagaaagataactagagagacggggggcagacgagaatcaagtactcacgttgaagatgaggttcttgtttgtggcctcgaaggcgaggccgccgcggaagtggatgcaccagaccagcaccatggtggcggccgccacggccagcgcgtgcgccacgtacgtgaacggcgccgccctcacgccgagccccatcgcgccccgtctccttcccctcctcgcttcgccgcggccgcgctgtgccgtgccgctgctaccggcggcgggtctcgggtgagtggagaagagaatgccggagcgtagttgtcccccacccccaacgcctcctataattaatactccctccgggaaaaaaaaaacaaaaaacatttaaccgtccgtcttatataaaaattatataaaaaaattaaaaagataaattacgtataaagtattaatcatgtttattatctaacaataataaaaatactaattataaaaaatttcatataagactaaaatgaacagtcaaacgttgaacacgaaaattcagggtttgtctttttttaagacgaaatgagtactagtaaagggatattttggtcttctttaaaaaatccccgtgttgttttcgtgggtttccgatgaggccggaaggtgccaatgtacaccaatcagttgacgccacggctgtatacctattgatttgtaagattgttgtgtatgaaagcatgataattatatttgaaaatggagattagaggtatgtaaaaatatcatatgccttcgttagagtgaaaaggcagcgaagggaaacggaagaatctggtctgatccgtgaccttcgtgtcttcggctccgtgggatttgggaagaaaggaaccggccgccggcggggcccggcatgacaagcgacggcgcgagagaggttggttggtgggaagtactggaatgttcaggcataacaagagttgggattatgcaccacggcattataatgaactgttaaaaaaagtttatatacacatttctcaacaaagggcatttggtctagtggtatgattctcgctttgggtgcgagaggtcccgagttcaattctcggaatgcccccactttttttttcagaatacaaaatcactttttttttcagaatacaaaatcactttttttttcagaatacaaaatgtgttttcttggacattgacaagttctttttttttagtttataaaatgtgttttcttggacattgacaagtttttttttcggtttacaaaatgtgttttcttggacattgacgaggttttcaaaatatacttgtggctacttatttgtattgtaaaatattatgtcaaaatttatatttatactttaaagcatctgcaaaaccgggcaaacataagatagtacgaaaaatgttttttttcaattcaaatgtccacatgatactttcacaaggttacagaatgtgttttcttggacattgacaaggttttcaaaatatatactgacttatattgtaaaatattacatcaaaatttatattgtatttttaaagtatatgcaaaaccgggcaacacataacattgtataatcatgtgatgattaatcttggtgatgaacaattgtcaaaggtgagtgttttaaaaaaaatacagcgaatagtgttttctgttggtgaacagtgcgttggtactatgtggccgaactaactagagggattcaggcggcctgactgggtgacccgatggttagactagaatactttgggttggagtcggttttaagttgttttcatgatttttttagattgcttcatatttataacttctagattgtttctattagtatgtgatactatcgtgtgctgatgtgagttaagttggtgcgaattgtactcaaatacaatttttttattcatgtgcaggtgttgttggagaccataggagtatagccggtgatggatcgggactaggcctgggagaaattaaggtctagacggcaaatgatatcacgtggaatgctcaggctagagaataatgcacctggaggtaaaggtttctatatgatatatacgtggtgttgtgtatgtatgaaaaatgagtcaaatttggattggagttcaagtttgaaaaaattagagtgtggagttgtatgggaatgttgtttttcaggtttcgtaagcttcctatgtgattaggagtcctagttctagttggattcgtggctaggggcagccacgttgtgagtataaatagatgaggaattgagaccggaagatatcaacttttttttttttaaaaaaagaaaagttagggtttgctttgaggtttcgattctagttcgtgagttaagatatgagtgctttagatgcactttataaacatatattagtgtaataaagttgatatattttcaagagttttgtactttcgtcgatacatgtttttttgcataccgacggtttgatcaaagttcattgggtggtctaataagcagcatggcaacgtcaaaccggcatcaatctagctgtgtgattggtgtaatttcattaagtttaactataacttttatttccactaaaagtttagattttcggtgttcgtaccattcatctctctagtaggtttggtttatgtattcgatcctatcaagatagtacagaaaatgtttttttctatacatatgtccacatggtttttgttatgtgtaccatagttaatattccctccatcctaaaatataagaatctaggactaaatggaacatttcctagtactacaaaactagataggcatcttatcatccggtcctaagttattatattttagaacggagggagtaggatagtaacgatgtttaaggttttaaatggttaactctaactccctccgtttaaaaaaaaaacccaattctagatttgaatttggacacacccaggattggatttttttgacggaggaaataagtcctcagacatgttcaaaacaacatgctttcgtgcttccgtgaccggtatgagtacaacagttatttgcagatagtggcaatgattccctaattttcaacaccaacaatatacgtgcttcttaaactgctaaataatatgttttgttaaaaaaaatatagaaaatttgttttaaaaattacattaacattttattcaaatttaaaataattaatatttaattaatcgtgcgcaaatggctcatctcgttttttcatattctcagctgatattaccagcgtctcccctctccagctctccttaaaagagcctctgtctcctaaaggcctaactagaatttgcttgaataatttgctactgcagcccagcacaagcgacgccatacatgcgcgacaaaagatcccaagcgggcctgctgtgctgtgtacagaagcggtctataaacctactgagccatcagagtttgaatgccctcccggctggcccttctccggttgaccgtgtgccgcgccacctggatgcgccgccgccgacggctgccgcccgctactcggccccgctggtgctgtcgcgtcagacccatcgccgcgcacccccaccaccccgccaacatcagcgccaggcgccactccctggccatgcccgggctcccctgccgtctccggagcagcggcgccactcgcgccgggccgacgagagggaaaccgcccgccgcgtcctcggaacgtcccgccgccgccgccgccgcgtactactgcccgcttcgcgatattgcggatcgggccaaccgcggacgagcgcgatgcctggaacccatgctgcgggtgcgggccttcgtgccacgggtgtccgcgcggcggcggccactggcgttgttggtagccctgaaatggcgcgtgcggcggaggaggcgggtggcggccctgcagcagcgcgtccgggggcagctcgccgatgttcacgaggtactccgcggcgaggcggccggctcgcagcagcacctcgtccctctgctgcggcgtcatgacgacgtgcggcggcgcggccgctgccgggtggtggtggttccgtggggcgttgggtccggtactccctcggcggaagcccgcgccgtggttgttgctgtagcgaccgaacggtgccgcgttgttgccacgggggttttggcctccgggcttcattgcctcgacgatggcgaccgagatgggtttacgcagacaagaagaacgacagcgcggcacgatcgaactcgggaattgatcgcggggcgctggtgattgataaaggcgctggtgattgatcgagtccgtgttagatacggggcctcggagtccatcttagagaatgtatcggacaccaattctgagcctcccatgtatgaaatcgttgctagtatatttgaggaattcaaaattggaataagttcactttgtgaccctcaaaagcgatcgaaatctaatctgtgaccctaaaccacaaaccggatatcttgacccccccccaactcttaaaaccggtgcaatttgactccctcggcggtttctcctacgtggcggttttcaccgggtctcctttacatgtggcgttgacatagcgcttaggtggcattaaaaataaaaatatgtgtgtgagacccatttgtcattcaccaaaaatatgggtgggacccacataaatcatcctccccctctctctctttctcttcccttcggcgagccgcgagcgtgtgacgacggcggcggcgggcaggagccggcagcgacgggcgagagccgccggcggcggcggctgtgggccagagcggcggcggcagaccgaagatggacggagagcgacagaggtaggctcggcccattccaccccggcgacgaggtcccgacgatttctcttcccattcggttggcggtggcggtggcggcaggcccagctcccgcccgtcgccgtcgatggccgccgcatctaccgctctcgccggccctcggccgcccgcccgccgatggttgtcgtcccgtccccactgcccgtcgatggccgccgcatctaccgccctcgccgtccccgccgtcgctccagctcccgcccggcgcccgacccatggtgccatcgtcagctccctccgtcattcacggcgccgccgagaggacagagcctatcctcacctccaccggcacagcgccctcactaggggacaagctccctcacggcgccgccgctattcctgaccgccggccgccgccgccactactcacgaccaccggacgccgccgccgctactcccgaccgccggatgccgccgccgctactcccgaccgccggacgccgccgccatccccactgccactccggtggtgaagagaggcggggggagagaatgagagaagggagagagggaggaggaagaaggggaggagagaggacgacatgtgggccccacatgtcatcctctgtgtgaatgataaatgaattatttttttatttttaatgccacctaagcgccacgtcaacgccacgtgtaaaggagacccggtcaaaaccgccacgtcagcaaaatcaccctccaaaaccgccgagggagtcaaagtgtaccggttttaagagttggaggggggggagggggggagtcaagataaccggttttatggtttagggtcacggattagatttcgatcacttttgagggtcacgaagtgaacttattccttcaaaatttccccttcttccataacgactgaagttccttactgggcctctagcttttgaagccattcttttcaaatctcacggtagacagggaagccctctttttctggcgtaaaatggccttgccccgtaatacaaatgatgcaccatatgtttattataggagctttgccactgatcggaaacgatttggtacattatactggaccagagcaaatctcttattatggttgcctcggatgtcctgtaaagagaagtccacacccgcaaaaaatcatcgacatgcgggctacagcctacagtacatggaataagtatgcacatccgtgtaaaatatgggttgacatttcacagataaatggagtgcactgcaccccagaaataccctttttatcgtaagctttttctttgtttgaacgaaaggacacaagctatgcctattgcaccaaagagtaataaagaggataaaatagaagtttacaagcagaagggaagaaggaagcaacacaaaaacgaaaaactcatgcaaactacgctagaaaatatcctccaggcaatgtcttgtgactaaaggcactggtctcgaaaagttagcctattcaatataccatttaacctataccgccagtgcttttgaatgcatgagcggcttttaggtgtaaatcacttctttacgtaagttaagagtttagacatatcttcatggaatatctttacaaaataaaacaccagcaacttaaatttgaggatacagggacagggagcttatctgacctgacatgaaaatctacgtactttcctctcgaaatctatttgaggatagggcacagggagcttatctgacctgacatgataatctacgtaccttcctctcggaatcttttccggaagccacacccaacaccagggctgttctggtttcgccagaccagcttgctctgtttttccttcccatatgtaacaaatgaaagtttctgcacaaaattattcaggttttatcttcattgcatctcaaacactagaaaattcacaatatcagaaaatgtttcagcacgtacctgtcttgctctcttgtcaataggagtccatgttggatcaatggacggttctatcctctttttgtgacttgttggttgtacattgaaatctttccttgctctgcgattctgtgctttagctccttccttgcctttcccataatgctgagtcccaattgaagggctctggtccctcgaaggagtgtctctatctcctcggtatctgaaggattctttaggtggaggatttagaatctttgagttgctatctctcattcttgggatcgacatacctggtgaattactacatctagatctctcctgacgtgcttttctctttgcactcatttgccttagataatcaatttcccagcatgacccctgtgaagttgcatggctaccaaaatctagtttctgaaaagcaagcgaacttgctggatgttgcataatttcatctcttggttcatgatatctgttgtccatatcatatctgtaagagtcgtctacagtacctccatgtgcaagccccttccatgtttgttttgtacctcctgaaatgttccactcaccaggatcatcgttgatctcaaatgcagttgaaaatactggattgctatgagttctgctgcaagatggtctgcttgtgtgaaaagtgcttttgcttggatgcgtaccaccaaattcaggttgccagggtaagtcgaatgtgtccaccatattgccagtccttctgttatatgcttgattatttggtgtcaatccattgctgaaatcatcattaatgacttgattaccaggtattgcatccacatcatgcttcttttgttgataagagaatccctcacttctcatattcaaactttcgtcgaatgtaaagacatctgggagctcgggaattgtattatccatgtcagagaacttcctcaacttagaaggtgagaatacctcagcatgttctgcatagtcaccaggtatttggtttagagaatcagaaaagaggagcttattagttggtactgcacaagcctgcaatgaacgctgtttccttttcctcggagactgcaggaatgcactactgatatctgaatcgactgaagagcattcagtcattacagaccttgattcacctaactcaccaaatttgcacaaagcattaaatagggaaatgatctttggagacaaaagatactttccaactgcttgaatacggcgctcatgtggccaactgaggaactccacaaggctgcctccagaagaaagtaacatatatgcagacacgggattgatggaagggaaacttgtgagaaatgattcagccaggctttctgattcaggtatatctggaagaggagctttataacagctagtcacatttgtaatgcaattgagaattatttcatctgttgacctgggtgtgtgtgagaagaacagctgcaagttcatgtccaaactagcagctgcagtatacaatgaatcagatgagtccattacagcagaaaggaagtcagcttctccctcaaagacctgcaaaagtacaaggaaactgttctcttatgatagatcaagaattatcacattcacaccaaaccaaaacagacaggtgcatttgcatcaataacatagcaatggcctgtgatgctaactatatacgaaaaagtaaatacttctagagggatacaaaattaattaccatgatgcagccagtgaaagagaaactaactgacatcagaatgttggtcgcaatattctctacattttcttttataccagatgtctctgctgatgttgttagttcattggcctcaaagagcgcagtctcataccatactaggcagacagcagcactgagtatcagatccacaggcagatcaatatctcgctccacgacctgcattcctcctttctccagagctagtatctgctgataagatgatcttcgcgaaacaagcatcgtctttccatgatttccagtatttacaactatcactacatctgggacggacagtcttcctggcatgatgcagtcatttttcacacaggaaggtaagtcagtagtggactgattctcttgagggtctttcagcacattggcagatacagaagaagtagagctactcttctcaactgtgggtacacattgtgaattgacaacaggtttattactcagtgtttgctgtatatgtagctgttcatcagcaagcacaacgttatgtgaatcaaaagtattcttcttgttaagattttgtaatctgtgtggttgatcatctggaagcagttcttttgtagcatcagcagcaaaatgtttgctccgtttttcttgaagaccttgcagttgatttgttgctggtatgaagtttaacgaatcaacaatacgcattttattcatcctctcctgcaaatccttctgaagtgtaagcaaaactttatcctgcaaatagtgaagcattcttaggaagttaggatgttccatgttgatcatttgctacaaacacctactgccctattactaagtgtaggccctcaaaaacaaatatgtggggaaaaaactcatttgtatggttttccctctaacaagatcatgcaggaaactcatgctcaattgaagtactcaactacaatggatagaagttatgattacagagctgagactaagtgtttcatattacaatgagctgtgtgtacaagatataaaaattttcatgtagtgcccccctccccaacacatacaaaggctggcttaataataaacaacatgattggcatatgacaacagaataaatggcagcatggagtgagtgataatcaccaatgtagatttcaaatcctggtctttatggttgtcctcgactagagcagctggaaagtccttgccatcaactttgacatagaggaaatgcagaggtggcaaaccatctaatttaggagcgagagataacaaggtagatgatttattcgggcctccatattccagtatgatgccaaacttgtcaaaagggaatgaagctggaatgttccttcaaaatgatgacaagaatggatatggcataatatttaatatcagacaagcaaaaactaaactgtgcatagaaacaatttttttgacaaaaagagccaatgaacttctggtacatttaagttattgtaaaaaagaccccaaaaatatgtctaaactctaaccacagttgatcaacaatatgaacaaccagtgcaagatgactcagtggctcacaaggcaattgatccttcttaaagggcaagctacttctaaaaacatgatcgtcttgtaatatgtccatgactccatgcactaagaaatgaaagttgtggcaaacatggagggactgttaatgtaacacattcatttagctcaccagaatgaattcaataaatcctgcactaattcttgtacagtagaaaaaggtacagcaaataactagctaacccccaagaaccagcctatctgcttgttgaagttgatttgtaataagaaaatgaaaagcaaggaattggaaagaaaattggcttggtttatttatcaaatggacttacttgttatctagcagaatgcaatctgatttcagtaattcttccagcacccaagctgtagagtttgtcttgttcaccagatccacaaaagttgttgcagggttttgtccaaactcaacaaatgtcatcctcatggatgctagcttttgacccagtggcagccagaaagctctatcagcaactataaggatcttttggtcgatttgtttattagatctcaggatagtctcaatgcatgacaatgacggatgagattcaaacagttgcctctcagatttcctctgtgcttcagaaatggaccatagaatatgttttaacctctcaggagtgttttccaagcttctagtcaggttgctaatgtacaaatgggccgcatgcagaccaaagaaacataagtaatatgcaacctgctttaatgcatacagtacaatgagttccatcttatctttgtgttcgcagtgattgtacgagccttctgaaccttctcccgttatcagttcaagaagtttctgctttgagattcctaaaccttgctcatctgagaaagaatgcctccaatatgtgctttcttgcagagcagatgtatagcttgcatggatttgttctataaggccttgaataagatttgaggggctgacaggatgaatttctatgagtttgtcaaccttagccctggttgaaagagataatgcttgctcttctgaatgcgggacatctaaagtagaagtattctcattattggttccactcttagtggcacttctgacgtttaagtaaaaatttaggtcaccagaatgtgatattaactcagggaaggaagatgacttttctggactcggtcttttcatggaactatggtttctagtaccaccttcttgttcgcatttttgagttgcttccaatttttgtggatcatgagacagtggggcaggaacataaatatcgctatgtttatcctcatcttgaagctttggacttctctgaaaatcctccagaaaatcgctaacaaatactgatgtactctgacaactcctttgcagctcagaacttaaatggcaagtttttgcctcctcaaccatgcttgcataagaacaacaaatctcccggttgcatggtccttccagtaagagatgccaatccaaataaattccatcagatgctgatagagggtgtggttttagggagcatagtatttcttgaatgggagggaccctagacctaactgctatatcatcatttaaaataggtgtaggcaatgacctaaatgtatcatcaaccagtgctaactcgcagctaaccattgattcatacaaacgtcttgctggatcaaaatcatctttgaatatttcatcagatatattcatcttatttgtctctgactgaacaagcattttgaatacattatctgaaggaaaatcaatgatctgtacctcctctaaaagaatggagcaaggcaagtctgaacaggtgccatcaggcttgagagggtagagtgctgaatttttctcaagcagaatattgccattgatcctcacaacatccatttctactgcagctttgatttctgctggtttatctacttgaatgtcatggcatggtgcatcttcacaaacaaaggtcagcatgtccatgtcagttgatctcaagaactcggttgatttaaacactgaatgctgaatctgtgcttcatccaagtgtctaacaacattatcaaaaacaccgtatctgtcagtctcagtcagacaatcgtcgagctcccaagaattcctacttacttccaatcgaggtattactgcaccatgatctagtgctgcaatctccaagcagcagtcttctctcagagaagaatggccattgccatcattgtcttttacagggaccttttctacttgatacactgactctggaagatcagattgatatcttatttttatgtcggtctcaatatcaatgaaatcctgtgagaaacagagacgagaacgtgagcatgatgtatcaaagaatatgtttgagttaataaaacacaagggaatcaaatcaacatgttcaccagcaggcataagcaacttcaactgatttatgtttttgcaactttgatggtatgatagtgatagttacataatacagaaatatgacagggaggatacaaatattactagtgaatccacaattaacacaaaaggtaggagataaccgcttatcatgttattgtgtagaagtatatattttgggtgatgcgcgcattacaatcgaaatacaacatggtataagaacggaagtatcataaccatttaactctaagtacaacatgttcatatgtctcccatagctgaactgcagctccatgcgcattattgatcttttgggagtatagaggagcgaattatttgatattgtgatgagatgatgtagttaccaaatggattttcatatctggaacacgaagcaacaacgtgacaccaccaccagactcctcttcaccaaaggatgcaatgtcttcttgcaaagccttagacaccagaacaatcgagtttgaatttgaaaaggaaacaacataataatatcaaccaatatcactgaaacgctgctcaccattaggagatccacctctacaacctcaaatctaagctccttcaattgttcccacctctagcaccacataatgcataaatcgaacatcaattccctaagaacagtcaaagcatgtacaaggctagcaaactaactactatgtcaccttcataactgaggagatctccagaccgtctgatctagagccctcccccttttcatccttctcgcggttgatcacgccatacccctatagaaaaacaaaaaagtgttcgcaaatgctccataggaaattcagcctacagaatccaaacataaaaacttcacttgccttagggattctgaatgcaccaaactcccatgagctgaaatcctcgccgtatccgcctctgtcgtacaggaagtcgtccaatacctgcgtgaagcagaatctagcagatgagctgttgcaactcacagatgccacacgattttctcacatagaaatatcaatcaaccaaaaacagcacagagcaagcaacagcaaccccgagccacccccaaccaagccccgcacgactcgagaacgcgaaacccgaattcgcaggtggctcgctcacctcgtcggccgcgggcacagtcggcacaggcagggcctgcgggataaccgcggcgaggaaatcggagagcgcggaggcgatggggagagggccgagaccatcgtcggcgaccgtggcggctgggagttcgtcggcggaggtgaacgggaggaagtggggatcgggaggaagggcggggacggggagagaggggaagctgaagaactctagggctagcgctttgccggcggcggaggaggaggacggcgcgaagtagtcggtggcgaggaagcgggtcctcatggcgaatggcgcggcggagaacgaagcgaggggagcaggaggttgaagacgaattttttggttttcaaaatgttttgatacgccaacttttgatcttggcttgcggaatgcggagttgcggtgggtttccgctgcattgccttgtgtgttctactaaaaaaaaatgtgtgctcttaattagccgtttctaaagtgtaggaatccgtttcagaaactgggcctaggattaatgggccggggtggtggtgccattatggtcgacgtgaacactcgtgtttcgtccgggaaaaagtccactgtgacttcctcaaaatatatatagctccaatctaatttatattcttaaaccgcaataccggatatcttgattctctcaattattaaaaccattataatttgaatatctcaatggttttggaggatggttttactgatttggcactttgacttggtataacctgttaaatcatcttgtgagaccctcctgttaatgaccctttttatttcttgttttccttccctttcacctctcacctgttaggagggcaggcagcgatgccctcctccctcccccacccaaccctagacatgtcagtggccaaaaccggcaagtcctcgttgcggtggtcgagggggattgaagggttgaagtgaggagggaaagggacggaagacaacaaaaaaaaagttacataggatgactcaatagtttggaccaagtcaaaaacgccaagtcagcgaaaccgtcctctaaaaccgttaagggagtcaaattacacagttttagtagttgagatagtcaagatatccgatattgcggtacatggatatgaattagattgaagctatatttgaggccatcaaagtggacttgttcctcgtcccgaaagcgagtcgtgagcgtgatcgccaacacggcccatttcaaggcgacgtggtgcggctcttcaacatttgggatggcgtcttcgaccatctccacagcacaatggtagtactacctcttctgttccaaaatataacaacatatctttatcaaaatataataaattttaagtgaacacatgacactaggatgtgtctcattcgttaaagggctgctatattttaaaatggatgtagtagctcataatttgatctgtgcattctttttttttgtacaaatacaaattttgatttgatttgttcattcatcttgttagtattaatttggtttgatcatggacaccaagtcatcaaagcctctgtttagcaatggccgggccgccggggctcacgtgctcgttggatcgatccgaagattcctcgtcaaaatttacaatactactactactccgtgtcagagtcaaaagactcaaaacgcctcctcgtatcgtggattcgtggtacaggggctccccttcctctcagtgcgcccgcggcctccgggtggcctccagaatccatatcaggtgcgtctcccactcgcagctccaacaaactccccgcatgtcgagcatttccctctccatcgatccagtatccccagttcccaactactagtttctttcagttgcagcgcgcgatctcgtcactctggtgaccatctgacaagttctcggcacgtcgcggccgggtggatttcgcatgcgcgcctgacgaattcttctcgtgaagcagggcatcgatcgccgggggcgatcagatcacccggtgaggtcgagctccgatcgctcgagtggcgttgccggccagcctggagtcgccggtgaacggcggcagcagagaaccttcagcgtaaaaaggtttgtccttctcgtacaacccgctcgattcttcgtgttcggttccagcgtcgtcggatgggttaaaccacactgaaaactcctgtgccgttgaaggggacacaggacttaaatccagtacggttatcagcatgcccacgtccacgtagtgacgtgaaacaaaaaccaacacaaactcgttcgcacacgtggacgcgccctcctgagcgatcggcgcgagcgtttttaacgctctccagcgatcgactgccgtgcagcactccctcccgcatccagtgctgtgctcaccgtgttgtttcgtctcaggagcagaaggccaattcaaccagccaaccagaggctgatctcgccgaggaagcggcggcgaacaacgctcggaccgcgtcaacgatcgagaaggcagaggagggggagggaggtgcgggcgggcggcgggtgggaggggcggcgatggcttcggcagccgccgtcttcccggacggccggcggtggtgcaagggcgggagctcgtcgtcgtcgccggtgaccaccgccatcttcctcttcttcttcgtcgtcgtggttggcgtcctcgtgtccgcccgttggatcaccaccaccgtgagttcggagttttctttgttttttcttcgttttcgaaatttcagtcgagcattcatggcgatggcgattcatcaatgtttatctgacactagttattttattggcatgagcgcagagtcatctgtcgatcaccaatctggatgagtggcgcacaaagacggtaggtaagctccatccttttgttcgatcgaaaattgtgaaacttaggtagtgtttggttgcaaggatgggatgggatgggatgggacgaacccacttttaggggtgtttggtttaggggtgggtgggatgggttggtccctggagaggaatattcctctcagatccgggaccaaccgatccgccaaaaactggcggacaaactcgtcccacctgggacgagcgacggcgtcaccgcgccatccaccaccttcgcgagctccgtcgggcgcccacgagcgtcgccgcctcgtccacacccgccgccacctccgcacgtccttctccgccgccgccgcctccttgagcgccgccgcctctgcctcgtccgcgaccgccgccgcctccatgagcgccgccgcttgcccgcgaccaccacctccgcgcgtccacgagcgccgcctcgcctccacggccgccgccgccacctccacgagtgccgccgctcatccgcgaccgccacctccgctagcaccgccgccgctccactcagatccagccgccgcctcgcctccgcgcccggcgcctcctccgcttcgtccatgactgccgccacctccacgagcaccgtgaccgccatctccacaaactccgccacctctgcctcgtctacgaccgccgccgccaccttcgcaagcgccgccgccggtcctctataggtaaaaaatccttagaaaaatgaatcctccaaaattcttttgctaatcctccatttcaaaggtgccctaagttgctaggatcctctaccctctgacaagatcaaagactcgccatctacagcg

SEQ ID NO: 8408 - DNA, 6427 bp, Oryza sativa
attcctgcagcccttctaggccatgacatacaatttgctgtgtgtttgtgtgcgcgctttcaagcttctactcgtgcttcacatcgtcaagcggtcaagcgaataatgaggtatttgaatcatacacttgagtttgtaatttggtattctacttcatcttctatatgcttaagtggatattcagatgctgattttggaggttgtagaattgataggaaaagtactagtggaacatgtcattttcttggtacatcattgattgcatggtcttctaggaaacaatctagtgttgctcaatcaactgctgaatctgaatatgttgctgctgctagttgttgttcacagattctttggcttttatctactttgaaagattatggtcttacttttgaaaaagtacctctcttttgtgataatactagtgctatcaatattgctaagaatcctgttcaacactcacgcacaaagcacattgatattcgttttcactttttgagggatcatgttgagaaaggagatgttgagttgcagtttttggacaccaagttgcaaattgctgatattttcactaaacctttggattctaatctctttgcttttcttcgtggtgaattgggcataattcatccttttggcatggtttgagggggagtttgcacctcatggttttatcaagcaataatatgacaatgaaaaaaattgagaaaagagagctttgtttatgtatatggtattttcttgtgcatgctagcaatactttgaaggtttatttgtctctagcatagcttgtatgtattctagtcttttcatgagatttagattttgcttttaagggagatgatgcatgacacttaaattctatacttgaattaagaaaatatgcaatgttgatgctagcatatggtttgatttataaatgctctatatatatgctttattgacttgttattcctcaaatacctttaattgctcattgtgaaaaagagaataaaaaatataaaaaaatgaataccgaattcttgaaaatagtcttgacgacaaggacgtattcgatgtgagcaaaataatgggtgccgaatccctggaaacagtcttgacgatagggacgtacccggaataaaagagaaaaatatgagcaaaaaggctcaagataagaaaaagtacaaaaaattctcttggttattttgtgctaaaggttatttgagaaagagtgataaatgcaataggtctatgtgtttagtgtttattcttcaacctatgtgcttgttaagatgttgcattataaatcgtatgaaatcatgaattttgattcttgattcaagcttcattgtaaaatctttggttcatggttatactttaatgcatgcttgttttgttatagatgggtttattttctttttattgcaacgcatgacttgatatgctatatgtatgctcagctcttgaacattaatgaacataattcctatgcttgatgaaatcattgtcaaaagggggagaagtaatgtgaaaatttttggatttttggagaagcaaggtgaatttttgaagagttgttgaaaagagcatgttgttggttcaattgggaatttctttcttttaaaaagggggagaagttttcttttggattttgaccacgatgtgtacatttgttttcttttggatttttgagcatgatgtgtacatttgtacgaagtgtgctttttaccaccaaataccaaaagatttttatggatttgccaatgtgtccatcaaggggagattgtaaaatcaaaggtgtttttgattattattctgtgatgaacgattgggcattggagattattggttttgttatttgaaatttattcacgaagtggttttggagatgattggatttcacaggtgaatttacaggatactgctgtgattttatgtggacatgttataccgggctctggtagccggtcagaccggcgtgtaatgcgcggtcagaccggcgcagcccacggtctgaccggccgacactgtgtcaatttcggtttcgggttgtttatttggatatccgagtttattccatgattatgacttctagatggatactatacatatgtaataatattgtttgctgctaatgagtcaagttggagatagcttggtctcggaatatggtttctttgtttgttccatgtgtaggtgactcgatgtctcgggagagtatttgcggtgatggaccgggagtcggcttggggataagacgacgtccgtggtggtcagagatcatgcggaatacttaggctagagttgatgcacgtggtaaatggagattccatatggcatacgatggaggaattgtgtgcgtatgggatgcggagtcgaatttggaaggagtccaaatttggtacgtttgattatctaaagtttctttcttgtactagtgggcttcctaaggtgtttaggactcctagtatgagtttagttcgtggctttaggctgcctacctcatgtataaatagagggggagcgtgaggcttcccggtatcgctatagagagcaattgagttgagttttgagttagggtttcgagtttagttgaaatttttgtaaggagtgctgttggtgcactttgtaaacacagagagaagaaataaagtcgtcatccactttaagagttctttgatttgtgtttcaccaggtttcggcggtctaaccggcggcgcaccggcggtcagaccggcggcatcgcggcggtcagaccggtgggcacacggcggtcagaccggcggctacaggagttggcaacaggcgttttcggcggttcgactgatcgatctacatcggtcagaccgacgttcatcaggtggtcagaccggcacaactactacggtcagactgcgatccatcgatttcgagggtaacttttatttccgctaaaagtttttggtttttgggtataccaaccattcaccccccctctgattggcttagttcttgtgattcgatcctaaaagtggtaaggccctttacgatcctacaattggtatcagagccaggctaggttaacatctctggcccgatggacacgtgtgaaggcctgatggacagtgggtgcctgcggggcccgtatacctgatggaccgtgggtcggtgggggcccggatcatattaatggtcgctgttcaagttttctcttatcattataaagaaactcgatcctgatcaaatccatggaaagcatggatgtagatatttaataccaaatgatccatctaattttgggcctatctgggcgttgtattcgaccattaatattttcattgatattgcatctctcttaagacatcaatcagtgagagaataactaagtgcttattattgttcagacaaatccttgttattgaatctatgcatatcgttatctattaaactactaaatgatcttccctgttgtgatttccaaacctgtgtgcagtctactggtttcgatcattatttgccgtgattattctatttctctcttgggacgttggtttaaattaaggaactcaaccctgagccgttccgtggaaaagtttgcatatgcaaggtattaaattactaagtgatctttctaattttgaatcaatgtgcaacctactgttttcgattattacttgtcaatgatattgattttattcacaaacctgcctttgttttctatcattatttgtcattcagtcattgacattcagtttttattttaagacgtcaatgagagaggaacttaatcctgatctatcccatgagtagtttaggtgattgggactcaaaacattatgggagggtccacacccacatgcctagcctatttgaacgcaggacaacttttagatctacacgacacagaaagtcttgacatacagaggctcttctctagctttgatgtcttacactagaaatggttccatgccaactgcaattagcaaccactgtacatacttcttctgattgaaggaatgccataaactccatggagatcattggcatcaagtgctgtggtgttgtcctgactcccttgataagcctcgcaaaacagcatgctgcctatttcttcaaagcccagaagttcgtgcgtgctctcaaaactgccaccgagcgtttaagggagagggttagcgatgttgagaccaaggtggagggtgctgcacgaaaaggtatgcagccaaggcatgaagttgaacgatggctgaagcgtgctgagcatgtatgtgtggagactgagacaatccaagcaaagtatgataagaggaccaagtgcatggggagtctgtccccttgtatctgtgtaaactacatgatagccaagagtgcagcagcaaattgtcaggctgtagagaagatatacagtgagggcatatttgaagaatatggtgtcatggtgccacaggcctgcactgaagtgcccataactgacataagcctaactggtacagatcggtatcgcaacctcgctgtcaagttcatcaaggatgaggctgtaagcaaggttgggttgtggggccctggaggtgtgggaaagacacatctgctctatcagatcaataacttgtttcacaaaaaccctgcttttgatgttgttattcgagttactgcttccaaaggttgctctgttgcaaaggtatgttgtgctccctttaacgagggagtgatcaaagtttgtatttaactaattagatgaaactaatcgttgtcccttgatgtacatgtttctgtatcttgctaaagtatatttgttgcaaagatgaatgcatccagcttgcccaaaagacaaaaattacaaaccatctagggtaagcggcctaatgagcaattcacagagactaaaagctccagctaaaattatagtttgttttataggagctacgatttctaggatactatattgactgtcatcaggtactactatcatgtaatatactccctccggatggaaatatttgttgtttcggaccagcgaaatgacttacacataacatattttggctgtcggaaacagcatataaaactgatcggagggagtaataactagcgttacataagggttcctggcagccaactaacattttgatatttcaaaaaactgcatatacttctaattttaaatactttacaacattatttagttaagctctctgccagtttgctccaaatgacaaaagtacttttttacttgttgcccttgaaggttcaagactcaattgttggggaacagatgctgcagaagaagaatgacacagaatctcaggcagttatcatatatgaatttctcaaaagtaaaaattttcttatattattggatgatttgtgggaacatgttgatcttgataaggttgggattccaaacaaagttagctcaattggcaattacaaacaaaaattgttgctaacaacacgctctgaaagtgtttgtggccaaatgggtgtcaagaatgggcaaaggattaaagtagattgcctggatgaaacagatgcatggcatcttttcaaggaaaatgttggtactgaaattattaaaaatcacccccttgtacttccactggcaaaagaggttgcaaatgaacttgccggactgccgttagctcttattgtagttggcagggccatgtctaccaagaggcatccacgagaatggcagaattgcatcgactttcttcagcaatcacggcttaatgagattgaagggccagtttgcaacgaagaaagtgtgtttgctcgactgaaactcagttatgaatatctaagtgatactaatctgaaagattgtttcacatcatgcgccttatggcctgatgattatctgttagatagaaacaaactatctgagtactggatgggactgggtctagtagaggaggaggatattcaaagatgttacaaggcaggatatgcacgaattcgtgagttggtagacaagtgccttctggaggaaactgatgatgacagactagttaaaatgcatgatgtgatacgtgacatggcactatggattgtaagcaacgaaggaagggacaagaataagtgggttgtacaaacagtatctcactggcatgctgcagaacaaatattatcagtggggactgaaatagcagagctgcctgctatttctggggagcagaccaagcttaccgtgctgatacttcaggataatcatttaagtcaaagttcagtaactggcttgtgttcttttatctcccttcaataccttgatctttcacggaactggctcaaaacatttcctactgaagtttgcaaccttatgaacttgtactatctgaatttatcggataacaaaatcaagtacttacctgaagagctcggatccctttttaagctggagtacttgcttcttaggtcaaatcctatcagagaaatgcctgaaactattctttcaaagctctccagactgcag

SEQ ID NO: 8409 - DNA, 7059 bp, Oryza sativa
agaaattctttttaaacccggttagggttaagaaccgggactaaagattatagcactgcatatgattttcgcttacatatgtgtttataaaatagaagttaatgcattaacattatttaaagtactaaagattaatgacaattacttcgaaaaattatttttgtctgtaataaattaagtggataaatcgtaataagcaaatatatgacttataattaataaaaattccaatatatatatatatacttagcatatatatgaatgatattattatattggtaaaaactctaattaagatatgtatgtacatactgcatgatttaaaattaataaaaattgtaatcatcatatatacttagcgtaggaattatattaaattaaatgctaaaaactctaattaacatatgtaaatgccacatgcatgatttaaaccttttaaaaattcgaatagtcatatataagtagcatatgaaagatagtaaattaaattgtgaaaaactctaatatatgaatgatagttttaaaaatatattaaatttaatacttttaaaaattctccagtcaattataattagcatatgaatgatagtaaattaaatgttaaaaactctaattaacatataaaattgccacttgcgtgatttaaaacttttaaaaatacaatagtcaattataattagcatatgaatgctagtaaattaaatgttaaaaactctaattaacgtacatatgaaattgccacctgtgtgatttaaaacttttaaaaattgtaagtatcacatataactagcatatacatgatttgaacttgttgaaacctctaataatcgtgcgtaattaacatatgccatacatcaattgatttatatggataatcaatacatccaaaatagtttacatcgtgtacacaataattacggcattacatcggcggtgacggttgaccgcacgtactttctcctcactattgttccctccttgtgatcgctgcgtgagtaaggggtgtcttcatttgataggaggatgctagggtcaatcgtcaccgtgaaagggggttgcccatccaactgatcgtaatcctcgtcagtcttgtcctcaactccgacgatttttcttttgcctgggagaaccacttgacgcttaggctcatcaggccctctgcccttctttcctttgctagacatgtccttcacgaaaaagacttgcgttacatcattggcaaggacaaaaggttcgtccgagtatccaaccttgttaaggtcaacagttgtcatcccactgtcatcaatcattacgcctccaccagtcaacctaacccattggcaccggaacagaggaaccttgagaggaccatagtcaagttcccatatgtcctcgatggcaccgtaatacgtggcagttgttccatcgtgtcccatggcatcgacacgaacagcgctgttttggttcgtgctcttcatgtcttgggctctcgtgtagaatgtgtacccattgatctcatatccctggaatgtcgcgatcgacccagacggtcccctcgccaggaaggcaagttgttggttgatcgactcgttacccatgagatgttgtcgtagccacgcggggaaagtatcaatgtgatgccgtgtaatccatacatcggacttaccgatgttcctggcgcgaactagagccaagtgctcctcgatgtaaggagctaccaatgaagagtgttgcagaacagtgaaatgggctttacggaataaattgttgtctaccgtcataattgctttccttccgagagttccctttccccgtagtctcccttcatggcgtgattccggtaccccgattgggcgaaggtcttcgataaattctacgcaaaattcgatgacctcctctgttccataacccttggcgatgcttgcctctggacgagcacggttacgaacatacttcttcagaacgcccatgtacctctcgaaaggaaacatgttgtgtaggtacataggcccgagaatacggatctctttcacaaggtgacaaagcagatgtgtcattatattgaaaaatgaaggtggaaatatcaactcaaaactgacgagacattgcaccacttcattctgaagggcatctaatctatccggatcgatgaccttctgcgaaattgcgttcatgaatgcacatagctttgttattgttgcccggacattgtctggaaggataccccttattacaactggtagcagttgtgtcatcaacacgtgacagtcatgagactttaggtttgtgaacttcttctccttcgtgcttattattcgcttgatattcgtggagtatccagacggtacctttatgctctccaagcattcaaacatactttccttctctgccttgctaagagtgtagctggctggactcaagtaatggcttcctttctcctttggttccgggtgaaggtcgccgcgttgttccatatgcttcagatcattacgtgcttccagtgtatctttcgactttccgtatacacctaggaagccaagaaggtttacgcaaaggttcttagtgaggtgcatcacgtcgattgcgtggcgtacgtccaagaattcccaatatggtaactcccaaaatatagagttctttttccacatcgccgcgtgaccatcttcgctctctatatgctggcttccagggccctttccgaacactactttaagatctttaaccatagcaaacactgttttcccgctgcgatgtttaggcttcgtacggtggtcggccttatgttcgaagtgcttgcctttcttccgtaccgggtggtttgctgcaaggaatcgacgatgacccatgtatacaaccttcctacagtgcttaagatacgtactttctgtttcatccatacagtgagtgcaagccttgtaccccttgttggactgtccggataggttgctaagtgcaggccaatcgttgatggttacgaacagcagcgctcgtaggttaaactcctcctgtttgtcctcgtcccacacggggacaccttccttcttccacaactgtttaagatcctcgaccagtggtcttaggtacacgtcgatgtcgttaccaggttgcttggggccttgaataataatcggcatcattatgtacttcctcttcatgcatagccagggggggaggttgtagatacacatcgtaacgggccaagtgctatggccgctgctcatctctccaaaaggattcatgccatccgtactcaaaccaaaccgtatgtttcgtgcgtcctttccaaattctttaaattttctgtcgatgtttcgccactgcgaaccatcggcggggtgtctcagcatcccgtcctgttgacgctcttcagcgtgccatcgcaacattctagcattccccttgttcctgaacaaacgccttagccgtggtattatagggaaataccacatcaccttagcaggaattctcttctttgttagctgcccgtcaacttctcctggatcgtcccgtctaatcttgtatcgtagtgctttgcaaacagggcatgcttctaggttctcgtactcctcaccgcgatataggatacaatcgttcggacatgcgtgaatcttatgaacttccagtcctaacgggcagactatcttcttagcctcgtacgttgtctcgggcaatttgtttccccccggaagaatgttcttgacgagtttcaataaatcgccaaatgccttgtcactaaccccattttttgccttccattgcaacaactccagagtggtatccaactttttgtgcccctgctcgcaacctgggtacaacgaagttctgtggtcctccaacatcttgtccaatttatgggcctccttttcactttcgcagtcctccctggcgtcctgcaacatttgaccaagatcatccgcaacgtcgttaccatcagcagctatttcctcctcgcccgtttgatttccttcaaatccaacaaattgagcaaagtccggaatattgtcgtcttccacttcatcttcttccatttcaacaccttgctctccgtgggatgtccaacaattatagcttggcatgaaccccgactcaaacaagtggaaatgaatagtcctggatgcagaatactccttctgattcttacacttattgcatggacaacaaataaaaccccttttcctgttagcttcggccactctcaaaaaatagtgcacgccgtcaataaactctttggaccgccggtcagcgtacatccattgccgatccatctacatgagtcaaaaaaaccgtacacaaataattattcttacaataatgacagtcatacaataattataagatatctttattcatacaaaaatcataaaatattacaccaaataattcttaaaaactatttgttaagtaataaactaattttaatgtgttttacttcttttaattttcattttagtttgttttctattatttaagattaactttcactagagttttccttctcaactattttataaaaccttatttagcaaatgaactaaatttctatatattctttcttccccacacacattttctctctcatcaacttacaactacattttggagacaaaaaaagtgtgcaaaacataggtgcaaatgtagtatgacaaaaaaaacattggaggatgaagttgcaaaccttttaggcacctccgatttgtatgtaatcaccaaaataaattcaatagaaattttggcatgacctcccctcttttttgaagaaattttgaagcttgctcgggcagctggaggaggaagaagacatatatataggggtgggactttagtcccggttggtagcaccaaccggggctaaagatcaccgggatctttagtcccggttggtattaccaaccgggactaaagttaacatctttagtcccggttggtgttatcaaccgggactaaagataccgggagggcctgacagaccctgacagcattcgaaccgggactaaagatcatctttagtcccggttggtaacacaacccgggactaaagatcaaatatgcccgttacccttttgaaccgggactaaagaacatctttagccccggtttttattgcatccgggactactgtggaaatcggccgaccgacgaaagatggtttctccaccagtgtcatgcttaaagaacatttgatgatgaatcgagtcacaataaaataaatgttaattgtataaattttttgaataagacgaatggtcaaacgttggataaaaagtcaaccgcgtcatacattaaaatatggaggtagtagcatgtacattacataggtgaactgatgagccataaatattaatttcagcaattccagacaattgcaaaaataaaagccaattctaggcaacttcacaaataaaaacatatagcttggttacttacatctaatcctatatatgcaggtggaaaaataaagtgagcacaaaccttagcatattccatgtgtgattttgtaataaatgcttgcatgaaactataccaactctatggaatgaatccaggaagcaaaaagtgcagagaagcgtagttggaagttcatgaaacatttttgtctgatatatatatggaggcaattgcaggttgttggttaaaaagaaaaagaaatcgaataacacaccaaagaaatcttgcaaagttattttacgttagtatagtgaattatttggattgatcagagatggtaaagaaagaagcacttggggacttggagagatatatatgtatagagagactgggaaaagaggctagatatattgccgcgctgttcttaaatcacatggcagctcggtaggtgaggctctattcggtgccaagggtggatttagagtgtaacaagtgagggccttggcccccacttaaatttgcagtgagtggggacaaatatcccttgacactttttacttccttaattagtctacctgagcggtagatccttggcccctactcatgctactttctgactccgcccctgttcggtgcctgcttgcatggatcgaccttgtcagatgtagatggagacagtggtcgcatcgttcactacctgtgattatggatgagatgatcttcacaaaatatgggaaaattcctaatggagtattgacgaagatcgatgccgctcacctgcaagcgaggcaaataatttctgccgccggtgccttttgtgctcgttggaacggacgcaaatggacgctacggcctaggagaaaggtgagagtagaaattacggagtacgtcgataggtgatggctgggcttctattctatatatgagagctgcactgttcttgggcttgatctgtcagtgttcagaacttcagatagcttagaaaaccagatcgctgttggatggaggtgtcaattaatcgaattttgtttgatgacgcggcttcacctggaactgtgcacaaggtatgcacgtcgccgtcctcgtacgttgccccctccggtggataagaaacaacagcaaaccgcagacacagtacacggatatagcgtgaaaggcaccgaagaaagaagaaggctgcaaagatcagtacagaacccactacgatacccataatgcaaacgaacacaatccatgcaggccgctgaagaagtccgaatggtaaaagcgactcatatcctgcaacaatgatttttaaagtatatattaaattttattttgcacaactgttgagcagaaacgaagtagaactgatgataataataaatgagtaaattttgaaataataataaattagtgaattttagaaaactcatatattttgcggccagtgtaacacgtaaccacagctccttacttattttatcacataactgctgtttttttcttctggtcgaacagggcatggcggcggttcatcggcgccggtggcggagcaggccatggaatggagagagaggccagttccggcagcacagtggcgtgcggcgactccggtagtaatcttgcgtggcggcgggctcgggcaagggatgcgcgaggcagcgctgccaaaccagggatgcggcggcggtggggggggggggggggggg

SEQ ID NO: 8410 - DNA, 65991 bp, Oryza sativa
gtcgccacgccgtcgccacgccgccgctgtctccacggcgccaaccgccgccccgatgccgccacaccgccattaacgaacgagaacgagaacgatcgaacgaacgagaagcgagaacgaacacgtcaacgtacgttgccgtgagaacgtgaacgagaacgagaacgatcgaacgaacgagagcgagaacgaacacgtcaatgtatgttgccgcgagaacgtgaacgagaacgagaacgatcgaacgaacgttaacgtgaaatgcaatatatatatatatatatatgtatatatatatatatgtatatatatatatatatgtatatatatatatatgtatatatatatatatatgtatatgttacttcgcatttgactatatacatctttttgtatcttgcagaaaagacgtgttgtcggagtcgtccgtcaagcctgagtggaagagctagccctagaaggaattggagcaggcaagtgacgtaataatataaatgattgttatatttgtaatgcaattaattaagattattagccctgtaattagacttatcatataagattgtgtagtgttctaatattatttgagttttaatataagattactttatttgtaattagacttagtatgtaattattgactacggaagtggtgcgacaagtagcaattgactattgtagtcttaattagacttagcatatacgcacgaaacacttagcatacatgactattttagtcttagcatgtaatattatttgaatatatatataagattactttatttgtaattagacttagtatataattattgactacggaagtggtgcgacaagtagcaattgactattgtagtcttaattacacttagcatatacgcacgaaacacttagcagacatgactattttagtcttagcatgtaatattatttgagttttaatataagattactttatttgagattagacttagtatataattatttactacggaagtggtgcgacaagtagcaattgactattgtagtcttaattacacttagcatatacgcacgaaacacttagcagacatgactattttagtcttagcatgtaatattatttgagttttaatataagattactttatttgagattagacttagtatataattatttactacggaaatggtgcgacaagtagcaattgactattgttgtcttaattagacttagcatatatgcacgaaacacttagcatacatgactattttagtcttagcatgtaatattatttgagttttaatataagattactttatttgtaattagacttagtatataattatttactagctagggttgtataatatacgtcacctagacttagcttatatcacgatttgtaattagacttagcacgtaagtttgtgtagggttctaatgtacgacatttacacttagcatacatgacttagattgttaaaacataaatgtgtcgtgacttagcagatgtttcttgtatcaacagatggctgaccgcgatgaggaacagatattgtacgatacaatcgcggagggaagcagccagtactggaatgaagaagaggggaacgaggatccaaaccagtacttgaacgaggaagggaacgtggagagggatgcggaggggaaccagcaggggcacgtggaaagggatgtggaggggaaccaggaggaggaggctagtggtagtcaaccctccgttggacagaagagggcacgcgggcaacgaggtgcagcgaagaagcttgagggtcggcacatcataacggaagtggaagaagatggacgtcctagtgccccggccgaagccgccaagaactatgtacgtcacagcggttgggttgtgcgggataacgtgcctgtcagtacggtgtactggcgaagaacaagggcacgaggagatcatgagagctttgtcccagattcggagaaagagatgctgtggaccacaatgctcgagacattcacccttcctgcgggtacagaggacaaagtgaaaaggtggactctgaagaaaatggcagaacagtttcagagcttcaagggagatctgtacaagaagtatatactgaaggggcagacaccgaacttcgacacattcccaaagctaagggatcactgggacgagttcgttgcatataagacaggtgaacaagggcaggcgatgatggaaagaaacaaagaaaatgccgccaagaagaagtaccatcaccacttggggtcaggaggctatagcgtcgcgatgccgaagtgggaggagatggaggctagcttgattgagaggggtatcgaaccggcaacagccaattggccggaacgatcgaagttctggtactatgctcacggtggaacgctcaacccagctgatggctcactggtattcggcgttcagatacgagaggctgcgcaacgactaacagatgcagtggaagcctcctctcagggcacgttccgacccgacagagatagggacgagctgacactcgccctgcagactccagagcatccaggacgaacacgagggaaaggggtgattccttggaagattggtttcaaggaggacatccacacgtacaggagtcggatgaggagcaagagagataccgaggcgaagattgcagacctagagttccgggtatcgagctacgaactcaacatgcaagaggaggtggcaaggaaggttgatgaacgcatggccgcacatcggtcccatgatccccagccgaccattcctcctgcaatggtgagcccgtcaggaaaccgtagcagctgcgcctcaacggggcaggtaggatcgcagagcatggacgccatgcaaacacaggacgaatcgacctgtcccgttgatgacatcactcagcggacaccatgtgagctgcatattcctttcaagaacttatcaataaaggtaagatttagccattccgctagttcctgcttatatatgttgattactaataaataatctctcacaacatgaaggtggcgtcgggcatggccatcccaacggacccttcaggtacttaccactgcaggccgattccagcaggatactcgaaggtcgaagttgagttggtcgaaggcgcgtacgaggacctcgagctggattaccctggaggagacggtgagacgcatctacgagacacaagccatgccattattctatggcgcaggcggtacatcatcctccctgggcgacaagcggcgtctcgtgcaccatctcctccggctccgccatctcctcctcatgatcctgcaccgtctcctcctcatgctccgccagcaccgtctccacctcaggctccagcatcgactcctcctcaggatcctgcaccgactcctcctcgtgctcctacacctactcccccgcaagctcctcttccggcaccttcaaagtcaagggcccccccagctgcaccgcctgcccacacaagggcaacgaagaaggcgaaagttgacgccgacaagaacaaggacccggggtacgattgcacgcaagaggagcttgacgcttacgttgcatcagaagtcaagagacaattcaagcctcgaagtccagaaaagaagattcctatagaccccagtgtcaggaacttcttcaggggtatgtctgcatctgtcaaggaggccatcaagctatcggactatgagcgaacgctgaagaaagcatcttctggaaagtccaaaccagtccctcagcttggagagcaaccaaaacaggagatcgagccgttggttaccggtaaagaaatgacgatagaacaatttattactgacaccggtctaactacggatcaattgctaggagtcgcaccaatcgaaaaggcggaagtgaaatacatgtacgaactcggtaaaccgcttgtcaagcctgagctgctgcagtccctacccacacaaatgtacaagttccatcagctgtacatggagatgagcgccaccggtagagagatgatcggagcgaggattagggatacggacttcttgcaaggagatgacattctctggatcaatttcacacatatctacgaactataccagctggacgccgtcgacgtctctattatgagttgctggattttgtaagtatatcgttcagttagatttcttactatacgtctcctttaattaattaggtccttgtatataagtagactatagaaaataatatactcccttttatcgttgtagaatggagattcaaagggcccgacggcggagggttttcgatactggattcatcgaccctcggagagtaaacgtcgcaatgctcgaccaatatccacaagaaacagaggacaatctcgtccatctcctgaaggcgcagcattacaagacgttcatactgttgccatacaacacagagttagtttaattttactgtcttcctacataccaaatttcattcccgtacgaacttgctaagtgtttcatatgtaatgcatcccacgcacattgcagattccactgggtgcttttactcttcgacctggaggcctgcaccgtcaacgtatatgactcaatggataaaaaagagtctacgttcgacaaggttttcgaacttatagacaggtaccgtcataagttcctttgttaattaagaaaatcttgttatgttaattgctactacgaatcatagctttaaactccatgtagggcttggtatcggttccgtcatttggtccgcggcaaatggagagaaagacttaggcggaagttcaaatttcctgtgagtacacatgctctatatttatatttctccgattcaaatacatacaagtgtatattaattagatctctcgttgtttgtcatttatttgtagtgcgcaaagcaaaagcagggaaataacttgtgcggctattacgtgtgcgagtattgccactgccttgcaaaccaaatcatcaccacaagagagctcgatgtacgtacaaataaattcaaaatttcattacgtagcgatttcttgtttaattactaatcaatttcatacattcatatagtttattcgcatgagggataacctgaccacacacaaggaatttatcacggcggttcaagaacaactcatgggattcatcaacgaagaaatccttaatcccaagggtgaattctactacgacggaaacacaattcaccggtccttagcttctgagctagcagcgagtactactacgtcgaaatgatagctagctagctaggacatataatggattgtaattaatacatgactacatatgtttctatatgcatgtgtacacattttctataatgtaaatatattttggtcatatatatatatctatatacatatgcattaatttgcataacatatatatgtgtataaatacatatatattatgcatgtatatacatataatataatataatatatatatatatatacatatatatatatatgtatgcatatatatgtattgaaacatatatatgcatggtttatatatatatatatatataaactatatatatatataaaccatgcagcaacagggccatgcaaaaaaaaaaatggtcagctcgatctttagtcccggattggtactcccggtttggaaaccgggactaaaggggggttacgaaccgggactacaaagggtttctccaccagtgtgatataaatactttcatatttgcacgaaaattttaaataaaacgaatggtcaaacgttggtcgaaaagtcaacggcgtcatacattaaaatacggagggagtattttgcaatactttggtcttggtcttttgaactggtgtatgctatccggctaatctcatagactgtttatatacttagatggaaccgtaagtctcatggcgttactaaatattgttactgttgttttttattgttaaattgacgtccaaagattcaatgatcggacgttttaatatactgaacaatgattgcaaaaatatattcatttgttgactatttcttatgccttaaccattatcaaatataagatatgatctctaacgtactatatatatgcgcaagtatgttttgtggttctaaaatgacaaaatgacctgctatgcaacgcgcggggcaatgaactagttttacagaagttcatccccagagaggatcccagttctagaagggtttacatgagtcacaaaatgggtgcaattgttctctgaaaagaaagctaaaagaggcaattatgttcaaattaaatttagggaatgagtggtatgacaaaatccgtttataaatcctgtttctcaactatactacattaatcagcaccaagaatggaggatagtgggttttagagttaagaaggaatctaaattaaagtgaccagagagatttagttgagtcgacagataagctgaggaatgtcttattaatagatgaaccagatcagctaatttgtccacattagaagaaggggcttataaaacaaacactataaatgtacaaatcgctaaagtttcgatgggtgagagacgggcgtgatggaggtctagaagagtaaaattcctccaaaaataaacactttatatacatggctgggagagagaggctggccaagtgatgttcagctagtaaaaagaaaatgaaaaagaattttgtaaaatgtgttaggaaaaagagtctactaatcatgttctcctcaaatgtcccattgctacatttgtgtggtgtatcatcagagatgctttagaactatcatgtttatctgaacgttttgaatattttaaatttcatttgcaatagtttttttttttttttgggggggggggggggcttgtgtttgttggggttctgtggttgacaagaaataattgggtctttgaaaatgtcttgattaaatctccaatgtaggtggtctactagtagtatctttttgttttagatctcgtgtgctacccttgtaaacctaagtttagaagacttaaagcaaagggattttgctttcaagcatccctgaaatagcttatggtcttctttcattccttcagtagcccttttctcttttttagcctttgtaataactttaacttttatttgtcctctattttactcgttgtaatataaacggcagttctcctgccgtctaccagttaaaaaaaaaggaaagttgaaagatacatatccaacataattaattctaggaaattgttttgatttttctcaatctgacatttattatttccagtgtatgcatatctagaacaataaattgccacctacctttatagatgtataaactcttactgagagaacaacctctgcccatctatataaagccgtgttcattgtaggaaataaaagcacacaaaaaccttttatctagaaaaaaaatttccgcaacttatttgagtagttcttatcttactcatagaggagtgagaaattctagttgtagaatgagtcaagtaatgcgtgttttactactactgtgtcttctgatcatttgttcggagcaagcaagtttgatatcatcatgggaatatgatcaagatcctagggagttacacatggggaatcgtttatcctctgcaagcagctcgctactcaaaaaggatttagtgaagcctcccggtcaagaaacatcctatgtgagttaaaactactccgcgtagaattttcattggggcattagatatcttcatattttgttgcaatccttgattttctccttgattgcccccaaagatctaaaaattgctaatggactagtttttccttccttcttcagttaagtgttttgacccctctagaataatatcgcttaattttgtccctacttccttgctcgtggaattcccatactcctttcatgttctcacatgcccattccgtgaccgttgcggagtggaaagatcaatgagtaggacatcaacatggctgcggtaggactaacccatactttggatatggaaagaaaatatagtatatagaaaaaggggcaatttcgtttctacccctactttgatgtctaatattgattttacccctattttttattgttttcgtttttacccttacttttttgaactgaatgcttgttttgcctctactttggatggtgaagttaacggtgttaagtaattgataaaatgacgtttataccctctcatgtatgttcattaattgtgtttttgtccccattttatacatgtagctttggaactttatttttgggagtatatttaaaattagatgacgcacattgactaatataacaatttggacaaattctgaatttgatggaattttgataaaatttcagcattttgatagaacttaaacaaaattttgacaacattttgtaaaatgtaattatctgttcctttagatattagtcaatgtgcttcatgtaattttaaatatactcacaaaaataaagttctaaagctacatgcataaaatggggacaaaaacacaattaatgagcatatatgagagggtataaatgtcattttgtcaattacttaataccgttaacttcaccatccaaagtaggggcaaaacaagcgttcagtttaaaaaagtgagggtaaaaacgaaaaccctaaaaagtaggggtaaaatcaatattagacatcagagtaggggcagaaacgaaattgtcccatagaaaaaagggtggaggggcaaaagggtaattacagagagataaaggaatagaatgaatgaaaagggtgaaaacagcaaaatattgttttccaaagagggtagaacctagtaatgatctgataatgcgaggaaatcttaatattacaaaaactatgttaatattttataaagatagttacatacttcaaatgaaatttataagatttgtttctttacttgttagacataattgttttttgggaaattagacatgatttttaatggtatcagccttaattgctgcaactgcaaatccctaatacatatttacctcaatgagatgttgggtatatgattttggtcaatcccctatcaatatcttctatggatagatatttgtatatatacatttttttgcaaaaaaaaaggctgtttgcaatgatcttataaaaacatggtagtataattttgtagagtcaaatattttattacatttcttactgtagatcttaaagcatatttacttggcatctgtcgcaatgcgttggcacatttcccagaaagatataaattgtctcagattgttatttatgtgtgagtttttccacagcaagctcaatgttattcgaacacatcaccctcagatgagcttcttggtgccatggcaacatttgatgtatatgggttcccaaatttgaacaaggaccaagtaagctcagcagatttagcggtactaaatgagcaacgccatgatcttactgacggaaatgctttatttgccggatggatggtatgttagttttctcaacattttcacaagtataacatatttataagtataaataccatttatgtgattgttttatttcatatgtaggtcaacccggtcatctcttcatggtgacagcaaaacacatttttatacagcgtggacggtatgtagtttgttgcctcttcgtattatttaattaccgcatgcttatactatcgtgtataacttaggatcttttgtttatttttttacatatataggttgataatggtgtctcgacaggatgctataatctggaccgtgatggttttgtacctgtaaacaattcccctataactcctggagatattttagagccaactaatggcactctgagtatcacaatcaagatatttaaggtttgtagttgaatgtattgatgcttttttgtcttaatctttttttgaaacatcataaatctaaaagcgaattagtggatactgaattgggtgtcaaattaataaggtgtatgaaatgtaaatacatggtttagtgacactaggttttcattttgttcacagtgtttattagtttacattttttttatatcaactgacatcattggtggatatttcaattaactttatttgcttttattgacatgcagaaaaaagatgatggtgactggtggttgtactttggacatgataataacaatcttagccctgtaggattttggttgagcagtgttttaaccaatttggctgaccatgcaaacgtcatagcatggggtggctacacctacacacaatctactactccctccttccctaaatgtttgacaccgttgacttttttaaacatgttcgaccattcgttttattcaaaaacttttatgaaatattgttgacagaaaacacgaggcctgaaagatctgcttaactccagtgcaggtccaaagctcgccttagaatgtatgagcgtgtcagttgatttgatcctataatcaacaagaaatagaagcaaagaaaccgcggttaaatctataaatgatagtcgatcggctagaggccgatgacatatcatttatctttgagccgatgtcatatatgtatcgatcggcagtcatgaataaataagaaggaactaaatctactcgatcggctatagatattaacaatatatactccttatatcgatatatacttaaatcaagtgattgggatagatcaaaatatatattaataatgggactatatatgttcatagcatagccgatcatatagatctagcatgtatcggctaatacttcgataccactctatactaagatgttaaagcaggtagaatatattaaacaaaggcctaatatacttaaatgcaataagatcttaaaataaagggtagatttaacatgtcaataaagtatatagggtaaatatagttaaatcagataagatcggctgaaactctgatgctaccctaatcggcaaccagaaggcaggctagagattgattttctaagcacgacttaatagatcaaactcaactgatacaacattaagtatgaaaagaacaacaatatctagacaatcaagctgctggaagcttcatagagtggtagatatcttatataatctaaatcaacatcgaaatctaacctaattggctgccctctaccgacagatgttagccgattgtagattagatagcggcattgccggagattatgtaagatatatgatagctcgacgaattacataaacgagatcagagtatcataaagatggaagcactaatcccgagaacacaagttgtcataacaagttttacctcttgttgaagatcgaaaccgatgcagctcaacccgaaagtaagaactcgtcgaaataaaactaaagcaaaaagggtggcgatgcgccgaaattgtattgaacgtgtgtgttcaaagttacatagggctcgggtctatttatacccgagaattacaagatatgtccataacggacacgactaatatctctaacaaactctaagataccataagtctttatggcagacttttgcccaagcgtatctctaaagaaattacataaaacatcctaattaatagataaaattgccttcttaggactctatccatgtgcggcaatcaccttgaggtgcctcaactcaacccgatatcatacatcaagtcgcattgccggaatcggctgcatcggcttacctagtccgactcagacccagccgatcctaatcgtagccgatatggactccagccgattcctgctctgtttccgaacccgatctccgcctccgacttcgtttcgatctaatcttctttctcgatgctgatattaccaaatttggttgttaacacatgccccccaagtccggaatatttggtaatgtttcggatttgctgtaaatcgaccccgagcaagtttcgcactttgccgttttccgaccgttactgccgtgctttaaatactaaccgtcaccctcgagaaatctcacaccgtgacttccgttttcaccgctcaagcgaaactttgttctctctctctccgacgattcctccgatgcaaaagcgactcccaggcgacttcatcttcggcgagatttccgcccgcagcgatgtcatcctccaccaacctatctgatgtgccatcagccgagtacgctgaggtaagtcctcgtcggctagatcccctttcttagcagcagatcgattttctcttatcttatatcgctctctttttctcggttgtttcggatttgcagcatctctccaacctagttgcgattccaagcctatcacacgaaaaccactattttcttggcccaatcggcaatctcgaccccactgatttcatcatcggtgaaaccaaccaaatcccctttagactagccaaccctaacctgggtcactggaagaataccttcaagtcttggccatctctcgaaaaacctactcctgataagagctggaccacctggtaccaacgcgtattggctagtaagaaagttcactgggatgagattggaatcggccaagcgcttgctctcaccatagccaattctgctaaggatgagcctctgatggctgccgccacctacttctggtccaacaccatcaatgctttcttattcaaccaagggccgatgactccaactttaatcgacatcaccatgattactggatttgatgtaacttcatcggctaaccctatgagtatgaacaccaagaaccaatttgacttcaagaccaaaagcataggtggctggtctggctatgtggcggcatatatgggccaagggtctgttactcctcgagagcatgtagctttcttgctcatgtggctggaaaagttcctcttctgtggatctagttgtggccatacaaccaactggcaatttgtagtcgaagcctgttggcagatggcatgaggcccttcgactaaatctgccgaaacccgtggcgaaggctatggagcaagaacggcatgaggcgaagagtcgtacgagtgccctgccaggccagaggcgtctcaggcgaagggtgtaaggcgaagactatctcaggcgaagggtgcaaggcgagggccgaggaagcctttccggcctatcaagcctaagggctacagggccggcgatcgccagacggcccatcaggggcccatgagcccctataacattatgtacccctgtaaatgtccctttcgtaaaggtaatcatgtaaattcccctgtacaacctaaaccctagtagtaagaacctgtaatggggctataaatagtcccctagggccatgtaatgagggggatcccaaaaaaagaaattcaaaattcaatacacttcgtttccttccaaccactgttgagttaccacgtccttcgacgtatgcagttgtcatttcgacaacagctggcgccgaccgtggggacctccgagcgaaaccactgagagcgaatgccaccgaagagggtcgtgaaggagaaggttgccaggtggaaggaaagcgacgccggactagacatggccgccgaggaaggagcagagccttcggcgcccactgccgaagatggaggaggacaagcgacatcacaactgccttcggcccctgcaacctccgtgcaagtgccgaacgcggccgacgtggcgaaggcggctgcggcggcaagggcactccagaccagggcggagatcctttcaacaatccaactggtggtgccccaagccgctccatcgcagccggcagcggccccaaccgcgcctgccgttgtgcaggcccaagtcagccctgaccccgaagcacaagccgaagccgacatggaaaccatgcggcagaacatgacacggctccaagacatgcttcgccaaatgcaagaacaacaacaagcatacgaggtggcaaggcggaccaaggccacgtcggctccaatccttcagtattcggcaggttatgtcccatctcaagtccatccgcatgtgacgacccagcccattccgccacaagccgcacaggcgccggtgtactttgccgggcagcaatcggccgcagcagtgcattcagcccctcacgtgcaactggaagctcaaccagtcgctgcccaagcacaccatcaaccacctggccaagcgccacaaacagtggcggaaggggcttcggctctgcaggcgcaactccaagctttccttcagcaactcaaccaacctcactgcatttcaagtacaaccccatcggcccacccggaggggaatacaagtcaaggtgtgcctaattggttgccaccgattcagccgggcctaggagtttttgtaacgccccgattttcgttcgggaataaaaatcaattaataatacatcttctagaaattaaataaaagttaaatcaatttaatcaagtgaaattatagaggaaattaaaatttcctttaaaaatcattggccgggaatattttgtaatattcttggtgccctaatgtactctccggaattttccgtgaattttcggagctcgagaaatagttttaaagtcacaaagatcatttaaccaattaaaataaaaagaaaacaaataaaatcctccctcctctctttgggcccctttcggcccaattccccccccttctctccctctcgggctggccttctcccacggcccgctcggctctctctctccctcaagtctgctttacctccctcgcccgttttccccactctctctccccgacaggtgggacccgaggccccacctgtcagctcctcctcctacctctggctggccggctgcaaccgccagggccgcccgagccaccccacgacgccgccgtttccgacctcctccaccccgcgcgcgagcccgccggtcgtgggaccccgtcgccccacgtcctccacccttttccccactctccccacgaaaatcgccgccggttaacctctccaccacccccaagatgccccgcctatctcgtcggccggttgccacctctctcgagcacgatcccatcgctccaagcccataaaaagcatccccggcctcccctttccatttcccccaattttcccgagcttctcgcgccctgtactgctctcccctcgctgctcccatcgccgccgctcaccggcgactctccatccgctcgccaccgctgctacagccgtcgccgtactgttccgccgccacctgcggcttcgccgtgccttgccgcacctcggccccgctccgttttccccattccatcgttggaaccccctccccaccgcgctccctctctccaccactcaacgacgagctccagccgccgctcctcgccgctgcagccaccaccgcgccgtgccgccgccaccgccggcatcgccccgtcgagctccaccctggtccctactccattttcccatttcgcctccggaacgccgccgccacacgcaccacctctctccctcaccatggccacctccagccgcgtcgcaacgccgcttcggtcctcgccgacccgcgtcgtcgccttcctcggctccgcagggacggggagatcctcggccactggccctcttcgccggaaatccacccgagctccacctccctcgtcgccggtgagctcctcctcgtattgtcgtggtcggcagtcgtttccatttacctcgcaccagttctcacctccataggaggctttgagccgtgaccgtgccccagccgcgcgccccgtggccgtccgatcggcttgggccaatccgggccgtcggttcccgtggaccggcggtggaccgcctcggtggtcccggtccacggtggaccggtgcccttgtgccactgaccggtggggcccgcttgccggcgccacccctcccctttgatgacgtcagcaaccctcttttcctttggaaaaataaataataattgcgtcataattcgttaataattctagaaattcatttaaatggctcaaaacttctaaaattcatatctaattcattcgaactccgaattgagccgttcaacttgcaaaattcatctaaaattgagatctacatgtttgtttagtttttatgtactgtttctttggtttttattagagtttttcctcgttttgcgtgccagcgtgtagaatccgtcgtttcggaagtccgcggtcgcgaggaaaagagttcggaagatcaaagtgaagaagcaaggcaagtcacacattccccttgagcatgttgatcccaatttacaaatgttttactgtttgcaaataaatatgcatgttttgctaattacatggggtcagggttttacctatctgctcgcttgtgccatgtttacttgatatctgttctttgtcaaccttgggtaataaatcgcctagcttgtgttactttgatgacctagctagaactatatgcttaaccatgcttcattaccactagctcagttgatggggtaattacagttttagaccttttagtatcagtatgagctgcgtgctcgagacatctggccatgcttcatggtcgtaattatccaactaaaatgcgactgaatggtgggctgtgggtgcatggttttgctagtcgcacccatggcaattaaggaccggttcgcgggatgccctggaagaacttatcgtacttaccacaagccagcgtgggcaacggctgggcttgtagtgtagctttcctctagccgacgcatccaggcaagggtgggcgtgatggagtttggatgggccctgcgacggcctatgcggcttccggattcacctaggcacgagaggggactgcccgctgccttgcgaggagtgggggtgaaacctgaggtgtggtgtgcttggttagagggggttatgcgaagggtcctgtcacggcctctttccggtatgtcgtggtggcatgtcggcgcacggaaacgtgtcgtggggctgtgtcttgtgggtacagttgtacacctctgatcagagtaaaactattcgaatagccgtgcccgcggttatgggcggtcgaccagattcaccgtgattagtcccatcttaataaatcgactcaatacactgtagttcaggtgggttggttgggcctgttcaacgtggtgtagcgttgatcagtggagattcaatattactttaattactcaacagttttactgttttgctcaataaaatgttttacaactgcctttatgcaaatagccacaaacccctgcttgtatccccttgcacgtctgcatcgttggtgtggcttgctgagtacggtggttgtactcagtcttgctattattcccccttttcagaagtgtagtgcttctgagctgaagacgaagttagaagaccaaggctcagaccccagttgagttttgcctgtggaatggagctgaagccccgctaggatcgcctttttccgctgctgctgcttttgtttcggtgtgaggactaagtgcctcttccgtaagtattttacgctttatttacgtttggaactgtatattacttgtcgttttgtgtaccctggctggtcctggacagggatttaatacgcaaaatagtctggaaatttgggttaaatttctgggcgtgacagttttgccatggaatcaaggactgcagttcgacttcgtcaacatgctcaggcaccaaccgttcggcagcaagctccaactccaggcttcggaacaaaccaagcaccaatccaagctgccacgacgtggtcgcagccaatttttgacccatccatggcgactcagcaagtacctccaattggagccagacagtcgaatgccatggcgcaacctcacgcacaagctgcgattttgcccttcgccacaccgtacccgcagcaaagtgcagtaaacagggcgggaggcgaaaaggggctaccgctgagtgggggaatcaggactcgtccaatcccaccgcagttcaagttcccacccgtcccgcgctattcaggcgaaactgacccgaaggagtttctctctatctacgagtcagcgatcgaagcggctcatggtgacgaaaataccaaagcgaaggtaatacatctcgctctagacggcatcgcccgtttttggtatttcaatttaccagccaatagcatttactcatgggagcaattgcgcgatgtttttgtccttaactttcgaggcacctatgaggagccgaagacgcagcaacacctcctcggcattcgccaaaggccgggggagtcgataagggagtacatgcgttgcttctcgcaagcccggtgccaagttcaagacataaccgaggcatcggttataaacgccgcttcggccggtctgctcgagggcgaactcacaagaaaaatcgccaacaaggagccacagacgctcgagcacctacttcgcatcattgacgggttcgcaaggggcgaggaggattccaagcgacgacaagctatacaagctgagtacgacaaagcctccgtcgccaccgctcaagctcaagcacaagttcaagttgccgaaccacctcccctctctgttcgccagtctcagtcggcgatccaaggacagccgccaaggcaaggccaggcccccataacttggagaaagttcagaacagaccgtgcgggcaaagctgtgatggcggtcgaagaagtgcaagccctccgcaaggagttcgatgcccagcaagcgagcaaccatcagcagccagcccacaagaaggtccgaaaagacctctgctgcgcctttcacggacgctcttcgcacaccacggagcaatgccgaaaaattaggcaacatggcaacgtgcaagacccaaggccgcagcagggaacaactgtcgaagcatcctgcgaagcaattcaggagcaaacacccccagccgaacaacgccaagatgtacagcgaagggtaatccaagtgattacaagggctgatccgccaagccagttgtccaaacggcagaagaagatgcagatccgtatggtccacagcatcactttggcgggtgaaggggcgccgcagtatcggaaccagctaatttcttttgggccggaagacgcagaaggagttatgttcccgcatcaagatcccctggtaatctcagctgagatagctggtttcgaagtccgatgaatcctggtcgacggagggagttcaaccgatgttatcttcgccgaagcatatgccaagatggggttgcctacccaagcccttaccccagcaccagcatcactccgtggtttcggcggagaagcagttcaagttctcggccaagcacttttgctgatagcctttggctcgggagagaacagacgcgaagagcaaatactgttcgacgtcgtcgacatcccgtacaactacaacgccatcttcggccgtgcaaccctgaacaagttcgaagccatttcccaccacaattatctcaagctcaagatgcccggcccgacaggggtgatagtagtcaaggggcttcagcctttggccgcttcaaaaggcgatctagccatgatcaacagagcagtgcacagtgttgagaccagaccgtatgaacggccgaagcacacgccaaagcccacccctcacggcaagataacaaaagtgcaaatttgtcacgccctgaagttcccctcccttgctctaaattcataaaataaatcgtccgaagaaattgtttaatttaacctagagatgaatccctaattaataaatgcaaataataatcggaatcgacatgtggaatttttcttggattctacatgtcaaaatatgctaacaggatttttagtggaattttcagagccttggaaataattttaatcaattaaaataagcaaagtgcaatattaaatccctggaaaaatcctttttcctttttatcttttcttttccctccttttttctttttcttgggcccggcccatttcctcccgcgccggcccgctcctccctcccactcccgaagtccacccggcctccctctccctctcgggcgctgacaggtggggcccacctgtcagccctttccctaacctccggccgcccacgcccgcgccaaccgccgtcgaaaccaccgcccacgccgccggtttccccgtttcccgcgcccactccgcccgtaccgcacgcccacgtcgccgcccaccttccccgcacctcccgccagctcgcgcgcccgcaaacggcgggggatttgaaatttcccccactctctctttcctcctccaccccctccactactccggcgaaattgcgccgttcccggccacgactcgccgccccccctcctatttaagcacgcccgcaccttcccctctctttttcctttctcggccgagccctcccgagctctccatcgctcccgcgcctctcatcccgccatccgccgctcgccgccaagctccggccgcactccgccaccgctagagccgtcgccgcaccgcgccgtcgacgccgccgggttcacaagcttgtgcgccaccccgtccgccgtttccccggtcaatcccgccgccggagcttgcttctcctcgcgcgccggtgagtacccccatggccgccgccttcgaccggcgaatccgctcgctgttaaccacccctctccctctaatccctcccatcttgttccctaggaggtctcggagctcgtccgcctatcatcgccgttccccggtcgctcgccgtcgccgttcgccgtcgtcttcccccccccccacgccggccaactcgcggtgaggcgcccctccccctcttttccccttcctctccctcctagcgccgtgccgggccgagccgccgcttcggctgtgtgccgccgcctgtgcgccgccgtcatccgccgccgcttcccgcgcctccggttgccgtcgccggcgaccgtgcgcgcgcgccgccgccctcgccataaccggccggccggcttgaagccgagctgagccaggccgccttcctcctttccccgtgagccgcgcccctcccgccttgtgccactgccagtggggcccacgtgccggcgcccctccctctctctcttgagccgctgactcatggggcccgcatgccggcgccgccccaccccttgctgacgtcagccctggggcaatattgcgcaataaattgattaaggcttttctttaatagtaaaaatacagagaatcttctaaaaatcataactaattcatccgagctccgattaagtccattcaagtctcagtaaattcataaaaatgtatagaatccattaaaaatggttttgtttcctgtttcagtagtcttatagcatgtcttgcttgtgtgctttgtttgtcgcgtagatttcgcccgtttcgtcgattcgtggtttctcgaagacgttgctgtggttccatcagtgcgagagcaaggcaagtcatacattgcaattgatcatattgtacccaatttacaaatgtcccgcatttctattaaatattgcattgttttacaatatcatgtgggatgggtcctattactcagctatatgttgtttcccttacgccattgataacttgggtattaaaatgactagatgttggtttaggagatgcttagccatgcttagttcaactagtgcacaaaaggggatcacattaaagcatagactttgattattggcaatagttttggattagtgccaccgcaatggtgttggttaattaaaatacacttcatggtgggctgtgggtgcatggttttgctagacgtgcccatggcgattaaggaccggttcgcgggatgccctggaagaacttatcgtacttaccacaagccagcgtgggcaacggctgggcttgtagtgtagcttttctctagccgacgtacccaggcgagggtgggcatgatggagttgggtcggccggggtgtccggttgatcggcttccggattcaccgcggcacgaaaggggggctgcccgttgcctgctggggacgggggcgaaccctaaggtgtggtgcgatcggttagagagggttatgcgaagggtcctgtcacggcctctttctggtatgtcgtggtggcatgtcggcgcacgggaacgtgtcgtggggctgtgtcttgtgggtacagttgtacacctctgatcagagtaaaactattcgaatagccgtgcccgcggttatgggcggtcgaccagattcaccgtgattagtttcacccctagtttagcttaatgaactggtgtagttcaggtggttggttgggcctgttgcaacgtggcgtagcgttggacagtgactggttaatattgcttaattactacaactgttttactgttttcaactactagttttaaatgcctgctttatgcaaatgaaccccgtagcctcctttggttatatcctgcatcatacctcctctaccggtatgacttgctgagtacagtgggtagtactcagtcttgctcttttcccccacaccagagttgaagttcttctcatttggagaggtcttgaagaggttggtttcgtcgctgccgtcaagggttgcctgtggaatggaatcgcccgctgcaggagtcaaggcttcaggcttagctcgctttaccttttccgctgcatttgtaatcttttatatttttgtaagacgtggatctgtatgtcaacaattgtcgtttgtgtaccctggctggtcctggacaggggtttaatacacattcagcttagaaattctggttcgtgaatttctaggcgtgacaaaattgatgacgccgaccccacaaagcccgtatcactggggggcgacataggcgaagaagaagttgagagtatactagaggtgcttaaaaagaacatcgatatcttcgcctggagccctgacgaggtggggggtgtcccggcggatctcatcatgcatcacctagcagtcaagccggacattaagccaagaaaacaaaagttgcgcaagatgtctgccgatcgccaagaagcggcgaaagccgaagtacaaaaattgctcagggcaggggttatccaagagattgaccatccggattggttggcgaatccagtgctggtgcggaagtcaaacggcaaatggcgcatgtgtgtcgatttcacagacctgaacaaagcatgtccaaaagacgacttccccttgccacgaatcgaccagctcatggattcaacagctggatgcgagctcatgagtttcctagatgcatattccggttaccaccagatccacatgaacccgctcgacatccccaaaacatccttcatcactctattcggcacattttgtcacctcagaatgcctttcggcttaaggaacgcaggagcaactttcgccaggttggtgtacaaggtccttggcaagcagttggggcagaatgtggaagcttacgtcgacgacatcgtcgtaaaaagctgcaaggctttcgaccatgcgatcgacctgcaggagacattcaacagcttgcgcatagcaggcataaggctgaatccggagaagtgctttttcggtgtccgcgcgggcaagttgttgggtttccttgtttccgaaagaggcatcgaggagaatctcaagaaaatcgatgccatccagcaaatgaagcctccgtcaagcgtacatgaagtacgaaagcttgcaggccaaattgcggcactcagtcgattcctctcaaaggcagccaaaagaggtttgcccttcttcaagaccttccggggcgtaggaaagtttaattggacaccagagtgccaagcagcattcgacgagctaaagcaatacttgcaaagcccgccagctctgataagcccaccccccaggaagcgaactgctattatacttcgccggtggcttcgcgcaagcttaagcactacttccaggcccacaaagtcatagtgccatcacagtaccccttgggcgaaatactccgaggcaaggaagttactggccggctcagcaagtgggcggcagagctatccccgttcgacttacattttgttgcatgctctggtatcaagtctcaagtgctagccgacttcgtagctgaatggacaccggtacttgcccccgaccccgagcccgccgaacaattctgggtgatgtgctctgacggctcgtggtcgcacaagggagtaggcattgcggcagtcctattttcgccgaatggtgtgccgattcggtacgcagcaagactgcagttcgacacaaccaacaatgcagcagaatacgaagccgttctcctgggcctaagaaaggcgaaagcactaggagtccggcgcctgctaattcgaattaactccaagttggtagcaggccatgttgacaaatccttcgaggcaaaagaagagggaatgaagaggtatctggaggctgttcggtccatggaaaaatgcttcaccggcataacggtcgaacacttgcctagaggccaaaacgaggaagcagacaccttggcgaaatccactgtttgtggtggcccacattcgcctagcatctttttcgaagtcctacatgctccaagtgtgcccatggacagctcggaagtcatggcaatcgaccaggagaaattgggcgaagacacatatgactggcgaaccccatttgtgaaacaccttgaaactggctggcttccggtagacgaagcaggagcgaagcgtttgcaactcagagccacgaagtataagatggtctcgggtcaactttaccgctccggggtacttcaacccttacttcgttgcatctcttttgccgaaggcaaagaaatggcaaaggagatacaccaggggctatgtggcgcgcaccaggctgcaagaaaagtggcctccaaagtatttagacaaggagtctattggcccactgtgttgaaagtctgtgttgagtaaatcaagaagtgcgaaagttgccagcgccatggccgaagccaagccacgccccagtatgatctgcagcccattgcgccaatatggcccttcgccagatggggactggacatcatcgggccgttcccggtggcacgaaacgggtataaattcgcaattgtagctgtggaatatttctctcgatggatcgaagccgaaccccttggggcaatcacttcggcagcagtacagaagtttgtatggaaaaacatcgtttgccgtttcggagtgccaaaagagttcattagtgacaacggcaagcagtttgactctgataagttcagagaaatgttcaaagggcttaacctggaaatcaggttcgtgtcggtcgcccacccgcagtcaaatggggcggccgaacgtacaaatggcaagatcctagaagcactaaagaaaggcaaatggccagaagaattgctatcggttctctgggcccttcggacgacccccacaagaccaaccaagtttagcccgtttatgcttctttatggcgatgaggcaatgaccccagcagagctaggggctaactcaccaagggtgatgttctctgggggcgaagaggggcgcgaagtatcgctcgaactcttggaaggggtaagagtcgaagcgctcgagcacatgcacaagtacgccacaagcacttcggcaacttacaacaaaaaagttcgacccacagagctgatgcctggtcatcttgtcttaaggaagaaggcgaatccagtagctgttggcaagcttgaatcaaagtgggaaggaccgtacctcatcaaacacaagtccaggacgggatcttttcgcctagcgacactagaaggtgaggagttcgaccattcctggaacgccgcctctttcaagcgcttctatgcctagaatgggtggcacccaaatcgctagcttgtaaaaatgtacatacagtcatgtaagcccttcggcaccatgtaagcccttcggcactatgtaagccttttggcaaagaaaaaaaaaggggaaaaagagaaaaaagaaaaaaaaactagatgtagggctattatccaccatggaggcccgaaccagtataaaatctctatgtcctccgccttcttttcatttttcgtgtgattgataatttgtggaaaaaccccaaggcaaacgcctgatcagcgaaaaaggccagggggagaaacgaatcggtcgaagcatcgctcgccgaacgttgaaaccgcaacagcttgtctcggaaaataactagccaaacgacgttacgattcgatcaacataaaagcaaaagtgtctctttcgacacagaatgctacaggtcgaaaacgaacgacgaaaagctaaaaagtcagtacacctattttgctaatatgcgcaaaggggccggcatgttccgacctaacaaaaagcacaaaatgtgacgatgcgaaaaatagcgaaaaggaaataaagcacgtttctttattaacttcgaaaaaaataattgaagaatagaaggttcacaacacgatacaactcactttacaagtaaattacatcttcgcccctgtaatcattatccctccctaaggaatggtcagacgaactaggttcgtcatcactactaatatcatacacaaccttaagaggagtagggggcgaaacacagaccaaactgttgcgacgctgaaagatcatttcctgacgtttcgtcttctgatgatttcgccaaaagcgagccatatcctccaaacgtcttgaatgaacaaggtcgtaatcttctaagattcgcccggggtgcgcccgcagccagtcggcaaccttgaaaaccttatagctatgaccgtttatctccatttcgcgataaacaggacgaaatggacatcgcaccttcggcaggtccttcaatgccacaaatttctcgttttgacttcgccagctcccggaaggggaccgaatgcacaacttccggtgaacgccctgatagacagcgcagagaaagcaaaacacagcttacatagtaagaataggcggaaggagggggaggtatggcataatgcgagatgagcgaaataataatatgccaaagacctcgaccatcaaaaagcaattaagattgtgtcatatattccaaatgtacaaaaaggcgttttttaaggttcggcggcagcctgccgaacgtacatcattcgcctctccaggcaaatgcaaaagtgggaggaaaactacaaaaatctaaggaaagggcggagggcctcacacctctgggtgatcctgggcatcgcctccaacctcttcgcctgcggcaccctctccttcgccccgatctgccgcctccgccttcgccagttgctccagaaggcgcgctttggcagcggaccggccatcattctgccagaactgttttcgccacgcgcgaagagcgggcgaaatgttctgcgcactaatctcctagtcccccttcgcataggtagggaattcggcaacgtgctcgcagccaaactattgcaaaaggtctaaggtaaaggccgccgatacgcgcgcacagcaattgccgtacgcggtggcacagtccgaaaccgatccgccagcttgctgggtccactcggagaagtcaaaggctgaggcatcctcggcaaggaccccccgcaccttcgcgcccatgtcggtaagggcgaggcggagcgtttggcaagccgttctcgcggattcggtggtcttcgccatctcccgcaaaaaccgctgcgactcctccgcggcgcccgcttcgaccctgctagccttctggcgaagagcctccatcttcggctcagtaaggttgtagtaatcgatgagcaccgccgaatgggccttctccttctccagttcggccttgaggcgatcaacctcggcccaggcatctttccccttgtccagttcggactgaaggcgtttgacttcagttttcggctccttgagggtgtgggccagggactccacctccaagttcttgcggcttatttcatcatccttggcccgaagacggctcttaaaaccgtcaaaacgggcccgcacggttcgctccgtcgagcagtgagtcgcaagaatctagatgaaagataggagcgggcgaaaagaataaaaggttaattgccaaacgtaaaaaaaaagagggaagaggaaaacaaagaaggaaaaaaaggcatacccgaaccgccaaacttttaatggtggaacacccctcgtcgaactcgttaagttcggtgaacaggctcggggtgccggcgggcaagacaagattgcttactccctccacaaagggaataaggtccgcctgggtcacgaagtcaccagggacgaagtggggcgccgcaagggaatactccgaggcagatgcttcggcggccacacacttccccttcgccttgaccagcggtgaaatagctggctcgcgcacagggctcccgaaaactctcgccgcagccgacacgatccgttcggcggaggcggaagccccggcggcggcgctaccgcctgccctagcaacgccgagcggagcaaggtgagcagttgaaaggtccaaactgcggccagcaggtgaagtcggagtctcgtcagaagattcatcgtcgctaaaaacgcgagcgatgtcgacgagtcccttcttttttgagatcttcttgaccagacctccttttgccgccttgcccgacgagaacgcaactagggccttcgccccttccaaatcctttcgttgaaggggggagctgttcgactccaccctggtctcgttgtgacctggacttggggtaggagtgtagccgggggtgtcgacgcggtcttcgatcgcttcgttcgcggccttatcagccacagcttccacctcctcttcttcctctccttccccctcgccgtcacattcttcggcatcatcctcgtcgtcggcgtcggagtccgacgaagcaggaacccttcgcttcctgggggcaagcttcacttgtccacgcatccgctttcgcgaaggccctgcatcgtcgtcagctttttggggattcgccggggaggcagttcgccgttgtaaacccggttcgtccgcccagccgcttgtcgtgttagcagctggctatactcgacgaccgaaacatcgccgatcatcctgcgggcttcggcttcagcctggtcgagggttgacattgcaaaagtaaagggtgtagctgcgttaaaggtcagacaaggcaaaataacaaagcacaggagtgtatagcaaaagaacggccttactgttcgtcccctcaggaagaaccaagttcggcaaaccgttagcctcttcgcattgctcgaccgtgacttgccatgactgggagaggggaaagatgcaaagcatacagaactcctccaccaagtcacggcagctaaggcgggagcaaaccttgcgcagtaggatgaaccgcgcctccatagcgccgtccatggcgatcttgggtttccggttcggtgcaatcgccctatgccggcaccggagggcttttgccgagtcagaaccagctgcgaaggggatggtgtgatagaaccacctcgccatccaatggcggtcccacttcgacatggcagcgttcaccggccagagattggaccgctcggggcgaacgttaaagttcacgctcccgaacactgtcttcttcgttccagccggggtaatcaccgtcttcgagttcaaggtggcgaaaaatatggcgccgaagagctcggcgctgggctcaaacccggaagtccgacacgcccagtcaaagatggagatccgaactagtgccgacgggctcagctgcggaagctccacctggaaaaggcgaaagatctccggcaacaacacgttgcacggaaaccgtagccccgcctcaacaaagacggcgaacaccaccgtccgattgtcgacaggcttcggcaccacggctttccccggggcgaaagcctgcccctcaaccaacgccccagagctaaccaactttgccagttcaacgtcgtccacgagagaaacccccaaaaaggcggtgctgtcatcatcgacccggccgggatccggtccttttgccgaagctgggtttggcttgcgaggggccatggcgaacggcgtgtatgcggtggcgaaggaagagaatgggcgaaacacctgaggggtcaagaaatgttgtggaagagaggaatggaagaagagagcgcaagcggtaaaaatggcaagtgtaccggtgaaaaggaaagaggggtgggaatatatagctcactcgggcgaccgtgcctactcaccagtaataaagcgccacgtgtcgcaagggtaggcgaaacggtaaattcccaccgtctgagcggcacagtaaaaagcccacgatgggaaggcccaatactgttccgttcggcccgggaaaagaaaatatataaccaccaatcgcacgaggcgaagcgcggcaaaataataccagccgcacaagtaacaaacttcattcgcaggaataatgtaggtttcggcaggagcatcagtcgaaagggggcgccgcataccataccacatggtttgcacggtctcggccgaagctccaatctcacccttgcccgtgaggggcttgttggcagatggcatgatgcccttcgactaaatctgccgaaacctgtggcgaaggctatggagcaagaacggcgtgaggcgaagagtcgtacgagtgccctgccaggccagaggcgtctcaggcgaagggtgcaaggcgaagactatttgccgaaggaagacgacttcgccatggcaagttcgcccccgcgagggtcgaggaagcctttccggcccatcaagcctaagggctacagggccggcaatcgccagacggcccatcaggggcccatgagcccctataacattatgtacccctgtaaatgtccctttcgtaagggtaatcatgtaaattcccctgtacaacataaaccctagtagtaagaacctgtaatggggctataaatagtcccctagggccatgtagtgagggggatcccgaaaaaagaaattcaaaattcaatacacttcgtttccttccaacctctgttgagtaaccacgtccttcgacgtatgcagttgtcatttcgacaacaaagccttagaatcaaagaaagaatttcctttgggcaaaatccttctcggctatctgtaccaaatgttgaacaatgcatcggctaaaatagccgtcggctcaatagttggagcaggtggaccatggtggctgctgcaaacttggttaaacctgatagtcatgaaggttgtccatcggccctctgtgacagaagctgaattcccactgccagagctgtcgcgtcccaaaacgactctaaaatacaccctctaaattatgcctagaataattaaaaaccatgtgaaagccttcaacaattaaaatgtgcaaagttaaaagtcaaataaggcttagaggatttttgtaaatttcctaaaaagcctaaaatgtgtaaataaattttagtggaattttcagagcacaaataataattattaagaaatgaacaaagttaaaatgattttataaaaagaaaaaccctaaaagtcccccttccctccaagatcccttgggctggcccggcccatctccctccccctctctctctcctctccccgcggcccactcggcctctcctcgcgcgcgcgccgctgacgggcgggcccgcccgccaccctcgctgacgggtggggcccacccgtcatcccctttctcccgccgctcccgctgcctcctccacgccctagcgccgccgccgccgtgaatcccgccgcctcccgccgtccccgcgtgcaataaagtgggggaaatcactccccgtgatcccctctccctttccccccatttttccctctctctctcgtattcaaacgggcggatttgcccccgcaaatctcgtcggcgccattgatggcggccggacctcctgcgccggtctccttcccctccggccgctctctcccccttccaaccctatttaaaccctccccgcacctcctccgtccgtttccgcctctcgccgcccttcctcctcaccggattcgagctcgcgacgtcgctctctctctctccgccgtcgccgccaagctccggtccgccgccgtcgtcgccccggaccgcctcccaccttggtgccgcctccttcgggttcgctgcatcctcgccgacctcgtccacctctctgtttcgatcgccgaccgccggaacgccgtcgaccccgttgacccgagccgcgccgccgcctccctccgctccggccgcctcctccgtcgccgccgtcgccccggggtgagccgtggaccgtcgcctcctttcccccttccctcccctctctcggccgccgctccgccgcgccggcggtcgccggcggcaaccatcggggcgcgggcgcgctgcctcccgccgaccgcgccggcgtggccgccctcgggcgcgccgagtggctgccgcgtggggcccggccgtcagctgcccgcgccctcgggtgcggctgacgtgtggggcccacggcgccggccggtgtgagcccgggtgcacccggtccaccgtggaccgtgaggctgccgcgtgggccccactcccgtggacccggtccgcgcgcccctccccctcggctgacgcaataaacccttttaaaattaaaatttaaataaagaaattcgtaaatattcatttaaagagcatataaacttcaaatggccataacttggccatttgaactcagaattggaccattcaagtctctaatttttccttaagaagtcaagaacccatttttgtgctttgttcttgctggttatatggagtttattagagtaaaagccttttcttttccattggtcgtgtagacgctgcagcttcggaagatccgctcttcgtggaggttgaagccgacgtttgggaaagcgagcaaggcaagtcacatcatccttgaacatattgaatcccagtttataaaattattttgatttaaattattgcattatcgctttatttaaattcccgcgttatcactgttttatctagccatgcctatttacctttgttatgaccttattattgctattgttattatttccttgttcaccctagaataaacaaaaccccaactagtggacactctactcatggtaccactagtatgattttaggcagatgcttcgctggttaattaggcaacattatgtggttttacaactctagactttgggatattcatatcacctggacactacggaatggttggattattgtggaattggattcacacctccccctctattcaaaatcctcaaaatggttttaggctgggctcggggtgcatggttttgatagtagcacatcggccatataaggaccggtcttcgggcctctgttgcaaagcactaccgtacttccacatgtctagtggataaggcttagtttgtggctcagtctggttataaaaaaagtacacggatggagatggacgaagtcgggggtcgatggacatctctaggacaaatgaaggctacacgagctgcggcctggtagtcgagatgtcatggcacagggccggtgtcctgctgctaggggctcagtcctgcctacctgatccgggggttccggccgtaggtggggttgggtcggtactcttgtctatggctaggatgggtcggaaactatgtcacgtcttccgtccgtataccgtggtggtatgtggcacgtggttacacgtgaggaagatgtgtcttgtgggtaaagatgtacacctctgatcagagtataacctattcgaatagccgcaccctcggttatgggcaagccgagcaatgtacccaagttagtgtttttaattcttaaaacctgcttaacaactaaaatgtggaatggttggcctgggttggcttgggacgagctgggacccggggtcgggttgccagttcggtctgaatcatcgtaggccttgggttaaggcaggctcgtgtgggttcacggccttgattaataatattatatagctctagaatcgtgtttacaaaatagctttgagcaactaagtgtcttttaatgctgtttactgcaaactctaaccctttatactataacccccttgtactcccttgcatttattctgcacttgtgggtgtgtcttgttgagtacgatggttgtactcagccttactcaatttttcccaaactcagaagaggagttcctggaagatgaaggctttggtgtctagctcgtgcctgccgtcaagcgcctatggtcgtcgccctagtcttccgctgtttttcgtttgtcttcttgtgtgctgggccttcgccgcccatgtaatagattaattaattacgcttccgcttgttaaactctgaattgtatcaacttttggtgtaccttgcctcctgggacaaggaataatgcacgcacgtaaggaacgcccgttgggttatttccggtcgtgacaatccccctttcatgaacaagaaatcccaaaaactggccagccgatacaccaaaagcacattttgtcgggttcatcttcaggccatattttttggttctcttgaaaaccttcctcaaatcggctatatggtcctctatttctttagacttaacaaccacatcatcgatgtagacttcaaccaaccagccgattaaatcatgatatatgtaattcatggctctttgatatgtagctccagcactcttcaagccgaaagtcatgacaacccattcaaataagccgattgcaccagggcatctaaaagctgtcttatggatatcttcttcagccataaagatttgattatatccagcgtttccatccataaaactcaaaattttgttccctgatgtagcatcaaccagctgatcagctattggcattgggtattcatccttcgttgtagccttattcagatctcggaaatcaatgcacaccctgaccttgccattcttcttaataactggaactatactagaaacccattcagcatatcggcaaggacgaataaaaccagcatcatacaatcgtttaatctcagctttgacaggttcaagcatatcggctttacatctcctcggaggttgctggcgtggtctaacccctagtttgataggtagccgatgttcaacaatcaatcggctgagtccaggcatctcataatactcccaagcgaagcaatctctaaactctcttaacagctctattagcttggttctaaactctggagataagttcttactaataaatgtcggccttggccgatcgtctggacctatgtctatttcttccaaatcatcggccgacatgaaaccttgaccttgcttgtcatcgagatcatctactgtatccttagtgtagacatttgaaccctccacgatgtcctcaaaataatagcttgggttctccatcttcaattggctgtatattagaatcggacactttcagaaaatctccatcccagacttttccagataaacaatcaaggccatccatctcccaaagagctaaatcggcactggcaacattaactgacctgtcagctggcacgatctctatcttgtcgccttgccattgaatcaaacattgatgcatagttgaagggatgcaacaactagcatgaatccaatcccttccaagcaataagctgtaagaacccttcccatcgatgacaaaaaaagtagtaggaatagttttactgccgactgtcagctccacattcagaacacctttggtttccgatggattaccaccaaagtctttgagcaccatatttgtcttgatgagatcctcggcatttctacccaactttctgaacgtagcatagggcatcaaatttaccgcggccccaccatcaaccatcattttagacatcggcttcccattgacatagccgtttatatacaatggtttaagatgccgattctctgtcccctcaggtttctcgaacactgcctgttctggtgacagaaccaacttagctgattcctcttccacctcgtcgacatcggcttgatcgatcccgaattcggctggcagggtaaagaccatgttaaccggtgccatcacaacactcttcccttttgccaacctctttgcctcatcggctgcaacatcatcggctagagtaacctgattcttaacacgccactcctgccttggctttgctttcttcagccgatgattaatttcttgttcaacctcctgaaggcgctccctgtttctcaatctttgaacccttctcttctgattcttcatgaaaataccagaatgacaccattgattcttcctgattacattgtcctcttggccatgatcttgattcactggaccaaatctttgatgaacagaaattcttgtctgccttagccgattactcctattatatgatcggcttgatctctcaatgatatcactgcacccagggcagttttcaatagatggcaacctcatgctctcattccagcagaatctaaagaattcacaatcccaatgagtatcaaaaccatcatcgtattcttcatgatgcttctcctgctgcttgtcatacttcctctgatatttatcgataatcatagccgaattcgcctgaaaacccgttgcacggaccctattggctgtttggccagctgtatgcaccatattaacaggaaaagggttaccatcgaccttcatcggctttttggaatcatcaaacctaatcttgcctccctcaatggccacctgaatttgctgtctaaaaaccttgcaatcgttaatagaatgagacccagaattatgccacttgcaatacctctttttgcctaattcctcagccgatgggattgtatgaccagcaggaagttgaatttgcttctctcggagtagcagatcaaagatcttgtcagctttagtaatatcaaagtcatacttctcctcttttccagaactttttacccattggcatggtatgacctttttactcctcacccattcggctgcagctatttcagaatcatcgtcatcatcatccgacccatacatgtacggacaaacatgattaacattcttagagcttttcctaacttccgcagacctatgctcatgcaaggttactttctgtatcatatgtgacaagctatcaaagtcttcagacgagaacttctccctaatcggagcaatcataccctgaaaggccagatcggctaactgggcatcggttaaactcaagctgaagcatttgttcctcatctccctgaatctctgaatatactagtgcacaggttcatcatgccgctgcttaatcgctgtcaagtcagataatttcatctcatgaaccccactgtagaaataactgtgatattgcttctccaaatcggcccaactattgatcgacccatatggcaaagaagaaaaccaagtaaaagctgatccagacaaagataaccggaataacctaaccttcagagcgtctacagccgatgcttcaccacactgagctaagaatcggccaatgtgctcataagtcgatacaccatcttgtcccaaaaatttagagaagtccggaactttgaaccgattgggaagaggaactctctctcaaaccactcagggtaaggctgccgatacaagctcccagtctcttttggtttaagcccaaactgttccctcattacgtcagcaatcacatcggcccatggtcgttgctgagctgccccttgtgactgttgttgcatgggtccgaactgaccgtattgagatgcaaactgaggttgagccaatccccctgggtgatattgggcttgcggggaaggaggctgatattgataattcaagttacccccttggtaattatgaaggttcggctggatattacgtaccaagtgctcaggaacaacttgaggcattactgtgccatctggctgtacgtggtgaaccaagtgttctgggacaacttgatttaaaaattgttgtacaggctgaccaccaggcgttgcaaacccggccgatgtgcttactgaaccctggtgctggatcggctgaacgatttgctgtcttaatggcgttcgctgaatcggctgcagaggctgttgccttggtggtgtttgcggaactggttgcatgacctgttgctggattggttgtacaacctgctgaattgggggtgtctgctgaatcggctgctactgaatcggttgctgctgtattggatcaacaacaggttgaggtggcagaaacatggcagcaacctgatcttgggttagccgattcgcaacctgcccactatgctatggatgctctctcattaacaaccgagggttcgccggctggcctggcgccatcactgatagagcaggtagggcagttgatgccggcgccgttggctgagttgttggtgcaacggagggaaccggctgaatagatggctgaacatcggtaatcaaataccgataatttgggaagacaccttgcaaataaaccgggcctgcagcctgatgctcagctattgaaccatcggctattgacttcatcatgtttgataaggtattgactaacaccccagactaattgatcaaagcatgatgcaccgcgtaatcaacccgatcttggaagttattgaaaaaatcctgtgccacatcactattctgattaagatttcctccctgcagcccctgagcaccatcaccttgaactccatgcaccccgtcaccttgtactccatggactccttgagaattgtcgccttgatttcctagagagccgtcggtagcacctttgatactcggctgagccgagccgtctggagcttgtttcccatctccatccttagaagaactggtcccaggatcatcagcaaccacttttattttgtacttctgaacaagtgtccccttgcgggtctgcatgaatgagttcaagaactgatcccgtgcttgctgcaacattgcttcaaactctttcttctgttcaggtgtgaatttttctggatcgatcggcacgacgtttccttcattgacatcagtcaatcccaatttcagcatcttttccttaacagagcctgggctagatggtggtggtggttgtttctcggccatgaggaagaattgttagctgactacttaaaggtcccatcgggcgtgccaaaagcgtgttgacagaaaacacgaggcctgggagatctgcttaactccagtgcaggtccaaagctcgccttcgaatgtataagcgtgccagttgatttgatcctgtaatcaacaagaaatagaagcaaagaacccgcggttaaatctataaatgatagtcgatcggctagaggccgatgacatatcatttatctttgagccgatgtcatatatgtatcgatcggcagacatgaataaataagaaggaactaaatctattcgatcggctgtagatattaacaatatatactccttatatcgatatatacttaaatcaagtgattgggatagatcggtcgccatgccgagacagtataaatcacttaaatcgaaatatatattaataatgggactatatatgttcatagcatagccgatcatatagatctaggatgtatcggctaatactccgataccactctatactaagatgttaaagtaggtagaatatatcaaacaaaggcctaatatacttaaatgcaataagatcttaaaataaagggcagatttaacatgtcaataaagtatatagggtaaatatagttaaattagataagatcagctgaaactccgatgctaccctaatcggcaaccagaaggcaggctagagattgattttctaagcacgacttaatatatcaaacttaactgatacggcattaagtatgaaaagaagaacaatatctagacaatcaagctgctggaagttttatagagtggtagatatcttatataatctaaatcaacgttgaaatctaacctaatcggctgctctctaccgacagatgttagccgattgtagattagatagctgcattgccggagattatgtaagatatatgatagctcgacgaattacataaacgagatcagagtatcataaagatggaagcactaatcccgagaacacaagttgtcataacaagttttacctcttgttgaagatcgaaaccgatgcagctcaacccgaaagtaagaactcgtcgaaataaaactaaagcaaaaagggtggtgatgagccgaaattgtattgaacgtgtgtgttcaaagttacatagggctcgggtctatttatacccgagaattacaagatatgtctataacggacacgactaatatctttaacaaactctaagatacaataagtctttacggcagacttttgcccaagcgtatctctaaagaaattatataaaacatcctaattaatagataaaattgccttctcaggactctatccttgtgcagtaatcaccttgaagtgcctcaactcaacccgatatcatacatgaagtcgcattgccggaatcggctgcatcggcttacctagcccgactcagacctagccgatcctaatcgtagccgatctagactccagccgattcctgctctgtttccgaacccgatctccgcctccgacttcgcttcgatctaatcttctttcccgatgccgatattaccaaatttggttgttaacaaatatgtaaaactatatgcatacataaaaatatatttaacaatgaatcaaatgatagaaaaagaattaataattacttaaattttttgaataagacaaacggtcaaatatgtttaaaaaagtcaacggcgtcaaacatttagggatggagggagtattaggaatcctagtcctgcaatgggcaatgggcaatggcctggagaaaattcagcatcattcagagatctcaagtttgttgatgctaatgttcagggctatgatcctgcaccatggcctgtcggcatccattgcttgtcaactaataagaactgctaccaattaagttagtccatatttagatggtgtattccattttggacgtcctggtggttgtacaaggttgtaaaatttttccaagtcttaatggcagaataagttgttctcatggaaatattttgggcttattatttgcatatcccaactgctttagcaagaacagaggaggtcatgttaagcactccctaggcttgtttcattcatgattaaccttaccataacttagtggagaagtattacaatctctgcattaaatgcgtgtcttggagaacaacacgaatattgccccgtgatggggcccgtcaaatcatgccgcctgacacgggggacatccctgtcagcggccgtcaaggggcaaagacttctgggtccatgttcacactgctcgtcgtcgttgcgcttggaggccacaaacgtgaaacagtgaaggacccaccggtcagagaccccccacttgcaccgggaggcggcgatatccgccttaattatattaaggcagacgtgccaccctcgattgtgacgggaggctaaaatctctcatcatgatcgatgggacggggccaggcgcacgccgcctggcacgcgtggtagtgcgcctgacgcctcggtcccatcagtcaatcaaccggtcatgcctgctcaggtcaccataaatgcgggtaggtgggcgctcgaaggcaaccacctaacccgttgcacatggttcccggtggaggggttcgggggagcccgaccccttggtcacacgagagggcggccgccacctagtctcgggcctaacccccctcgtgggtaaggccacgtggtgctgggggcagtctcctctctctagtcttgatacccccggacccgtatcaccgacaccggcatctatattcaatcggatatatgcaccctttttttttagaaattataaacttagcctatcaaataaggaacttagcgctcaaataatccaatctgaaattcactcctatttagatttgaactcaggaccttgagatgctacttaggtcactgcaaccattaggctacatgcccatttacatatgacaatgccaatggcattggtgctatcatgttaaaccacggtgtgccaatgatgttagtaccgtgaaaagggtttattctcggaataaaatttctgggtttatttgtaaaataagttttcaaataggctacagtcacttcgttgaagacaaccgcaatggttacatgtgtaacacgtaattgccaacgattttttttaatattctgggtttgaatagatgatgggagagctttagcaagaacaaagaagggatcatatgttactacattgagcctgaagaaaaatatggtcattttaagtttaagaactccctaggcttgtttggttcatgattattaactttacgtggcatatctcttttctaaacaacaaagtctggctaacaaaatggtaacctaaacataggcaatgttagcatgaaccaagctgtcacagcactcttcgtcatgccagatagaaatggcatacttaattacacacctgcacaattcttttttttaaaaaaagtaaattttgttttggacttctttctaccaaagtttcaccttggacctcctgttgacattttatgttgccgatgaaagcctgcaccttggtgcttgttaacatgtattttgattatttgaactaatacaacaacaataaactcaaaactaatgtatatagaacagaagatgtacacattgaatttttgccacaagttcaaaagaaacttttggaatttaagtttggttatctcacatttttcttttggaatattctcatgattttgcaacaaagtttatgaaaccacatgcatgttccaatatgtttttacatacatgagttttcaagaatgttttcaaatgcacaatttgcataatcaggaaaagtgtgcctaagagaatgtgattaacaacagcttctgagttatgttaccatctgtagaaacagagcatgtcaatagcacccaccaagcgaattctttacaaaaatatatgaacgatattcggatgagtttactaaagccctcgactctgtatactacataatcaagcactaataaaaggaaaatgccgtttgtattcgtacagaccaagcacaccagtaaatcgaaccacatagttttgacgctacggtattcgggcagatacaacacatattggaatagtacagtgaaagcttaaaacatggagaccgaaattcaagatggtaagcgagtcgacattatcaatatattgtgttatggcctatatcaactatcaagccctcgatctttgttccatcgagctttaatttcttccagttcgtcatcctgtcattgaagaaatcatgttatttagtcaatcctatgctttcattccagaacaagtgatttctctatcctgagttaaaaggacgttttagaatcaagtgaacaaatacaattacaatttagaaagcatatttatttacgtttgcaaaatatatatagttcatgtgctcagtggaatttctttagtgtgtcactgatgcataaagaaagaacatgaaatcactttgaaagccattatgaatagaatcgcaactggtatgtcaacgcacctcaaaccgatggtagatccactcagcgtataagccatcaaggaagttctgtggtgcagaattgttgttcatggaaatcactttgaagaaaggctggaaggagtgcttgatattagcattgtcccactgcaagtgctccaacaattcttcctcacaatgaataaccttcatattacatgggacggttgtgaaaggcagtgttgtcagctggggacaacccaagatttgcaagcactccaatgaaggaaagtgaaaggatgagtcgcagatagtagtcaaactctttaaataaattaaagtaaacctttttaggcaaggctgcgaaagagatattctttctttttcatctgtatttggcagattatcattgttagaagtgcttccaattatttgctgtagtttttcgcaattatatactatcaggtcttccagataaggaaaatgttgaacccacgatatgtttgtcaagctaatgcatgatataaggtccaatcgtctcaggttctgaaagagatcctggctttcaactccttcccataatacatctgtgaagtaatggccacatatgtagagcttctcaagattagaacttcgatgtggcctgttgctttcaaatacaatttgttcctcatgtgtgtagatgtataactccaacagattcctctgtatcagatcatttccgaacaaactgtctgaaaatgcaaaccttttccattcgtctagagactttgatttaatgattacacagagggatctgacaggtaagctggttttgcagagcatattcaagtattttatcttgcctacagtaattccaagagctttcaagtctgtcatgcattcaagagcaccaaatggtggttcaaaagaagcaggttgttccaactgcaacgagcaaaaatctgcaacctgcagtctggagagctttgacagaataacttcgggaatctctctgataggatttgacctgagaagcaagtactgcaacttaaaaaggagtccaagctcttgaggcaagtctttgattttattatctgataaattcaggtaatataagttcacaagtttgcacacttcactgggaatggttttgagccagttccttgagaggtctagatattgaagagatataaaaaaacataagctactcactgaacttccatgtaaatcattattctggagtatcagcacagtaagcttggtctggtcctcagaaatggcaggcagttgtgccatttcagtgcccactgataatatccgctccgcattacaccaatgtgatactgtttgtacaacccatttattcttctctcttccttcgtcaccaacaatccaaagtgccatgtcacgtatcacatcgtgcatttttacaagcctgtcatcatcagtttcctccaaaaggcacttgtctaccaactcacgaattcgtgcatatcctgcgttgtaacatctatgaatatcctcctcctctactagacccagtcccatccagtactcagatagtttgtttctatctaacagataatcatcaggccataaggcgcatgatgtgaaacaatctttcaaattagtatcacttagatattcataactgagtttcagtcgagcaaacacactttcttcattgcaaactggcccttcaatctcattaaggcgtgattgctgaagaaagtcgatgcaattctgccattctcttggatgcctcttggtagacatggccctgccaactacaataagagctaacggcagtccagcgagttcatttgcaacatcttttgccagtttaagtacaagggggtgattttcaataatttcagtaccaacattttccttgaaaagatgccatgcatctgtttcatccaggcaatctattttaatcctttgcccattcttgacacccatttggccacaaacactttcagagcgtgttgttagcaacaatttttgtttgtaattgccaattgagataacttcgtttggaatcccaaccttatcaagatcaacatgttcccacaaatcatccaataatataagaaaatttttacttttgagaaattcatatatgataactgcctgagattctgtgtcatccttcttcaccagcatctgttccccaacaattgcgtcttgaaccttcaagtaaaaaagtacttttgtcatttggagcaaattgacagagagcttaattaaataatgttgtaaagtatttaaaattagaagtatatgcagttttttgaaatatcaaaatgttagctggctgccaggagcccttatttaacgctagttattactccctccggtcagttttatatgctgtttccgacagccaaaatatgttatgtgtaagtcatttcgttggtctgaaacaacaaatatttccgtccggagggagtattacatgatagtagtacctgatggcagtcaatatgaagactgttagtatcctagaaatcgttgctcctataaaacaaactataattttagctggagctttgaggctccatgaattgctcattaggtcgcttaccctagatggtttgtaatttttgtcttttgggcaagctggatgcattcatctttgcaacaaatatactttagcaagatacagaaacatgtacatcaagggtcaacagttagcttcatctaattagttaaagacaaactttgatcactccctcgttaaagggagcacaacatacctttgcaacagagcaacctttggaagcagtaactcgaataacaacatcaaaagcagggtttttgtgaaacaagttgttgatctgatggagcagatgtgtctttcccacacctccagggccccataacccaaccttgcttacagcctcatccctgatgaacttgacagcgaggctgcgataccgatctgtaccagttaggcttacgtcagttatgggcacttcagaggaagcctgtggcaccatgacaccatattcttcaaacatgccctcactgtatatcttctctgcagcctgacagtttgctgctgcactcttggctatcatgtagtagtttacacagatacaaggggacaggctccccatgcacttggtcctcttaccatactttgcctggattttttcagtctccacacatacatgctcagcgcgcttcagccatccttcaacttcattcctccgctgcataccttttcgcatagggctgtccaacttggtctcaactagggatgaaaacggtcgggaatggtcggaaacagtacattattttattacttttttcgaaaacgagcgcaaacggtcaggaaatttctatatttatgaattcatctatttagtgtcaacttcaatgctacgctgacagaaattaaaaaaactaaaatttgaaaacggtaacatcggtaaaaatattattattatattagttttgcggaaacggtatcggtacggtcgggaaatttccataccgtttacacccctagtctcaacatcgctgagcctctctcttaaacgctcggtggcagcttcgagagcgcgcacacgcttgcgggctttgaagaagtaggcggcgtactgtttcgagaggcgtatcaaggagatcaggatagcaccagagcacttgatgccgatgatctccatggagtttgtggtattccttcaaccaggagaattttgtctgtgtttattaagagtgcaagaaccaagaagaccaaaaagttgtcctgtgttcaataataaggattgggttcctatctaactgacatcttaagagaaaaattaatgcaatagcgatggcaaatattattacatgaatagaagattcacataggtccaaaattagatggttcattcgatcatttaacacctaacagatgtattctatggaatcaatctgaattgatgagttcctttctggtgttaactaagaagaaaactgaatagttatcaaaagcgataggccgcacatagcttcaaacttttcgacatatgtgaagcctattgttttgttgatagttcatggtattgatgactaattaacgtgctttcagatgttattagtttaacatctgatggatgatgatgcatgcattcagtgcaatttatgcaggaattcctttcttactgactgagtctacaagaaaaaattaatataaatgacaaacgatgattgaactcacacgttggttaattctaaactagacagctaactataatacatctggctgcaggcatcgtatagctggatagcagtgcgtataaattaaatacttaattttagacttgggtgcagtgtgcatactcaatattaccattacaataatccataagaatcagttttttttaaaaaaaagaacatgccaactgaaataaaggataatggaagttgctggttccgtccgtcgtcaattcctgcatgacttaagataaggatagacaacaaatcgagctcatgcttgaaggcctcgttgttttggcttatgcttattcctataagtcaaattttaaattttaaaacttaattttgaattctactctttgtttttttatcgtactttattttacaacatgcttatcagtcgctaagaacattatattaaagatttgtacatggttagtcttttatttggtaataagttattcatataagcacatgaataagtgattatttatccaccgacacatatatacaaattaaattggctcaacccgttgcaacgcacgggcatattttctagtacctaattaaaaataagcaaggtttccctaaaaaaaaatttcgtccgtctttttttatttttcgcccttttttctttttttttctgtccgttttccttttttttttctcagtctgtttcttttccttctttctctccgattctttttctttttttatccgtctgtttttttccttctttccgtccttttcactctttttcttttttcttttttcccagtttttccgtctgtatttttcgcctttttttccatctgcttttttctcttcgccttttttcattttttccctctgctgttttttcttaatttttttctatgcctttttaccgggttttttcatatgtttgttgctgtttttttagttgtattttctcgcacgtggtaagcatttgtttttttatgtgccatattttctacgcccggctgaacactagcgtcgccggtcgatctgccttcccatgcgttccctcttccaatcgattgccaaaaatcaattccccgctactcccttatcattttcctatgattttccttttaacgctgctttaattcactgaatttaatctttatttaaaaatcactgtttttatcccgatgtttgtcgctctgattttaataaaaacggaaagagaagatcgagtgtatcaaaaaccctcgaccaattttgaaagatcgagaaagattcgaccaaatttgatgggaggatcgattttggcatgtacagacacgacattgtctttcggaggttgaagactacagtcggatatgcgagccggacctacacagctccacttgacaaggaaggaacgaaatgagcttttggtctaaaaccaaagagtaaaatatataacgatccaaaaatatttttacccgttgcaacacacgggtattttttctagtaataataataatagtaagaaaacaaaaaagagctctgacgacgtgtacgttttcgtgtgtcgtttaattatttttatgccgagtctgccgatgtttgtcttgataatttgcttatttttttctatgtaagaattatcgatgatttatgggtgaataggtaatctagtctctcaaagttcactaaaggcacaatttaaaccctgagatttaattttatgcacataagtccacataagtcctcttaagtattcattttaacttaaaatcatctttggaccaacttaatatgcctcatggataatcctaatcaacatttgaattaggaaatgtcccttttgctcctaatctgcatagattagaaaattacacaagaaaagaataaataggacagaagaaaagaataaataggattgtgcaggtactttccattatttaatggctacggtatacataaatttttttattgtacttaaattgctatgcattacgtctaagaaaattcgttgtgcgtaattttttttaaaaaaatatcatataattgttggatatatgtccaaattaaagttaggtatacagaagtcccatcttacaatttatttttcttgtatatgtggatgagaggtattagagtcattattaatagagatgcgcatgactttttataaagagagaatctcttatatgccactgaaaatttgtttgatcccttggatgccattgaaaattggcacttcccttatatgacattggttcaaattttcgctccctctcatgccattgccgtccgttgactggtagttgactgttgataggatgtaatcacttgtcatttttttacagaaatgacaaaaataccctttggcccaaacatgagaatatggcccaatcgtccaagtgggccaagcccaacatccctctgatgcaccatgtcagtaagcctgaacatgtattttggtactgtgttagtatgcattttggtactatgtggtcatttaaacagctccctataatatttgttgcatattctgtgctactgtgtatatctccatgctctagcaaacaatctgttggttattttagctatttagccgtgcattacaaacaatgtgcaattacacattatcttaaatgtctgtcagaagcaatctattatattgcttgaatgttttgtcatactgtgaaaaacagagaaatgttgtgctccctagtaaatattgttgaagcttttgttcgagaagcacatggtcaatgtatgtggaaaatacattaatgccataacagattgctttgttctactatgaaaaacagagaaatatgtgcctcaaaattatgtgactgaaaaatattcatatattcaatatatagattaatgctatacattcatatattcatttattccaaatatatgtgatgcctagctaaaaggtagtatataactgatatactaacacctactgcatgcctatcaactcaagaagggcaaatacgtcatttcactctacagttaacagtcaactaccagtcaacggacggcagtggcatgagagggagcgaaaatttgaatcaatggcatataagggaagagccaattttcagtggcatccaagggatcagacaaattttcagtggcatataagggattctctcttttatgaatgggttggaccagatgcattgtttaataattaattaatacatgtgggttggaccacatgcatgcaccgttttatttataaatatatagctctgcaacgcagcacgtatacaggggagagcttttacaagaaggcggaaggccaccacgcggagctctcttgctcttccattgctagttttgcttcatctccctgcctgtaagaggtgcaaggtacatttttatattgtagtgtatactccctccttcctaaaaaggttaattcttaaatttctactccccgatctaccatcagtcaaaaaatacagaagtttaatctctggagtatatatgaccaatatcctaataaaagttttatttaacgtttcattctcaagttatcgtattcggacgttcaattcttaagttcttgcactgtatcccacccacctactaagttgttgtaccgtaggtacaatttactcataaaataattatgaagaggaagagggaaaaaattcatctaaatcaaactaggcttaggctatttccaagactatgaaactagttaaaccaaggattgttttctaatttgtactaccagattttagaaatttcatattttttataaaaaatatgttgtataaattaaagcatataaattgacggtagcgctattctatgctctacaacgcggaatattagttcaagcgccgcataacgccctctcctttcagttttccccttttttactccctcacctttcctccgcatcccaccttttctcagttcatttttttgttttttaccactccaccttccgtgtttcttttttctcttttcatctcatccgtgatttttctgtttttctttccttctctgtagttttttctgttttctgtttttctttccttcttgtaaaaatattaaccagatttttttgtttttctttccttctctgtagttttttctgtttttctttccttctctgtagtttttctgttatcacgtccgtttagtttttctttccaagttttcctttttctagtatctccgcacgtttcaaaagtaacgaatttactcccagcctcccacatctgctcattcaaaagtaacaaatttactcacatgaatgcctccacatcgtatgctgccatacctagatggtcgtaaaagaattattaccagcttacaacgctggtaattcttttaccaatataaatattgtttagattttgtggtccatgagtaaaacaattactatcttcctcttgatatagcccatgatcttgtaaccaccgtgttgtaatatgtttacatgatcttgtagccaccgtgttgtaatatgtttactgatgtgttcaatacacagtataagagtaaaaactgaaatttcatggtctacgagtaaaacaattatcaccttcctctcgatatagccatgatttcatagccaccgtgtagtaatatgtttactgatatgttcaatacacaatataagagtaaaaactgatactaagagtattgttgatctgtatcacaaaatagtcgtatgaatgaaaaaattacaggctcaatcacacacaagcgataaaattacgccaaaaaatgattcagccaaaaaatccatccgatggctttgctggatcttgctatgaggatgaagagcacggtctgtgccttgtgactggtagtggagagggcaaccgggtggcgagcagtagtcgatgatggaatcatggaaggatgcgagcagtagtcgacgatggaatcatggaaggatatagtagtgtggtatagagatgagctcgacgtagctcagtagcagccatccatcatctagcaagcacgaaaaaaaatgcaaaaacattctctttcacgtcaatacgaatgacaagcaaatgaaaaaaagcgaacaacctccatcaccggtggactccaccctatcctctgcggccagccacatggagcacgatgtgcaaatgtaggacctgtgcagcccatcaattgagatcaggtaatactggagattgcacgttaatttgatttgaaaaaaaaattagagcttcatgcgtgaagttgaaggagagtatgcagatgcaaatcagagtgttatttccttacttgtttgttatatcaatatcgccgatgtggagcagccgctggttgctgctattggcccaggtgaacacctccttgctggttaaggtgatgcctagcgtttggcagtgaggtccgaagtagtgccttcgcctcaaccgctgccagccaccgctcgctggccaccaccatcaattgccacggtgtcgtcgtcctcctgcatggtgtgtcgccgatctgtgggctgggctgggatcgattcagatcccaaaaaaaggaaaaaaacatagtggggcgagagtggttggttgggtacgggataaatagaatatataccggaagcagagaagttgttttttatcaaagtaaatcatttactccgataatggtgggagcacgatgcgggacgtggggtgggatcggaagcaggggagttttttttattatcaaagtaaatcgtttactcgaataaaggtgggtggttgaggcgcgcgataggagtaaatcgtttactccgacaacggtagaagtgggatgacgaaacgtggggtggggtgggcctgggctgatgcatgtttggcgctgcgctcctaacagtagttctaataaattgatttcaataaatttaattggtttttatgtaaacttaagcatattttttcatattattttcaatccaccttattttaaataatattttataggatcgtagggatcgtagaatcaggatacaaactaagatttcatatgatcgtgtgtaaatgaatactaagattagaataccataaaaattaggatactaggtaggatcaatatcatttcagcttggtacgattatagtatcgtaaaataatataatacggatcgggatactgacaaccttggttgatagtaacattaggggctagattgatctcatttcatccaactacatctaattaatcccatatatcgctattaaatgccatgactaacctataaagtcacgcaataaaattgtgtactggagggcttaattcagggtggttggagcaagggtgagtgaaggtaggtagtgtgaaaattaaatcagaggtgattagtaagaatacagtactagtatatttcggatacagggcctgtttagttaaaaaaaaacttttccaaaaatatcacatcgaatctttgaacatataacatatatggagcattaaatatagataaaaagaaaaactaattgtacaatttgcatgtaaatcgcaagacgaatcttttgagcctaattaggccattattagccataggtgctacatagtaacccacatgtgctaatgacggattaattaggctcaaaagatttgtctcgcggtttccatgcgagttataaaattagttttttcattcgtgtcaaaaaccccttccgacatctgatcaaacgtccaatgtgacaccaaaaaatttttatttcaccaactaaacaggcccacaatttaaacgctataaaaaccaatattttgatatggagggctacatagataaacgaatagagatgtaactataatagacatgcaatgttgtcatttaattttcaacgaataaacgagtagataccggttagatgatgatcaatttgaaaagatctaaaagaatattcttaggagatgattaaattgggatgtggatggatcgagtacgtatgtacaggtagatagactcgcatccatatacttcctccgtccataaatgtttaacgccgttaacttttttaaatatgtttgaccgttcgtcttattaaaaaattaaataattattaattattttcctatcatttggtttattgttaaatatatttttatgtatatatatagtttaaatatttcgtaaaagtttttaataagacgaacagtcaaatatatttaaaaaagtcaaaggcgtcaaacgtttagggacggagggagtaccatatttccatctgaccttgtttactttgttaattaatttgctcacacatattgtattgtgcaggcaacaacgatgctaccgagttccatatgctccatgggccaaatcccaagaacttcaccccattcctatgggatgctgccaaagcagatgagcaaaggacatcctcctacggtcactagaggtacaatagtttttattgggattgatgttacttgacatgaccaagtccctctctcctatactaatcgttctaacgtggagtagtaaaggcaggagacaaattagctttaggtaaaaataaccaaactacccttaattattagttgcagatagttatttcaatgcttacgaaattgtcacaaaataattgcaccagccatgcctgctacccaaggaatatttctagcatggagtacaattatttaaacaaaaagttcgaataccccctaaaatatggcgctagttcgaattatcccctttgaattcaaatactaggcattttacacccgagttcttaaatctagacaaattacccctaatttaatcatgtgtagttttcagcttacgtggcacacacatggcatctgtcagaaaaacaaatactccgtaaaaatctggcggggcctattgtcggtgatgctttttttcctcaccctcaatgcctcgctctccaccaacaactcggaatcgaccagctatccgccgcccgtgctccaccgacaaatatctccttctcctctatacgatgaacacctagaggaggaacccaccgatagagggtggtgggacaccataacctacttgccttcctcttcatttcttcccctcttccgagcatgcttgggctttagatgctcaccgctgcatgccatccacccgactccctcagcgaagaggtcgacgcagatccaccagctccgtgcaggaatgagctcctcggcagcgacaacgatgagcttgatgcctactggcctctcctcaattcggcactgccggctatcaatttgatggggcggcgcctcgaacagaaggctaaggagggagcagaaggaggtccaggagaggcacattcgatggccagaggaggaggtggagccggtggtctcgatcagagtggctccgtcgatctagaccgcaccagtgcttaagcccactcactgaggtccgtggaggcgaattgcctccgaagcccaagccaaccaagaggaggtggtgtggatccgaacttggttcattgtcgagagatcgagtttgctctgcgatgggtggatccatcgctgtgatgttgccaccaccaaccaccgccattgttccacctctaacatcattcgccgccccgtgcacacttggcccacagccgtcactctaagtcccatctcggcaccgtaacttgggaataaggggagtcgagaggtacaagcccctcctaggcactgccctcctcatcggcaagcgcatgcaatggaaaagctgtgatgcgatgcatgcgctagcatgcttgtgatgctgaggaggaggcggcgtgactctttgtgctaaggtgatctttgtgttgatttgtcacgcccagaaattcactgatattttccgaacttatttgtgcataaaatcctcgtccaggaattagctgaggtacacaaactgacaatttaatatacatattcatcaaaataactaaagagattaacacttactgaagaggcacttagtccacacaacaaagaaaactgcagcggaaaataaaatctagcgaagctccggctccactcccacaggcagctcaactggggtataagctaaacgtcttttccctctggatcctttttcttcaactgaggtttaattgattattgcaaggtgagcatatgacatactccgcaagccacacagcaaatatgcaagtgcacaaggatatcaaatgatggcataatataggctcatttgcaaaagcagcatttagcaaacatttaagagtaataaaacagtggagtaattaatcatcaattttaatcaacactgaacagcacacccatgctggtcaggcccaaccctcctgaacaaccatacccggctgtacagatctaactccaaaccaggagctaagcaaactattaccagttatagcatcaataattattgtgagaggtgtgactctaatcatgaaaaacattgctcaacccgcccatgaccgcgggcacggctattcgaatagttttactctggccagaggtgtaccactgtacccacaagacacagccccaaaacatgtcaccatgctctcagtaccaccacggtacctcggaacgggactgtgacagtacccttcgcacaacacaacccaccacagcgcatcattcctggatcataatcactccctctacaaccagaggcatggactccctagcgacccccacggacttctcgccgcttctcagtctggtgccccgcaatgaaccatgctatataaaaaggtaaagccgttgcccacgctggcttgtggttggtacggttaatgtctcacatcagtagctcgcgaaccggtccttaattgtcatgagcacggccttcaaaaccatgtgctcacaacccaccattatcaagttttagttggcaagtaattaattaatcaatcacgattgaccatcgtgagctaccattaaatataacaataagtgatagtgtaacattagttatcccaatcatgtgctaatatttctaagcatggctaagtaattatgtctaacatctagcggaaccaatatataaagctcaactagtcaaattataataacccaaggtatcaaggaaaagggtaatcaatgcaaattggccataacaaaggaatagattcacaccacccggtgacattcgagaataaatgtacagttgaaataaatagagaatttaaatataggatcaacatgctcaaaggaattgtgtttgggatctgtatgacttgccttgcaataatcggtcttcaattagtcttctgaacaacttccgacgcactcacgaaccttcgcaacgacggaaacaagctaacacgcaaaacgagaaaaaagactaataaaaaccaaataaacagtacataaaagtaaacaaacatgtagatcataattttaaatgaattatgagacttgaacggcctcattctgacttcatatgaattagttatgaattttacaagattaattccaattaaacctattaaagaaaagactattccaaattaattaaacaatttacaaataatttataactgaaatataagactaaagcatcctccggaaattattggaatgaacttagtagacgacatatagtaaaaacaactaatatgccattgaaaaggaataacatgatttatattgattttggacagctgagatcaactttgacctagttgaccaaaattggatggctcggattgatctgatctaaggttttagatggctgccacgtgggatctgagagacggcgtggcacttaggtggcagcgacggcagctgacaaggcaatgacatggtaaccacgcgggatcaacgccggcggctctattcggcggtgaggacggcaaatggcggtacaacggtgaaaaccgagagcacggagaggaagaggaggacgcgacgatccttaccaacacttacgcagcgatgaacagcgaaggagatggccgacgacaagctccgaagggcggcgagatactggtcaacgatgacagcggcgttccagcgatctttggcgaagacgagatggtggacggtgttctccttgcagctgcgaatctaatggaggcggcggcgaccgaaggcgacgacgggagtgcaaacatgttcatggagtattgcattggtaagtagaaagttgagcactattagcgatggtggcctccactgggactgtcctaacttagccatatattccatgctatacttacgacaccataataaactttgttgttcaagtttggtgtccttcagggaagaacaaagagatggaggtgaccaaagtagttttttaaagtgttttgagtagatttgtggtgcagtagtgtagatacaatttgtttatggtgttgatcattactactaaattttttatgatatagatagaatactctcttttgaaaatgaccgagggtaatcgttcgatgatattttaaaaaattatagctcatgagacataccaccacgataatatccatatcatcattttattatttatattttggcaaatatgtatagtgaaatagttctaaaaatataaaaacattttgagaatcttaatctcaaacaaattataatttaatcagaactacttgaaaaacacaagtgttgaagttattattttctaataatagatccaatctaatagtgtaaaataatgagtccaccaatttaagtgaaaatcaacggtgagattatatagtgcccatgtggtggcttagaagtgagtgccacgtagcgacttaagagcatccataggaggtttaatggacttttagtatataatagaatttttacatatgttgatttaaattgtgaagtgatattgccctccctaaaatatgttgtgatttttttgaaaagttatcatacatatgttggcctcatgtgccgtggtgtatttaggaccataatataacttttataatttaattaaagaaatacaacatgatcgcaaattggatatatataatttcaaaataatttagaagatggtttaaagaatatttattgggtattttatattttattatagatattagtttaactatatatatttatattatatttctgaagtaatatatttcatatttatattgtagaaaaaaccgtccatttttatatatctatgtttattggttgtcttttctatctatgttcgtacgtatggttttttcccgttaaaatcgcatgtactactcgtacgtcgtaagtactggagaacggtagtaccatagtagcgtttgtatctaaacagaatgaagttattactttcaataatagatgcaatctaatggtgtaaaataatagatcaacaaattttaatgaaaatcaacggtgagattatatagtgcctatgtggcgacttaggagtgtttataggaatgccacgtggcggcttatactacaagaatatatttaatctgtcacaaaatttccgtgatattttcagaaatcgtcatggatatgcaactattgatacaaggcccataataccgtgacagtttatcgatttcatcgtaaaccggcccaaaaactgtgacgttatatcaatttcgtcgcgatttacaaatataatattaaatacttcaaaattatgaatatcaagatctacaacttttgttttggtcattttgctatatgactctgtttcaataatttcaatttgaatttcaaattatgacaacttcaaacaacattttcaaatactaaatgatttcaagtgaaaaagtcatcaacaacaaaatatctgtaacttttattttgatcatttcttcatccaatagtaatattgtttataaaattttcacctcagccctagtggccgtgttttgccctagccgacggcgtacggtacgtcggtacataccgtggattaatcgatctccggctcaaattaatcgagccaaatcagtgcatgcatcaatgcatgggttgctgatgtgcacaatgagactcaccgatggttaaccggggattgacgaagcttggacagtgaagtctactccgggaacggctcaacgtacggcggcggtggtttcgcacggacggcgttggcgagttagggccatcggctaggaagaaggttagaaaaacatgcgcaagtgatcgatctattgctcaccggttgcggagaaatccacggctaagcttgacggccgagcggaggaagacgtacaatgggcgttctcctcgcttgggactcatcttggggttttctactcctgggagggatgcaagcttggtggtgttgcagtttggctagctggaggtggctcgagttagcgggaacggcgatgtcgatatatcggtggctgcagctgaggacgaggacggcgttcccgttgttcacggtgtcttcttcacgcagacgaggattggcattgttttctatttattccagatggtaaaagacttcttgtgaaggaaacagaactaccattttccttataagactacaatgcaccagatactgaatttctccaataatgtagccagaccaaccaagttgtatagattaaacgcatatttatcagatggttgccagtcggcagtaaagaaaattaagtgataatattatttctgatatgataatttcatttttaaacctaactaggaagatagcccgcgcatgtgcgcgggcttttaatataatgttgtttgaattttttttacgaatatttgcacgcaggtaatttttttcttgaaatattctttgattctatactaaacctgtttttgtcaataatttatttaggatttttttgacagtggttatgattttcttctaattacccttgtaacatataaattgtaaagtagaaatacttcaaaccatacagtcttgaatttatgagaatatattgtatggcaacaatggagtttctaaactttaaataccttttctttttttgtatagtgctccctctgttttttaatatataacaccatggacattttagatatctttgactattcgtgttatgaaccacaaattaatgttatgagagagtatatttatgaagagtgccatttatatattgatttattcggtttttatgatttgtttgcatatatgtggaataatttagctttgaatatttgtaaaatagtatatttgatttcataatatatactaagatttttagaaatttctaaggttgtttggatagcatgtaaatgttgtggatatttgaactattgagataaatgttagtgcttattattttacatgtaagaacatatagttggatccatgcaactacaaatataatattttagataaataccactactatttacaatatcggctatgtgctactggaatttggggaaattagaccagtgccactccatcacgttttccgtaaaaaatctctgttaccctcaactgcacgtgggacctaactgtcagttccaacttcacctccctcccctctcttctctttccccttcctctctctccaccaccgtcgttgacaaccaccgttgcagccgccatcatcgaccacctccgtggtgggaggcctcgagagccactaccgttgccactgttgtcttcgaccccatccatggtgggagggctcgggagccgccgccaccatcctcgacgccaaccgcggcgggaggcaagggagccgccatcctcaaccccatctgcgcgggagggctcggaagctgttgccaccgccatcatcgtcgttatcctcatagcagtagcggggatggaggaagagatggggaagaaagaagagggaggataggggaagatggaactcatatatgggtcccacgtctgggggtctgacggaaaacatgatggaattgcacagtctcagtttcttcaaattttagtggcacgtagccaatatcataaatagtagtgacatttatctagccacatttatagtgacatgatccatttaaccctaataaatatatgggtttaaactattgatttaattgtaaagctagactacaaccattcaaattaagtctagcaaaggaaaaatagagccaagtgccctagctagattactaaacattttctatcatcaatcagaccatcaacctgcttagggcctctaaatataggcttatgcttatcggtttcgatttttaagttagatttttagcttatatgccggtggagtcatacatctgtcttacataagccaattttttttccaacctagtttttttatttaatagtagtatataaagagtggcttatggctttaaaaaaaccaaaaaattgcttgtttgtttatgagtggcttatttttctcttctaattcgaagatcttttatagatttttggtgtgcatatgtatgcatatagatcatccataactgtgtggctatctagctagcataaaaatctatgcgtgattgcttggacagagttgggtacgtacgggacgcaggcagcggtatgtactgacatacgtacagggatgaaaatgaccgagggtaatcgttcgatgatattttaaaaaattataactcatgagacataccaccacgataatatccatagcatcattttattatttatattttgacaaatatgtatatccatagcatcattttattatttatattttgacaaatatgtatagtcaaataattctaaaaatataaaaatactttgagaattttaatctcaaacaaattataatttaatcataactacttgaaaaacacaactaaattgtgttgaaattattattttccaataatagatccaatctaatggtgtaaaataatgggttttaaagattgatcagatggttgataatagtgggcctaccgatttaaatgaaaatcaatggttagattttttaattgccacgtggcaatttgagagcgttttaaggagtgccatgtggtggcttgagaatgtttctaaaaagtttaatagatttttagtatataatagatagatagatagatacccttgtgcaacatgtccttcaaatgatgctacatccctcaagatcctgcatttatagtaggttgaatcaatagcatatggaaaaaagaaaaagggcactgctggcatacatgtaggattgcacaattctgtatgtttcagttatcagagaagttgatccttaagcttgttcgatttggagggaactgaagggagattgaggaagataattccacaccacaatagttatggaataaaatcctctctaatccctctccttggggattaactgaacatggcttaaatagaaaagataatgacatacaaagcaatgggattgaagaatggcacccacaactgagtttgagatatccaattatttatccaccattagttcctacagtagcattttgatggcgcctactagcagggggaaaatctggcctattccagccaaaatcaactggaatattgcttatcaagtactccaagcttttagcagagggaagtccaccttggtatattttaacatatatttggttattgaacatttagaacatgcacaatatttgtgcaaaaagattataagaaacttttggactttcagtttggttcatctcacatttttcttttgcaagtacacattctcatgttcctttttggcagtaatgtttgtaaatccacatattatacatatgggagtttttcaagaactaggaaggtagcccgcgcgttcgcgcgggcatgagtcgtacgccaagtttgaggtatttataaaagcgacatattaacaggagaacatctgccacgatttctccataaattatttttgtcagcattaatttattctttaataatattttaacctattagatttatattatatcaaatataagtagtatctataagtaattatttataatattcttcatcattttaaaaaaaaggtagatttattttctttagaaaacatgtcaacgaaagtaaaagtaagtgtaaaataaaaattaaggtgtttttatttttttaattgtataatatattatcataatatgttaaaggatgaattgggtgggacattaagctacacgaaaaatgtacgggtttatatagtctaatatgattgatatattttgagaggcgatctacctatgaacatttcatgtagagtgaatgagaggctccacgcaacctagcaggaatacaataacgtcgaaatatcattgcactgtaatatttttggaatttcatgtaccataaataaatacttgttaaaaggtataggagcgcacacatgcatgttatgcagtgagccagacagagattctgatagactttgtttttttcccaaaagatagatatgatgttataaaaattggatccatcggtttaaagtggaaaccgatggtcgattatatgagtgttttttaattaatagaatgccacatagcgacttagaagtgtttataggagtgctaggagcaatcatatgtatgatttagatgctatgatcattttaagatcatttatttatcttttaaatttaaaatatcatttatttacaaaagcatcaagatcaattcgtttatgtaaatagcccccacgtgtatgttgtgagaaattaataaagtttttttatgaagaaattaattaagttggtagaaagtcattagatgtctaacaatgtacttttaatgggttagtttcattaaaaaataagctagcatattttgattttcaatgacaaattttaatattttcttttatttagtggagcactcaagatggatgtaggtctagaatgcaataaattcaatatagatattaaaattatatatttatttgaaaaataaaaatagatatataatttatggtacaaataattgtaaagactcgtaaaattaatccggcctttattaaaaagtctaaaatagcacgtttaagtataaattagttaatatatttctttgttagtttaatgcgtacagaatgtaacgggtataacctttataaactttatttaaatagtgtatgatttgaaaataatgctcaccataaagggttcacgtatacctttatttaatgggtaaaaatatagtggtgtaaactttattttggaaagaaatatatcataatataatcatataagttatgattatataaaatttaactatattaactgttatctcgattatatatatatgaaaagaaaaaggagggaaggagatggaaccgtacgtacgtacgtacggatggtgtggaattgtacgttttaagatcaatctagttaatctgacggtatgtactagtggacccactattttaagtaaaaatcaatggatagatgcttttcttttttctcagaatttctttgatttctctaatttattagagcaccaagtggcggcttaggagcgtttgtaggaagattaatggacttttagtatataatagaaatagatattttgaaatgaacaattgaataatcaggaaaaagccgagaatgaaaaccacttccttctacatcatcaccaacaatttctgaatcatgttaacattcatagctacagattatgtgaacatcacccaagtgaactctttacaaaaacatatgaaccttattatagtgagtttagtaaagcactcataacaggcataggtagttcctatacgtactaatgaatcacccataaaaagcataggcagtttgtatacgtacgtacataccaagcacaccggaaaaccaaacacgtagtttggacgttatggtctcgggctaatacagcgcatattgcaatagtatagtg

SEQ ID NO: 8411 - DNA, 25661 bp, Oryza sativa
  unsure (1)..(25661): unsure at all n locations
atatcaccgagaatgtcacggaggaatattaccgaatcccaatccccatcggtcaataggagaccaacgagctctcactttgctccttcaaccatgtgccctcgtgctccttgtccttgttctcctgttggactatggtcgtcgtcacatagctgcagccccatcacatgcccttctttgccgatctagtttatttgcccccacttccgtcgccgtagcggcatctaaggcctggtttagttctctaaaatttttatatatataagcattaaatataaacttaaaaaaactaattgcacagagaaatcacttgatgaatcttttaaacctagtccatgagactacgattagccataaatgctacggtaacccacatttgctaatgacagaataattaggctaaaaagattcgtctcgcggtttccagacgagttatgaaattagttttttcattcgtgtccaaaaatcccttccgtcatccgatcaaacatccaatgtgacaattaaaaaaaatttcttttcgcgaactaaacagaccctaggcacaacaagagtggatgaaatagagatgaggagaagatcgagagagggagtggcaaatgacatgtggtccaatttgtagccaagtactaggtgcagaacaagtcattaatttcaagtcctctccaattaaaaaaaacaaaagactagtttttggcatgtgttttcgcatgcccgaacttttacggtgactagtggcaaacaccatattttttttaagtatctataacaaattttggctagaagttaactctagttgaccaattaacctggaaattttgagaatacgttgcgtcaataagcttgacgaataattatagtgacgttttaataacaaaatatatccaacttgtcatgagatttctcgtagaaaaaataaattttgtcatgacagattgagagtttgagatcagacagcacatcgcattcataacaaacaccattatactactactattacattatagcgaatgatatgcatttcagacatatactgtagcacgtttaccacgagcctttcggtcgctcgataagcatcgatctggatacagtgagaaaatgaacatggacactttttcgacgaaacaatgattttctttggtgaccttagcccaaggaacttcttcaacgtgatttttttttccttttggcagggtatgtatacatatatatagattagtgagatgtgactgggaagagggccagcaagacaacagcaaattgcttaagggcattctcaatgtataaaatgcacgcagatcataagatgagacccacgattatatatgatcttttgctaatagtatagttacaacaaatatctgctgctcgttctgttggtgttcacggaagcggcggtgcctgaaagctaacagcgaatagggcctcttgttcgataatgcaacagttactgtcacaaactgttcgaattttacatactcattactctctcgtctcattaaaaaaaatgatctgtctcattaaaaaaaatcaacctatgatgagatgtgatgtttctaggtacaataaatccgaatatgcatatatgttttctaatacaatactagaaaacatcttgcctcattctagattggttttttatgggacagggcagcacttgtgtatgtttggattttgcatatcatgataattcagactttataccctcttgtgcacgttcataacgtttcatattctgtaaacaattttatgaattgaacctgaacgagaactaacttatttttgggtatgtttagttcacgctaaaattggaagtttgattgaaattggaacgatgtgatggaaaagttaaaaatttatgtatgtagaaaagttttgatgtgatagaaaagttaaaagtttgaagaaaaagttgggaactaaaccaggccatatggatgtaaacatattcagaacacaaatgccactaggctcaaaagtccacagtgctatagtgtcacaccacagtatgtacagtgattgtctgattgataggtttagggatcttttttttttctaaaaacgtttagggatcaaatgttgccaaagcgaccaaagtatcacaatagacaaacttgtcacaatcggtacaatgttgcacgatagactatgatgtcttaggcctgatttttttaattagctgaataattttataataattatttgagaatacaaacaaatgcaccaaaactattagaaagcagaaaaaataaataaattcaaatatagagagttttttcaatacttatactgtttagaagctcaaaaatatgtccctctattctttcattccttaaaaaagaatatcgatccttaaaattaaggtcgcatacataatttgataaataaatattgtatcacgtttcaatttgtacttcgtatcattaattattggtatggaaactgtccaacaaatggtgatttcttcatcaatagatctagggcgaaacccagtaatcaggtatgtgggtcatcggtcgttgggtgaggtgatccaaacttggaagcatttagtagaaattaattaaaatatccacaagccatgcatgataattgtatgaaaaaattccatgtgtacctctaaaagttcacctaattccttctacgttgctgaattttgttcatttccttgcatactcttgaatcttgaattttagtttgtatccattctatgtccttttagttgactgtcagttggacgttaaattctcgtgtaaaagtccatttttaccctttactatcaagaaacataataaattaatggagtatattgtttgagtgtagaaatttgttcagtgtgactattatatttatgagtttgttatgcaccatattatttgtgacataattacttttagatatgatataaaaaatttaatatttatttattagttattaaaagttggtttatgtagtatatttgttttgatagtaatataacatatttgttgtataagacaaatatatttatatgctacataagcaacttttaataactaataaataagtaattgattttttatttcaatatctcaaagtaatttatcgcaaataatatagtgcataactaactcataaatataatagtctcatctaacaattctacactccaacgatgtactctattaatctatatttttttcatagcaaagagtaaaacggaattattcataagaaattaacggtcaactagcggaaagggcatagaagagaaccaaactaaaattcagatatatgtaaaggacgtagaaaggattaggcgaactttcaagatacgtacataatgaattttcaggggtacatagtgataaatttgcaacaccttgcgttttcgttctcacaacgcagaaagttcagacctaatgttatagtcatcagggctatcatcctatttaaactactatatctccagccaaaccacggatatggtactaaggctccgttcaaacagtacatgattaattgaatattatctattataaatttgataaactgatttatttattaatctttagaaaaaggttctatatagaaatcttttcacaaaatatatcacttagcattttgacaaagtgttatcaaaaataaaaaaaagttatcgtttaaagttacggaaaagaactcagcctaaaagctagctacagcatgccagcagctgttggctgctgcctttgctgccgtaacgtaagctctaagcaccaccgctgcttgctcgccatggaccaagcaaggcccaatgccgaccactacgctagctagcctgctttgctaggcccacaagcaaagaaaccagcccactacctttttctcttatctcttttttttttcatcaatcaattattccgggacgttacatcggtatcatggcctcatgggaactattctccttaaatccttgagtattctaaaacttgagaaatattcaaccgtgtttgtttggatgcaccacaaaaggaatggtttttttagatccacaaaagaaatggtacaggactttggaagaattatagatagagattttctttcacaaggttatctctctcatgtcagaaatctacttagaaacctactgtattaatttattttgcgaaaaaaatattaggaccaaaaaagcacgggttacatcggaaaaattatgttactaagtttttttaaatagaaagttcaattttactctcccgaattatttcattggagtacttcactcctaagcaattttttgggttattttacaccccaaactatttaaaacggttcaactgaccccctatctgtatttctattttttccctctctatatatgtcgtattttatactaaatctaaaaggatcgacagatgcattataacttatctctcaatattttttgaattttttttatcattgtttacataggttggaaacactagaacatatttaaacatcgaggttttaagtttaaagaaagtagttatgaaaatattttagaactttaataatagtgccatctctgccttaagaagtttagcttaaaatacagcttgtataaaagagaaataaagaagagaaatactattaagtggtaaagtgaagcatcattaatagtttatgaggcaaaaaaaagttcatgaattcagtgctaagctatgcctcatttggatttttttcaaaacatagtgcatatgcggacgctcatatagtcatataaattaacggaattgctaaaaaacttgcgacagttttaaggaaaactgtcaatttttcagtcgtcggatttactccgagattcgtgcgtgcgagatgaaagaaaatagcaaaaagcagtacgctatactgggagtcgatcatttcccctccaattaactagagtagcatccctaccactgagccagctgaactattgatgttgaaagcagagttacatgatactcacatatgtgtaaccacatagcagatccctattttttggataatcttattatatttctattttctttgtgggcttgctagcaatgatgctggtgttggatacaaatgctaaaattttttttgaatgttttggtacctagtttttatcgaacgtcctatatgtattgtcatcgtgctttaatatacttacataacacttaccctctagttacagagtagttacatagcagttacaccctagttacagagtagttacattatgtaaaattaggaactacatttttttttcatgagcatgcatactagaagcatgcgtactagcttgtactagtgtggaaccgttttcctgtaacggttgatgacagaccctgtggttaaaaaatttgaaagttttgaacctctgtcgacaactcactagccagtccctaaattaatgagcgcataccttacctttataagtactttcaaagtagttattgatgtttctgtaaatgcaagtatttatggcaagtataagatttgaacatggctgggcaggtccatcacaagaattttttaaaaaacagcgttcatctggatttcggaagaatggaattcacaaactgctagatgaaatccgaggtactagtaatttggagttgtactagctacttcagggtgtgtcagggtgtgtttagttcacgttaaaattaaaattttggttgaaattggaacgacgtgacgcaaaagttagaagtttatatgtgtaggaaaattttgatgtgatggaaaagttggaagtttgaaaaaaaaagtttggaactaaactcggcctcagcactattggagttgtgagtactgagttgtttgtaaaatataacatttattctttgtgaaatcccatattttccaccacaaaatcgatcagaattcagagcagacgatcgaagcagcctcaagcatccacggcgcaccgggggtactcgagaagcggcacgtcgccgccgccgccgccgccggccaccgcggcctccgtgctcagcccgacgacgacgttgcaccgcacgtacaggtcgcgccacccgctcctgaacggcccgctcctgtacttgaccctgcccatgacgacgagccggagctgcacccgccgcgccgcgcagtccgccgccagcgcgcgcgccgcgtcgggcgacaccggcacggccgcaccgccgagcagcggcgacatcgccacgtccgcgccgcggtcctgcgccacgggcgggagcggcgccggcggcatgaccggctccccgcggtacgacgcgtaggcgacgaggccgtcgtagagcagcgacgccctgtcgctggggttgtggagcaccagcgtgaactgcacgctcgcggcgagcgcgtgcgcggaggaggaggcgttggcgagggcgaggcggtacacggcggcgcgcggcacggacgcctgcggcatcacggggcggtagacgaggtacagcacgagcgcggcggcggcggcggcggcgagcgcggccacggcgagggccgccgtggcgaggtggcggaagcggcgagcccggtggtgggcctcgcagaaccgcgccttcctggagacgtccatcgacacgacgatgccagctatgtcccgacctcgtctcggcgtcctcctcctttccacctcgcgtattattccgcgtcgtcacgtcacgcacgcgaggcggcgccgcggaggaggaagccatgtggatggatggatcgcgaattcgggagcagtttggaaaagcggccgcgcgcgcgagctcggacaaaacggggtggtggctcgcgcgcgcggcggtagaaagaagaagccaataggcgctgcggctgctgtgacgctggctgcggcgttgcgggcggagtactgagctggaaacctgggaaagagaagctggcagggacgtttgcatgcattgaaacgtaagcatgtgtgacgaaacgtggtgagtactttgggaagaacagacgatggatgatgggatctgctgaagtaatggaggcttcactggaataccactggatgcaattactggtctatttttttcacacatttgaaatattaaacgtagactaataataaaacaaattataaattctacctgtaaactgcgagatgaatttattaagcataattaatacgtcattagcaaatgtttactgtaccatcacattatcaaatcatggcgcaattaagctcaaaagattcgtctcgcaatttacatgcaaactgtgcaattggtttttttcgtccacatttaatgctccatgcatgtgtccaaatatttgatgtgatatttttggcaaaaaaattttggttcttaagagcaggtacaatagcaggctataagccagctgcaaatatattttaaggagttaaataaggagagagaagtgcagcgggctatagatttgtagccagctgtagcacggactccaagacgcagtgtgtgtatgacatgtaggaccaggtattaatagtgtagtatgtaactattgtatgaatgagctattagattgactatagatgaattggagttagtagttagctgtactattgaacttgctctaacacaccctgcgttagttacctccgttcccaacttctctccctcgtttttcgcgcacacgcttttcaaacttctaaaccgtacgttttttgcaaaaaaaaaatatatacgaaagttgtttaaaaaatcatattaatccatttttggaaaaaaaaagcaaatatttaattaatcacccgctaatcgctgctctgttttccgtgccagggagtgagggttcctgaacgaagcagaacagtccattaggcggaaaacgagagagatgagttggaaaacctagggtaagaacacagccttaaaaagcaaactctcatgtcgtgtgccccccgcctaggcgagacgacagtttaccacatctctactacttaaaaaataagaggtgcttccatcgtccgtcaaaaaaatagagtgaaaaaaccggacgaaaaaaatctgtccgatccaaaacaaaacggacgaaaataaaccggatgaaaaaagaaaagaaaaatcaaatctgtcatataaaaaaagggcgcaataaaggaaaagaaaaacgaatccgattccacggtaaaaaaaaagggagaaaagaaattaaaaaaggaatctatccgattctaaaaaacgggcgcaaaaaaacaggcgaaaaaaaaatcaggtgaaaaaaaagatcggccaaaaaaaacgaatcagatttcgttggcgcggtaagaaaagagcaaaaaaaaaacaaatctgtccgattctaaaaaaaaggaattatatgtgacgcggtaaaaaaaatcgaatcctattatatttgacacgatactatatatctctatcttctctatctctactacttaaaaaattaaaaacgtttccgttgtccgtaataacaaaaaagaagggcgaaaaaaacattaaaaaaaagtttgattcaatttacttccgtcatgcgtaaaaatcgtatcttatcttaatctcaatctttccgaggggaaaaaaagaaagaaattaaagaaagggataaactagattgatgttcccaaaattaaaagaggataaacgatattgaaactcccctaactcgaaaagaaggaataaaatagatttaaatttcccgacaaaattctccaaattcgaagaaccctaatttcgggtaagaaccataagagtcaaaatccaaatcaattaagctaaaggttcgggttacttatcggacttgaaacccatgagcacaccggagctttccaggaagcggcaccgccgcaccttcacctcctcgcagtcgtgtcgggttccctgcgcgctgtcctggagcaccccgccaccatcctttgccgaagacgggaagcgtcggcttggcgttgcccctaccgccgacgaggtccaggccgctcggtgctcgtcgccgtttgcacgcctacctagccagaccgcggacgtcgtggcacggctttgcgtcgccctcgggtgcgcccccagccggcgaagcaagagccgctcggcggtcgtcgccgtacgcacgcaccagcttgccggaccgccgtcgttccgctggctcgtcgtcgaagagaaatgggatcaggagagagcgatttgggagctagggttttgcccctctctcccggtcggtgcttcatccgaggcagggacgattggagccgtccattagatcggacggctcagattcgcctagcgtcaggccgtcgccgccgttgattacgctgcgcctaatgggccgcggaagtgcatcggaccgtccccgcatatgtgggccacgctcagctgctcagcttgcgggccgtcgaattgatgactcaactcgccgaagatgggcaagcccaagtttgggctagcttgggaagacctatgccgaaagcaaatttgatcaaacaatgtggctcacatttttcaaattaaagtctgtcggataaactcctaggtaggctcgaaaaataaatctaaaactaaatcctaaatcctatgctaattgatcaaattagactcggttctacttatttgttaatataccaaattagacttgatttttacagatttgaggttttcaaggtgtcacactatcaaacgatgtttttccgttgcaacgcacgggcactattgctagtcataaaaagattaaaaaaaaggaagccggcagcatttgtagaagtttgaaaaaaaatattttaatagatgatttggaatcacctgtacatttcgacaatgctactgaagtagtggcgttaatgccaatgggctgtagtccacgggaaatgaagcaagcttggcccacaaaagatttggactagtcaaattattgggcctattgttgccatcccaaagggaaggaaattcaacactcaacgtcatcctttctgccgggtgttccagacttccagtgaaatttaactgcccacggtaaaatttggaactggccaattaccaaatatcataggaaaattttgaactttttaccagtagctagccggaatacttgtaaattcaactttaaaatatgtagtactaaatttacaacttctcgaccagcaggcgtccataacgatttggtacgacgtgcattaaccgagccaaaatgaggagcaataccaattttcatcctgttaaaacgtacacatttcacaaaagaacacatcttcggaagcatcacaagctttactgaaagtatgaaactacaccaacgatgttcagtgtaagaaactgtacaaaagaactttgtctttggatatccttgacaccttacatccacacacgtccagcttacacgttaactgttggctagatacaatttagaaaacataaatacgtgtgctacatgataaacgcagcttatctagatctgaagcaaaatatgatccctactgacaaactctacaatgtacgaggtccatggcctaacctagcacacgaagttagcctgtatatatatgcaacaccaccatacactgctgactgtaggtcagggcaatcatactttcactcttcaaacaaaatctgacactgaccaccaggataaccgtggcacagcaatctcctgaagtttggacagccctagctcccttggacaccatgatcttgccgaacaaactgacccttaacccgcggtcgctgctcggctagtagcttcctgctctggtatcgcacctgcacagcaatgtaaaaatgtaaaccacagtttctactattcagcaatacaacaaattggattggaataaaatggcaagattagttgcttgtgacctaccttcttctcaaagcacctgtctttcctcttaagccggaacttgttcagtgcagcctctcgttggctcaggtggcgtaaaccatcaggattttcaggaacaacatttgatgattcagtaggggcaatcatgtggttggaagagctgtcacagacactgccactgagcgtttttctggcgctgtccagcacagtgctgctcccactttcaccggtggttggagaaacatgccgcggctcatctgtaggaatttcaatgcggagatgtttccgattagcacttagatgactccgagcagtttgttcctctacattttcaacctgcttagtatccgtatcttttggaccattctgctgcagagaaattgcttgtgtggttgcgtcttgccaggtagatgttttgctattccaaatgggaggagctgattgtggatagaaaagggatgccacaggtgcaccgttccagaatggctgcccatcaaatgttagtcctccaacaggaacaggaaatggtacaactctaatgggaggttggtttgtttccctcttgtcttgagagggagttttggaatctccatttttgttttcaagatctatatgtgttgccgaggtgctgcatgcctgagcatcaccagcattaatggtagatgatgctgtcctgcagttgtacctatgaacaagaaatgatcggaagtgtgagatctcatatgttggctcttggtaaaactgtgtaaaggagcaagttaaccagtaagttagattatctaaatgcacaaaaagagagatcatacaaaaatttctgctacttccatattatttcatgttttattctatgcttgcaagaccatactgtagcaaatcaaagtaaaatatgtctacgcatgatggtaggtaaataaatgatgaaatatcaaagacgatattttttttctgttataccagtaggaaaaatacatcaacgcgaacataacaaccatgcacaaattaggaatgacagaataaacgttacagtaagaaacacttacaaggaaaatggagatgaagttgagtggttcagtgttcttcgttcatttttctcctggctctctaatctactgtagtcagatcttctgagagaaagttctaactggtgtgctggaatggaaaagcacttgtcatcatttccacgggaatttgctctcgcaacatccatctccatatgtgtgttattcttctgctgattgtcaataatatgaaccagctccatatccctggaagctttctcacaattaatatcatttgaacatgtcatcctcctcagtgatgcatcctcttccctccgtggaatcaagttgccatcattagatgctgcaaaacgaggaggaggtaatatcaggaaaaaaaatgcattcaaaagataattgatgatatgaccactttcagtgtagaagaatgatatggaaataacagagaaaagaatgaaggatgttttattaccatgaattttagtccctccatttttctcggtgttcttgtggtcaggcttggagaaatgccttcccattggctgcttatattccagtaaattgttggtttgcctactgtcagcctccagttctgaccttgtacatgaactctgcaagaggggatccaaaattcagtccacgaacaacagcgaacagatctgaactcagcataataacgacagtccctactgctaaggatataaagactatgcagtatgatgtcttgaagacaataacatgctacagattcagttcaagtgtgtaacatcaaatatccagtacttgaaacaaacaagtattccgtaataggctttatcaaactgttcgtgnnnnnnnnnnnnnnnnnnnnnnagcagccaaaaaaacttaccttactgttgtcatatgtactccattttgcaatacccaagaggaccgaactgtgacatttcgctgacaagaaaatactattctcactcaaaacacagttccattacccacctgacttgaaaaattgataaattagttcaccaacattgatgcagatctgaagggctaaatacatcttttgcatgaagtaataccatttttatcgtgtgggtaatgaaactgcttttggccaaaacatcaggtgatggaagtgttacagttcggtcatagctgggcaatgcaaaatgatacagcacaaatcccatacgtggctaatgattgaaattttgtacgcaagactatctttgggcacacatgagcaggaagaagaaagaacaggtagacaacgtcatgttaactgattctaaaacttacttgagcatcactttcttgttcactgcattccatgttcttgtggacaacattttcagtcacatgttcagctttcgtcactccggtcttctgctcatgcctttctgtaagattatcttcttgttgagtatgctgcacatcaagaacaccgctggactgtaaaacagagtaattgaagtttgttgattagttttgtgaaaaatgcagaatccaaattttaatatataaaaacgagaaagcaaatgtagtcatgctaaaacgttgcaaatatgtgatcttaccagttgttttctccaaacatgctgccataagttccttaattcattcttccgtattggcttaacaaggaaatctgcagcaccctttagcatgcatttgaaaaccatgctaacggaatcatttgaagacatcactgagaccaatagaaaaatgaagcatcagatggagtaatgggattagaaagatatgagaaaggcatggcatagagtcaagttggatacatacttatgacggggatattcttgcatgcgtcatgttccatgatcgtggagagcagcaggaacccagacatcaagggaagttcaacttcagttaaaacaaggtctatattgaaagatttttcctttagtatgtcccacgctttcacaccatcagaggctgcggcaactgcaagaccaaatatgttgcataagatcgacgaaaaacacaatagtataatttaaccaagatcccagagaatacgcgaacaaaccaagagatcaaaaaagaaggaacgtgcctaaataactgtactttaaaataaatttgctttttttttgttttaaaagaggaaactgcatttttcagctctaactctgtcccaaaaaaggatcaaatatacaggtaaacattttgcttcaggaaaaaaacaaatatacatgtgtagttatttcaatttaacacaagatacgaaatggatcgttaaaatacagctatatttttttcgaaaaaaaaatgatattcggtaatgcctcaacttaggtattcctgacgaataggctgcactacaccaaatttcgtctactgaagcagctctggcaaaataaagaaaaagagacagatagcaaggaattacaactacagaccaaaatcagcatattgattaacatatcttctgaaaaaaaaaacagatcacaaatcgtcacatcccaaatctccccacttgaggtctaatccagtaaaatcagctgccacgtagtaacagttttacagcgcagaaacatccgcaactttgcaacttcactagtgagattagccactcgtgacaacaattcgagcaaaaaacaatgaacaaaagcagtcaaccaatttaaccggatcaaaaacaaactgtgcggcacagacgctcacctcgatacccgcacttgcggagcagcgcgcagatgatgtggcgcgtggagtcgtcgccctcagcgagcagcacccgcaccggcatcctcggcagcatccgcgtctccctgctcgaccccgccgccaccgccgccgcatcctccccttcctccccgtccccgtcctccaagtccaccaccttcctctcctccactccaccccccattcccccgccgctagctccgcccctcgcccctcctcgccggagtcgcccgcggcggtaactaccctttcaccgcgcaaggcgcaaccacctctcctcctcctctctctctctcctcgagctcgccactaggaaaatggattggttcgtgggttcgcgaaaaccaaatgccagtgtgggcgacacgacaaagccgaagcggggggaggaggcgtgtgtatatacccccacaccaccacacaggcaactccccgtcaccgacacgtgggccagtcaaccagagggacccacccgccagtgggcgagcgaggcgaggcggtggcgggtgggggtgggagcacgtgagcgagctccgcgcacgaaatatctgtactacactcgaccggtgggcggggccgccacgtcacgcgcgcgggctgggccccacgttgacgtggcgtgcgcggcgtcagtggttgggatatttccgtttcccccgcgagatcgcgacgaggagccgagggctctcgaggccgatattttctctcgcgggagggacacgtggtaggcccggaggaaaaggggaccaatcttgcggccgcgcgggacgacacgtggcgggtggcgaggctaggggattgtgggggagatcgtgtggctggggatgggcgcgtgggcctccgctttgtttaatcgtgcggctggggatgggcggggtgggcccgggtgtagcggtgcgagtttttttttttttttggggggtgggctagtggttggcgtttcgtgcggtccacgataatatctgggcgggtggggactcgtggtggaggataattagcgtggattaagtatggtttaagggcggtggaatggaatgggtttagtgtgggttggaaatatctaattgactcatttgacaacctttgacaccgtgagcgagcccgtgacggatgtgaagatatttgtcaggaggattctggaagcgttaggtttcctccttataattaatcatacaagttgcaaagcaaaaaatattcgctaaattttatgattccttatcacccacatattaatagtactaatatagtgttgtggtaattggcaaaattacgtagcttgtcatattaagttgtcggtactcagtagtaatattgtgaatgcatgctttttattttttttagggaaaattgtgaatacaaactaaagagtggttgtttgttgagatgggcagacggggtgcaaaaaagaatggacgaggttgattcgaccaagtgttggcctacatcaaccatccgtgtgtctgtgtcctccatggctccatgcaccatcaacacccacacacacccacacacacgcaaaaaagaggtagtacactagtagtactactccatataggagtagcacactagtagcactagtgaaaacaacttttcgaacaagccgaacaatatacactcgcccgaagaatatccaaattccgccaacacacatcctgcgccacgaggtccgattcgatccacgtcgaataatgccgcagctgtactccacttacacattgttaagctacaattaccacaaacagtacagtaatactacatatagtagtagtacgtaacattggctctgtccgctagatatttccaggctccaaccgacgaagagacgaggagtcttatcggttgtccatattttctaataaattattttgatttattataaaaaaataatatataattaaaagttttatatatttgttcataacgacgtaaaaggtaacgttaaaaaaattacattgaaaatattttaaaatcaagtttgaaaattaaaattttagcttttattttgatttattagagcaagtttaatagtatagccagctactagctccaattcatttatagccaatctaatagctcattcatataatacttacatactgccctattaatacatggtcccacctatcatatacacactgcgtcttggagtctatattacagctggctataaatctgcagcccactacccttcactcttcttatttatcttcttaaaatatatttgcagctggcttataagctgctatttacctgctcttaggataaccgatggagctagagacaagtggcggcgaccgcatgccgtggataatccacgggccattggccgtttcgttgcaatgatgctgcctcgttgccgagaggaggagacagatagaccggctcgcgtcgcggctgttttgtgtggtggtagtcgtcggtggtggggtcggcgggtctcgctcgcttccgaaacaacccacttggcgtggccgggcgtggccggccgccccatgtttctgagcctccaaggtaggactcgatcgatcgatctcacgggaaccaaactgaccggatgacatggcacgccatctcgctaaatatcttgacggactaacaacgctcgccgttggatgcatggtagtagcaaactagttagctgctaccagccatcttttattctttttggttgttatcggcataattttttttaatgtctagtaatatcaaaaataggctaaatgcattgttgcaaaaaaagtattactgatatttgtaacaaattaaatgcattcgtatatttgtcaattttatcttaaaaatggtatggtccaaaatgacatcaactgaacaggttgttggccaaaatttaaattttaagttttaattttgtaattgatttttaagttttttttgttacaggttattttttataatgatttttcaaattaatatattatttataaattgtttttcgaatctctaataagtattacggcttattttttttgaaaggacagtattacggcttattaacaaagcgaaatgacttgccacaaagttgcaagcaacaatatcgcaatattcgtggggcactagctacagtacagtagttataaatggacagatggggggtcgagttcacgtggcgcggcatggcgcggcataaacctgtctacgaatttgatgaccttcttgttgttgctgctagagaagtcatgcatctaggatagtactggatgcagagatattttgaaactgtgtgcgcctctgcttttcgtcgctggggtcgccgattcgggcggtggatcgatgactggttgacggttgggtgctgtagctataacttgggagggcaaaatggtggattaattggatggctagtttttctccttgtggatgggggctggaccgctggaacgctggatggatggaccaaacatatggccaagcacgcgcgcgtgcgacacgctcgacgacggccgcacgatccgctagtggccgcggtccgcgatggtggcgcacggaccgcccgtgcaaatcgccgggaaatatcttcgcgagcagagagatattttcgccttgatctcgattacgcaccccgatcttttttatggtcgatctccaggctgtctctcagtctctcgcgtgttaatttggagtgagtacgtgtaaagccatttttttccgcgctatggccaggctcgcagcggacgtccacatccacagcctcgatcgcgattcgcgcagcatgggttgtgtttggttggttttgcaagggtggcatgtgccgtgctagaatcggacattccgcaatgagaccgacgagagggagatcgctcgatcgatcgatcagtgaaaggtgctttagctagcatagcaagcgatagctaagcaggcacagtggttgcccgaccggttcggcgagatactactgtacaagtggatgatcgatcgagcagctcgcgggcgagacgaagctcgcgggcgagacgaacgacaagtgaagcggccgtggccactagctgtagcttttactagctcgttctcttcgtgatctctttgggtggatcgattgaaacgtggggacggaggaaggtccccatcgttttctctaatatagcattgctaaattttgtttttttagacttaattttagtttttttatcgagatttattttttaataatggtatacaagtcgctaggtacgtatatataaaaatctacctacaaaattattattattattactaatacgttgaatgacgtatgtgatgaggacggagaatgctgtgttgttggaggaagtgtggtgtggttgctccacgcgtgcaccgggcgttctcctttctccggtgatacgtatacacccaactaggaggcaaaaatatctttgctaggtctgcgtggctgcagttgacaagtcctagattttttcgaaatatcttctcgatcggtctacagttctgtgggtggggacagcttcctagatatccggcagagcactactactattatcctacctgatgcaaccatctggctgctggccacatatactcgggtgtacatgcgtgtggttatggatcgatataatcatttcaggatcactcatcagttaaggttagtggtgtgttgccgcgggctattagaatttagaacttagaacttataaacacttcaatgaatgactgtcacagttcgatgatgtgactatatatggccgtgttcctccctcattaagatgtagattataccttagattttgtcaccatgttttttaactgctaaacaacgtgcttggtacgaaaaactttctatacaaaagttatataatataaaataatttttaagtatgtaataattaaaacttgatatttttactagttaataattaaaactcgagtaatcatgcgttaatggttttatcgttttacgtgtgcacttaaacttcattcttattgcacaccacttatatatgaaatctcatttttaataattaatattgactgaattacaactatataaaaatagaaaatatgtgccgctctagctgattttcttatgtgatcaatcataaaattcagatataagataccatatgatgtcttgaaaaagatattacgaactctcacctgtacgctatctcctgaacaaacataaattctgttcaaatgtgtgttttgagactatttgaagccagcagcatcactccatgttctctcttcctactctccatacttgggaagttgggttgaagtgtgaggccgggaagaattcaagacatcatggtccacagcccatatgaatggcccgagacaacaagtagcctactaactattaggctccactttgggccaagcccatgttttgttgggccggagcctacaccagtacaccaccatcttcctcgttcggttcccatctcccagttcgagcccacgccatcacggccgcgccgatgctcccgtcgccaccggcgccgccgccgatctcgccggcgcggctgcacaagctcgtgacctcccagccggacccgctcctcgcgctcgagctcgtcaccgtcaccgcgccgaccaccgcgccccacccgtcgacgctccacgcgctcgcgctccgcctctcccgccgccgcgaacacctcccccacgcgctcgcgctcctgcgccgcctcccgtcgccgccctccccgcggatcctcctcccgctgctcctctccgcgctccgcctccgccggcagcctcacctcttcctctccaccttcaactccctcttcgtctccggccccagcccgttgccgctccaccccgagcttctcctccgcctcctctccgttctctcctccaccgcttcctacttcccgtgcgcgctacacctcctccgcgacgtctccacccgccttcccctccccgagccgctcgtcctcgcctcgcacaacctgctcatcgaagccgccacccgctccggccacctcgccgtgtcaatctccctcttccatcgcctccgctccctccatgtgtctcccaacgccgagacataccgcatcctgacccagtcactctgccgcaggggccaggtccacactgcggccaccctgctcgacgaaatgctccacaggggcatccctgctgacccactggcatacaccaccgtgctgaatgcgctctgccgtaagaagcagcttcgagaggcttaccgcttgctgtgcctcatgcgaggccgtggggtctcacctgacattgtacattacaacacggtcatcgtcggagtgtgtcgtgagggacggccactggatgcctgcaaggtgttcggagatatgagggagagtgggtgcgcgccaaatgcggtgacatatactgcggtggtgaatgggttgtgtgtgaatggattatatgacaaggcagaggcataccttgatgatatgttgggcaaagggttactaccacatttctctgtgttccattcagtgattaagggatgctgtgcagttgggaaggtcaatgaggctgcagggatgatgactcgaatgcttgatcttggaatggttccacatgctgagacctggagttcagtgatcaggagtgtttgtagtgatgaggataatgtcgaggtggttttgttgcaagtgatgaaaggaataaagcacctctcaaacataaattcaaggagtacttggacatgatatcatgtggcatggatgcaaggaacacctattttatggtgtgttgtaacaatcagttttgaaaggaaacagtagatgatgtgcaaaatgtggaccacaaccatttttctcatcgtatgcagctaatttgatatttgagtttatttgtttatatgcaggttaggagatattgtctgacttcaactaaggtatgctatcctattgcaagaaaaaaaaagttatcgcccttaattaatgtgattcatatgattgttttggtagtacattttgaaggttgattctgaatttctgatgcttgttagttaaagaccatactttgttctactctgaatccagttgatcatttatactttttcttatgcctcttcaattgtgtgcattcgcagatcttataatctgccaaagcccaaagattttggttcaccttggttcatgttttctggattttgttagaccccagttctgtgtactttgtggaaactataatgttttggcagcaggagctgactcagctgagtgaaggatcagcaattcagcatggagatcatctcacggcaaatatgggaagctcactggacgttggctgaattccaactgctgttgtcaaggtgcatctgatcttctcacgacaagcatacactatacatatcgttgcaggtgcagacaaaggttttacgactatttgatttcctgatacaacgcggcaaagctgctgggatctggatggttcactcgcacggcttgctacatttttgtgcacccactgacctcgtcgtacttgccgtgcccggtggtatcctctccctgtgactgcataggtagtgcggtactgcctcagagagttttgtgtgctgaagtagagaaatttttgtaattctattttcactgggtgatgtacctttcaagaattcaaaattaccagcgattaccggtaacagtggccatgctatgtactatgagtctatcttgtatagacttagaacaagccccccttcattcaggagataaaaaaatgatggattcttgagattttagatttaaaaaatgattatgtacacgtattggaaatgcaaacgtgtaatcgtattgtactgattatgtaatgccatacggtgtccattgacatttgcttattcactctggactactcgtttcgtgctgaatcatttgcgcctaattgattaggccatgtctaaattttgatacaaattcctgctaatttcagaagagaaaaaaaaagtggtcatgaatagggtttaccaaaccgaagtggtcatgaatagggtttaccaaaccgttttcagtgggttactatcctcgctcgatttgacggttatcacagtaactaccgtggtttaaaactgaaatatttaccgcacgtgatagccgggcgataaccgtgcggtttgtatgcgtttcctcctgcggctctgtttcgttgcgggggagccccaccggcccacggcgcgggatcaccgccgccacagaaacctccatagagatctccgagcagccgtcctccgccacaactttcgccatggtggcgccctagccccgcgcttcttatcccgccccacctatggctgctgctgctgccgctgccgccgccacactcctcccatggctctcctcgcgctccgcctcggccaccaccaccaccacctcggcctctccgccccgcgcgacccccgcctcctcctccgccggaggctcgtggtcgccagctccggtgccgtgaaggcccccgcggccgcggcggtcgtgtggttcaagcatgacctccgcgtcgacgaccacccgggcctcgccgccgcggtggctgccgagccgcgccggcccgtcctgccgctctacgtcttcgaccgccgcatcctcgacggtacgctgctactactgcgcttgctagccccttgcagcaaatgtctcactgagccactggttttggaatgcccgggggctgtgggaagtgtgtgcgatgtgttcgacacaatgtcttacggatcgcgcggtggtttgatcggacgcttgcactttggtgtttactgtgtactgtctctcgcgtgcccggtaacctggctacgttttttttttttgctacgtttgtgcaaaatctagtgactttgatgccaggattcgtggttttgtagaaatgtgcagtaaaccgaagtcgtaggttttttggctgccgaatcaaagtgtaagctgtggattggttgtagtgcgggatgatactttctggttctgctaattcagaaattccctagcataaaagtgaaacatatggtttgccttaaaatagacgctagtaaatggagagaacaactgcttttcagtcccaacttcttgaggagacctgcacctccactatctggtatgtgccagatcatgaaggttttgattggaatggacgagatcaagggtgtgttttatcaagtcatgctgtggaaatgggtatcagaatctgatgttaacattcatatacaagtaacagcgtgcaaagttatactgtaatctgtattatgcagtgcaagaatcccaagtaatcacactgacagttggcattgacattagcctttttatcctttgcaggttactcagacacgatgctggaactgctactttttgctttggaagatcttaagatggttttgaagtctcaggagtctgatcttctcataggcttgggaaatgctgaagatgttgttctcaagcttgtaaatgaggtcactatgcaaggtttatgttgagaattgagcttaagagtttatgcaaaccttcactgctagccatctaacatatccagatctcctgattgcatgcattgatggagcataacaggtacaagcgggcctcattttcacagaagaggaagttgagtacagagtgcgcaatgttctggccagtgttgaatcatctctctctaatgcatcattcctatcgggaaaccctcctgagatagtggtttggagtgcctcattgtatgactacaaggtaattttgtatctcaggttatcattccctattgctatcctctagcaacctaattatgtttggcatgctaaaatcattccaccagaatccgagggaattgtcaacatcacacaaccaatttttgaaggaaaaattaccgatgaacacacctcttgctgccccgtctttacctgctctgaacatagagatagagacaggtgtatttcagttctcttttttttttggttagtgattatatccttgatcatttttggtgtgtgcattatgataccatgacaatttcctgttcaggttctctccccacactggaagaactaaaagggtttcttaaagagagtagaacgtcagagaataattgggttcctctcaagggcacatcagccagatctattcttaaaaagactctcagccagataaatgtcaaaaccggtgttgcatcaagtggcagcgatggaggagaggataccactgcatattatgctatgtcagggaggaagatccaaaattcaatgttcacatcagaaagctcaacagaagttagaggtggaacggaaatcactttggatgctttagctgcatacctgaaatacctagaaggaacagggaaggctagttggcaagagtacgtcgcaccacttctttttaaaatctaattacattcagcactattggtatgtttgtaactttgtatttgaaaatgttgcctagctcataaggtaaatgcagtctatgatgtcatatcagtcatcaatgatttttctgataacaggctttgtttaaatttcatatccaggttgcatgataaagtacggttaactgaaactagagatggtgcctcgttttgcactttgtttggtcctgcacttcagcttggagttatatccaagaggagagtttaccatgaaactattcagtatgagagagaccggaatgctggatttatatcaccatttggatactcaacacctacagtgacagcagcagtagatgctatctgttcaatggaggtacttttgtaactgtcctgttctcaaaaccattcgtccataccttttcctcctcttttcggtgatcttgttttcctctaacaatgtctttctgaacatgaaagtggtattggctcttggccttgaaatcccaagtatgcattgaaggaaattaccctgtcagaatctggagatggaaaggtcatcttatacaggtactattagttaacttcaagatccacactctctatctctactgcatcagaaaccataacttatctatgtaacaggaatcatgtcaaatgcaagtagtcctagaattggatataattacaatcagcaatgttagtcgttaaaatgaattgtgatggcttggtcaaccactaaaaaggaccaatgtattatcctctgaactattcatctttgcacttggatccttccaccttctggttgccgatacagacccctagataggtaagcataaaacattttcttctatcccatattagtatctctgaaactaactaggatttcagctgaaccatttaaaagttccatccagcagggcagcagctcttctt

SEQ ID NO: 8412 - DNA, 15894 bp, Oryza sativa
ggcgtcatctattaaaaacggaggtagtatatcttttgatgattttccagatagttgtatgaatggacatttggttgattgacttgatatttgattttgaattcgatattcgaattggtagagacattacaaatttaaggaaaatatgtgtttgagatttttttatatttgatatgaggtttggatcttgaattgaatttgaataagtctagggggatggtgaactgggatgaaaattagattgaactttgaagagcggatgcatttgaattagatttgatattttggaggacttagctatggagagattaatagagagacttgaaaataggttttgcttttattttataaaatacctccttgagggatatcaattcctaaacatggttcttacataacctttagagcaattctacggtccttgaggaggtaccaaattttggtacctcatggtaccgaggtacttcatggtatctcctcaaggaccgtaaaattgctctaacctttaattcggatttagaacttggtggatgcacctggacagatttgtagggatttttgctttttgagaaaattttgtaaagaatggaatggatagagaattaaaaggatcaataaaggatatgaattcggataaaactctgaatagtggtttaggatgctattcgaatttcaaaattttgaacatgagaacttttatatgggagaggattttttttaatacaaattttaggatcataggaaagaattaatttggccattgatttttttagtggataaaaatggtagggaataaggagatttgattaaagcaagagttgaatcttagcaaaattgaggataaaaaaagaatgtgtacatgtgatacatttttatgagtaaagtataggaggactgttgattaatttttgtaaaggatttaattgcaaggacttcaactacaaaattcgaataccatgaatttaatttagaagaaaacaccaagactttgaggtcacaaagattgatctaattgagatcgtctttggcaaaaaaaacctagatacaatcaaagaaccataggatttcatcaaaatagttttcgatggttaaacgaaaaccgaggcttacacattagtatataattagttctggttttgctatacatttgttgaaaagaatttctccaacaaatttatcaaatgtaagtacatattgtaattacactgtagctttttttatataaaactttcatataattttgaaccattagattttcttcaagattcatgaaagcggggaagggaaaaaattatagtgcatgcatggatgaggtgattaatttggtcctccgacctccgctttgcaaaaacagtgtgttatgctcgatttttaaaagttacatacaagttatattatgggagaatagctaatatggtccctaaagtttcactcatgggtcattttagtccttaatctttcatattgtccaaacaagtcctttaaatttgtcatgtgggctaatatagtccttggtcccaccaaaatcgccacatggatatgccatgtcaccttcctatacaaaatctatatgatttgtccaacttacccttacgcataggaaaataaaaaacaaaaggaaaaagttaaaaaatatatggtatatgcaagagcaaaagtatacctcaaaatggtgaaaaaagaagtatttttttcctatggttatgtctaattcacccttatatttatttttctatgatatacgtaaggataaattggacaattcattatagattttgcatgaatgatgacatggcatatccatatgatggttttggtggacctaaggactattctaggtcttatgacaaaggttaaggatttctttggaccatttaaaaggttagggactaaactgatcctacagagaaactttagggactaaagtagatattctctcttatattatattgtaattacatgtgaattatactatatttatgtctaacaaattttatgaaaaaagatattgactagaccctatgtatcacctattacaaaattgaaaatgagttttctatttgttaaagaaagttctatctatatagaaagtttttttaagaaaatatgcactgtttagcggtttggaaaatatattaatggtaaataagaaagtagcaaaatcgaaataaaggaaagaacacacccttaacaatatgtgattattatcgaaaagggtagtacacaaacgttcgtggttacctaatccagcgaataactcagaagggacacgcgaaacaggaggacacgccattttcttccgttttcatctttttcccttctttttacgtgattattctgtaatccattgcatcttttacgtgattcttctataataagtatttctattttttttcttcacttctgtttatttctcagatttcttttttcgttatacatagtatattttaatatcttcttaacggaaattttctatacaaataatttccgtggaaactttctatatataatgagactttatatatgtaaactttatatacgtatatataggctttgtatatcatagaaagtttatagaaactttctatatatagattttatatagaaattacatcatagttagaaagtttagtgcagaaataacaaaatgctaatgggaaattttttaaatgaataatattcttggaaaatttctatatataggctttctatatagagagatcgattttatgtatgtaaactttatatatatggactttgaatatataaactttatatatatatatatatatattgtatatgtatactttatatatagactttgtatatgtaaactttatatataaattatatctataattcgaaagtttagtgcataaattttactagaaataaaaaaaactaagatatttttcaaaaaaaaaatccaatatgaacaaacctcctaacagaaaaacgataaaaggaaaagtttatcttttcccatcgcgtgataggtaaacgagaaaccggaaaacacctttttttttgtggctccgtttttctttttgtcgttttctgttcgctaggtttgtcgctagcgagcgttcgcgtattagacatacccgattattatggtagtagccattgaggcatgaaatcaatagcactaataaatttgttatactccgtacgagttaacggtgaaagaaagtacacgttaagagcaggtacaatagtgagctaatagcccgctttttagtacatgtggcatagagctaaactgcagagagagaaaagcgagcgactaaatagtcaccggctgagcacgcgcgcatatgtaaatctacatgtcgtggggcccatgcatgtcacagcaaccagtaaaaaaataggagagcaacatgcagcattagaacaagagaatagcacgattaaaaaattgaaagctaatagcctgcattgtatgtcaggtagattatttatctattgaatgagttggcaagtttttggagccatcagtcggcgccgttattaaacttgctctaagtgctagagctatactactactctgcctcgtcagcctcgacctcaccttagctgacatttgcataaaacctgaagctgtgaagaagacccatcctaaaggggaaactcttttaatcacacggtggacgtccacctgtttattatatgccatctaaataattattaaaaaaataagattgatcaatatgtaatatatccacaaacatacaagttcaaattcaacttctataaattgtaacaaaaataacaattaaaacttaaattagtataagtatatttgcagttgaatttattatttttgttacaacttatagaagttgaatttaaacttacatgcttgtggggtgatatattacatattgatctatcttatcaagtgttctgaaatttttttaaaactatttggttgacatgtaataaacgggtgaacgtccaccaagtgattagaaaccatcctaaagccactagatgcgagattgttaaggggcgatcgatcgcccctagcgggcccccctctcctccatatggtttctttttttggcaccgcattactttcctattttagtaaatttatacacctaaagtttacacatctaaagtttaaagacccaaagtttataaatcaaaagtttatatatccgattcaaatttaaatttgaattgaaatatttttaaatatagtatttatatacacctaaagtttatagatccaaagtttataagtcaaaagtttacatacccggttcaaatttgaatttgaattatatccgattcaaattgaatttgaattcaaatattttttatatatagtatttctatgcatctaaagtttatacacctaaagtttatagatccaaagtttataagtcaaaagtttacatacccgattcaaatttaaattcaaatattagtttataggtccaaagtttataagtcaaaagtttacatatataccgtttcaaatttgaatttgaatttaattttttttatatatagtatttctatacataatttttttcaactttatgttttttattttttttaaaattatggtgtagtaggaagagaaggagaggaggaaggaagagagtagtatataggggatgggaggtgattagccggcccccactagatgcccgaatctgttcccgtggaaaatcttaacccgagacgcacggagatgttggggtcgtccacgaccacgagtataccacgtaccatatactgattgtgaaacgaactatatatacgtacgctcctgaagtcctgatcactcctaaatgagcctgaatgtatatatatgtatagattgcaacgtacgctacgcatacacaagtcgatcgaggatccaatcgaaacaatgcgtcttcgcttcaagactacggtcgacatctcgctggcggcgtcgatggcctacgcggccttcggcgccgcggtggcctacccggccagcgctccagcggctctggcgcgcgccttcgcgctcggctatggcgcgctcctcttcctgctcccgttctccgtctacgcgctcgagttcctgcggccgccgtacccaatcgatcgcacgccgctgtcgatgatcacgtgcgccacggccaccccgtcgcgctatccgtcgccgtgctgacggtgctcaaccaaggaagagccggcggcgatgtcgccttcgccgcctgcgtcgtctggatcgccgacgtggccgccgtcctgtccctcgcgtggtgcctcacgcacggtggcaccatgggcgtggctttaaacaggagaggacagtacggggaaatctgcaaagtacaggagcggatgaaaaagtccaacaaccatgcccgccttgacgtccggtacgcgatccgggatgccaagattcgctttgcggtggccgtgtcggccgcggtcgcggtagctggcggcgttgtgatcggcggcgtttcattcaagggtctatcctacgccgccgtcttcttcgcgctccctacgaacctcttgtacttccgggacacgtacgcttatcctacggaccacatgccgaagcagctcgagtggtgctacgtctcggtgcctatggccgtcatgctgttgtcccgcctcatgttggcggcacggcaggcaaccacgctggacatcaggctcgtcgccgtcaccgccgtcatgttggcaatagactttaccgcaattggttttctcgaatggcacagcaggagggagatgccgaagcctcgtggtacacgtgcgagtgcggcggagatcgtcacgtcgtttgtgatggtttgcttgcggtattggttgtatctacacgttttctacgtcattggcaacggttctcagagatggttcaattaatcagcatatatacaacggtaaaagctgtatatatgctgatatatatagcttttaccgctgcgagttgctttcatttagacggtaatagtccacttgtaataactatgtaacccacacttctccttctaatatatgcggacatttacagtctcgaagactgtaaataatactcttgccactttcacgtaaaaaaaactattagtaacaaataatgtaataatgctctattgcttttgttttagagacattaccattagtcaacatttttttagaagaaactcttaatcagcatagcggtcgaggaaccgaattttattcaaattgatcaagtgatagcagaatcaacattgcgacacgtatgtactcctacaggtacacacgaaagagaacacgtcacgttccatgtagcaataatactcatggagtcatggtcattggatcaattgatcagttaattaatgcttagcaaatcataaagaggaagcaaccggcctttgtcttcgacgtggatccttaattagactggcaagaatttacttgaatcacttgtgctcactagaggaaggtctttttttctgatcgtcagaaccttcaagacaagcagaaatgatacaaatgtgacacaaggataaaagcttctaggaaactagcatttcaattgagatcgtttacaagtttgtactcttaaaagaaaatcacatatccttatctaaaaataagtaattttacaacccttgagaagatatcataaggtaaattttttttttatcatccttgagaaggtactagaggtactatatttttctactgtaaaactagaaaggtggcccgcgtgcatgtgcgggcacttatattattcaaaggtaaaaaattttattgtttgttcaaaaattttgtatcatagattaagggaaaactaaagttcggatactattattttgtaataatttaaggattctatttttcttaaggtatcttaaaaatccattcacaaacttttgagtagaagatggattaaatacttacgacttttgaatcatatttttttctcgagtaaataataaactattgcttgtagtatggctacaaatgaaaaatgcgagagcaaagatacttaaaattcttgtgattaaatcgtctcatgaaggcacatgatataatgagaaagggagggaattgtatacatggtgaaaaagaagaaagggaaaaatgaaaatgtggagaggaagcgtaggtacccacgtatagtaggtgcgtaccgaaggtggagaggtgggacctcgtagtatttagtttgtcctaagatcaatttaatctaatggcttataatattagacccaccgatttaagtaaaatctataactaatataaatatttggatttttccggtcatcacatcgcagtaatctcggtatttttcgtccgtaacccctttttcttcaccccgcgcggttttttcgtcccgtaaccttttttttttccgtcatagggtgatttttgtccgtcaccaccccatccccaagtcccagtcagaattccatcatcacacaaatagaatccacattgagcacatcttctctccaaatctcaaatcatcacaatccaaatcaaacacaaaaccccactccaaatctaaatcggaatcaccttataggtggtgggcgtggcatgtcacgaactcacggacgtttgttatgtggcggcgaggcgaggaggagaccgccgtttttgatcgtgacagggcggaggcggaacggagcagcaaagcgagcgcgaagagaaaaggtgaaatacccctcctccttcctcggcgggcaggaaaacgacgccacccaaccgaaacgaaacgcttctgctaactgctacgaccacgagttgttactgtaatatatctggctatctgattggtaattcatcaaacgttgtgtattgtgtggagaacaatcacataaaacgaagcactctttagcacataattaattaatattaatttaaaaccttaaaatgaaatactatggatgtatttttaaaaaaacactcataactactatgtaggttgttataaaaaccggcccatttgctagttttaataagaactggtatatatagagatttataagtgcggtttttaacttttgtcttttctaagaatcacatggatagaaaatgctctgtaaatgtcagttttaaatgaatcggcacctatatgggtatccctcattagtgttcctgtataatttaactcgccaataccatcgtatatacatgcaccgtatataataaggaattatacatttcggagtacactcatcaattatcccaatccaatacacacccaactattctatatacgcactaaccaaacatcgccgaccccaccaagggtagggcgccgctcgccacagaaggcgtcgtggactgtgacagagagggagggggagtgagagcagcagcgctgccgatgggggtgtgtgggtggagggaaagccgctgatggggaagagggaaggggtggcgatgaaggagagcaggtgcgtagcggaggagtgataggcgggcagaggagagaaggccgagaaaaacgaggagataagggtgacggaaggatcgaggcacgtgggggtatgccgctctctgttttttttacatgtgcgccacgctctcggttcgacaaaataaaattccataggaccacggtccttcgctcatgcaaaggactcttaggctttgctcttccccatctttcccaactcacctctcttgtgtttcacgcgcacgttttttaaactgctaaacggtgtgtgttttgcaaaaggtttctatatgaaagttgctttaaaaaaaatcatatcagtcctttttaaaaaaattaataaatacctaattaatcataagaaaatgtgtcgttccgttttacgtacacggcacatcccgaacacagccttaggttgtgttttgcttggacgctttacaaattgctaaacagtgtgtttttttcaaaaaaaaaagttttctatatgaaagttgcttttttaaaaaaaaatcatatttatctattttttaaaaaaataataaatacttaattaattataagaaaatatgttgctccgttttgcgtacgcgggagatgagttcccaaactcacctcctctcgaccacagcattagcctcttgcgcaacacgtgttaagttagaatctgaaagcaaacatttctccttttctctcatgtccccaaatcctgttagttgacaccgtgattgggcgtgaagcgcgtgcgccggcgtcggcagcggcagccgcatcagcgcgaagctgcgtgcctccattaatggcgtgaggagcagcagcagcagcaacctagccggcatgaggtgaagctgcaccgcgaccactgcatggctcgatccgatgcatgctttctggcgttcgctactcatggctgagtaccgggcatttacctggcgtggtgcaaaattgttgattgtgagcttggaattacatgattaattgcaagtttttagatggaacatggacatcattcttgctgctctgattcttgttcggatcatcttaacacgcacacatgtcaccactaagagactatgagtaaatatgcaaagtatttttatctgtcctgattattgttagttaattttatgatgaacttacctatttttaatacagatttttttcacaaagttcatatcatacatgtacacgtggaataattttccaaacaaaaaagaaaacttttgtgattattattatcatactagactgtttaaaaaatcgttcagttaaattttatccaacgtgacattacccgtgcaacgcacgtgtattttgctagtcaagtaatagatactttgcttttttttcttagaatttataatattttctctaatttattagagcaccacgtggcagcttgggggcattttaagaaattttaacggacttaccacatgtgattagaatattaaccatgtaatatatatgtatgggatatatgctaatattcgttccagcttagtccatgtttatatacatgtagagagaaattaatatgttgctagtaagctattagaagtctaattaatagcaattaattttgacacctatttacaattgttcatagtagctcttgcagattcatcttatgatcttaattatgcgttgatcaccaatttactaatcaccatgactcacatgaaaaaatgtgtactacttaggtttaggacaattgaaattgatgaattatctgatttatgtgatagctatttgagattataaacgaatgaattaacttcaaaaaattaaaaaagttttttaaaaaaaacaccatttaggaacttggaaagcgtggagcgtgcaaacaaaaatccaaaagatggaattatgaaaaaaaagaccttaaagtcccttataacactcttgtactagtaagagttctattgatatttattaatattgttcttgcaaccgtataaacaaataatataaaatccaaatacgacataacacaatacgatataattattatgtaatcaactctgggtttcagtttaaatagagctaaatgttggaaaaactcaacccacggtgcttaattcttctctctctacatcacacctttaattttcttttcatgttattaacaaaattaatcatctccatatatgatttgatatgtggcaaagcggtagcgctgcagtggtcgtgatcaccttagatgcctcagacatgacactttgtcacacgtgcgaaaggcaaagatgcaaatgtgcattatgcagcgggccaaaaaagagaacttcggacactttatttgttaacaatagatccgatgatttaaataatgggtccaccggttatagtgtaaatgtaaattagttaatatagattttaaattgttaatttaatgggtacacaatataataagtgtagagtttattttaaaaccgtgcattatttgataataatagtccaaagtaataaaaaatagatccgatgatttaaataatgggtccatatgtttaagtgcacgtataaatttgataggtacacaatataattgtgtaaactgtattttaaaatagtgcattatttgaaaataatagtacaataatgagtacactggtttaattgaaaattatcttacattattgatttaatgggtaaacgtataatggtgtaaattttattttcaaagattgtagagctaatttagttacctgtgtttataaagagttatatagagttatatgattgtatattctttctttgtaaaattttaaaaatatatatcaattgtataaatggaaaatataagaaaaaagaggaaaaaaaaacatgaaaggagccgtacgtactacatacccatgtgaaagaggagaggtgggacccatagtattttgtttgttttatgatcaatttcatctaataatgtataataatggactcaccaatttaagtgaaaattaaggggtagatgttttgtttttttcttagaatttctagggatttctctaatttattagagcaccacatggcaacttgagagtgtttgtaggaagtttaatagacttttagtatataatagaagatttgatacctctaggtacagtccttaaaaaagtacctaaggtacctaaattttatactaaaatttttgataccttgaaatacttagtacctagagatatcaaattttacagtagaaaaatatagtacctctagtacgtaccttcccaaggatggtaaaaattactcttataggatatattataggatatatgatcacctatatagggcttgaatttggtgtggtttctactctaatattggacaatattgaacttatctacaagctttattgaataaatacaaaattcagcatattcttgtaatccttaaacagaatagttactgctgaacagtttggtatactcagaaattgattgtttggattcatttatctaaatagttctcagtcacttgctaacattgattctctctcagattaagtatatggatcttgaaactttaagaaccaggttgaatgctatcgtcaattctgcatcatttcggggcagtatgtttcattggatttcttcagcagcttcatccaaactaaactcacaacagctgcctgtgatggagatgcccatctaccatgatagagttactcctggacctaataatctgccctcctgtgcatataatgtagtatcctccactcagggtgagttgagatgatgagttacctattttaacctcacaatgcaccttatttttttaaaattctttattggcttgattttggcaggatataaacaatatgagcactgtaatattggtgctgctaactttgctcattcattggctgataaacccaagcagatgcctaaaagattagcaaacaccatttttacctcatgtgcatcaactctaccgaaatgtagccctagtattgatgtactgcatactggccatataaaagaacatttctcaggtgagtttacatcccctttcttatgtctgaaactgagttgagctgaagttatttggcatcataaacactatggtcaaatttgccaggtgatgctgatgatactagaattttgaatgtcaagaagaatgaatgttgacgaattttgaatgaagtatataagagtaaaatacactgctggtccttcaatttaaccgtggtatcgtgcacatataatcttgtaaatttctcatctaggtatatatgtaattttggtgttatgaatcacttgagatccatagcccctttggcaagtctcgccccatgactttgttgtcatggtggcaaacattttgcatttagccctcctctaaaactaacaatggtaacaaatttgtatttagtcctaaatgagtaatttaccctagtctaatttaagaaccggtcatatatttcaatgaataggatgttgtcaccctatacttatttctacagaagttgacagcccatttttaagtcgcgccctaataaggctcttctgtgtttcgtcaatgaatctccgttttattgggggcaaggatcgatgcttgttgacattgtcgcattccatgcaggggtcctttccaagcaagcagattctctttaagcacacggcacgttgaattataagccttaaggcctctcacagtgcaagacactcaatgaggggcttagcccaaaaaagtgacccaaagacactcaagcccacagtgcagttattttttttgagtgacctaatgagatgaagctactattgaagtatacaaagtctacagtggacgtaccctaccacatgtggcactggcaggcaaaggaaattaattcctcacctacccttcctttctcgcgacccttctctttctcttagccgcaccgccccttcttcttctccctcccacgcgccgcgcctccttctcctcgaccgcgccgcctcctccccgttgacctcgccgcctcctccccgtcgaccacgccgcctcactcgcgcctcgccgcgcctcctccaccacggcgaccgcgagcagcggcggccgaggcctcctcccacgtctgtctccgtccaccgccgccgcagcttatccgtggcggtgttggcggcagagctcggcatctctccggccaagacggcggatctggtggcctcggcggttgtccgcgtgaggccctggagcggcgagcgattcgaggcggcggtgaagggccgcggccgagaaggaggtggagatggagaaggtggcggcggtccggagcagggcagactccgtcggcggtggctagcctcgtctagttcgacgacaacggcaacggccagatctcgtggctcgagagcctcggccacacagccaccggcggcgacggcttcatcagcctcgacgagttcgccgtcctcaacgccaccgccagcggtgacgctgccaccgtcaagacggtgggagccgacgcgccgatgcagcgcgaatcctgtgatgattttgctttctttttctttttcattttgttgaatccgatctgttcttctcttccaatcttcaagattttattgcttctctatcaatccgatttgtggcgggaggggattttggaagggcgaatcaggaattttgctgccgcgtgagggtattttgggcgctaggccatgcgagcacgaggctgcaccgcccacagcgcgcgtgacccgccttttctcctcgctgcgtgccctcgttttggcgaggctttgcgtcgctcaggtaggggacgacaaacctaactaaggcgcgggcgcttgctccacgtcggtgaaaatctgagctggcgcaactaggtaactcactagctcagtgcactgtgagaggcctaagtattgcatcaccctcttcttaacctcaaaccctttcatttccagtaggctcaaattatggtgcttgaaatctgaagttttccgtgtgacgttggtcttctcagcaccatactcgcattcgcatgcttcacacgtatgccggcataactgcattcaacaaatgttagacgttagaaatatatttacttcacatatatacgcatcaatcattttagatgaaatatagtgactccatttaacagaaatttcaaaaaaaaaactccctcattccctaaatgttcgatgccgttgactttttttaatatgtttgaccgttcgtcttattcaaaaacttttgtgaaatatgtaaaactatatgtatatataaaagtatatttaacaatgaattaaatggtaggaaaagaattaataattgcttaaattttttgaataagacgaacggtcaaacatgttttaaaaagtcaacggcgtcaaacattttgggatggagggagtatatataaaggtactacctccatttcatattataagtcgtttgtcttttttttaatcaaatttttgttaagtttaatcaagtttatagaaaaatttaccaacatctaaaacatcaaattagttttatcaaatctatcattgaatatattttgacaatatatatgtttgttttgtgttgaaaatactattatatttttctataaaattagttaaaattaaaaaaatagattaagaaaaaagttaaatgacttatactccctccgtttcacaatataagtcattctagcattttccacattcatatcgatcgatcgatatgaatgtcactagaacggataccctcatctcaatcgggcggtaagccccatctcaatcgggcatggcgtccgtcacaggctagaagtcactgatgtgaagagctatttcaatcgggcaaacggctgtcacggatgattctatctcaatcgggccctaagtaaagcccgtcaccgatagctttgacccagacgaccagtcaaactatagcccgtcacagatgacctatctcaatcgggctacaactagtgcttgtcacagatgacccttatctgtgacgggcattaactatagtccgtcacagatgagtaatctgtgacgggcattaattatagcccatcacagatgagtcatctgtgacgggcattaacttatgctagagttaatgcccgtcacagatgagtatattccaaaaataaataaattttattttttggctagccctcactcgtgtgcacacttaacgtcaaagttctttagagattggcttccggaaaaataattgtgacatgttggtatgagtattctattaatcctattatgccttaggccaggatgttaaattggggttattaaatgatttcaaatggaaaagtcaacaaaaccaaagttgtagaactcatcgaggtgcaaaatttttattttggtcatttctccatctgactctatttaaacaatttgaaatttgaaattcaaagtttgaaaagttcaaatagaattttagatcagtgaacgacttcaactgaaaaagtcatcaacaacaaagttgtataactcatcaaaatctataacttttattttggtcatttttctatataacattttttgaaccgtttgaatttg

SEQ ID NO: 8413 - DNA, 3645 bp, Oryza sativa
gggggcgatgcgggcggcgacggtaacgtgggagacatgcgggggcttcttcagcgccaggacgaagtcggtgcccggcgggaacatcctcgatgaccggcggacgtcggggacggcggccagcataatccactcctgccgcggctgcgcgtctcctacctcctcctccaccaccaccgccgccgccatgtcacgctcacgcgaggtcggcgagctcgccatggctgtgtctgtgtctctgtgagcaggcccgtccctgagggcgtgcgacacgagcgctcgcacagggcccccattttcaaggggcccccaggctcatatacttgcccttccgtggttcagtcccattgatccaattgataacaacagaaaggcatggaggctgctggagcgtgagtgtgagctcaattaacgagggaatgacgccgcacgcgcacgaatgcacgacagttccttttttcagatcgatctcaccacctatccgccggcctgctgcccaatcacctagctccctcgctttgttttcttttctttttttttttatgttaagatctcaccgcctatccgtgggccgtcgcccgtgacggtagagctcactactcttgccgttgcctggcacaacgtcacctatgcccggccaccgactcggtctctgcgctagtgagctcgtccgcacgccattcccctgcttccgatgccggagcactactgcatctgcagtatgcacgatgaaaccatcacaccggaaaaattcacggttataggcgtcgtcttgtgcttttcaagtgaagattatgtgaaggtattagtttttttctattattttgttggtacgaaatatatcataagtataaattgttatcatcttttttattatcacttatgtttaggctgtgtttaaaattttgaacaggcccctaaattttacgggacggcactgctgtgagtggtcgggtcggtgcctggaggagaagttgggtgcgagtctgggatggtcgaggcccgcatagagcagggggtttggggcaaattgaccaatggggtgcgtaccaatgcgtattgggctttaggatgggttcttccagaagtttcccagcttgcaagagaaggaattttttttatttttaattttttttattaaaagttttacaaaaataattttccattttgaaaattggcggaagtagtcgcctaccgctctttgggagggcgatttttaaaaatcgccatcccagagggcggcgaaaatgacgtggcagacggccgttcgctctcgggcgacggccgtcaacgaaatttgcaggcggcccccttgccgccctccgctagggcgattttgtactgtgcggggggccgcctgcaaatgggcggcgagggggcatggaattttgcaggcggcccccttgccgccctgggggagggcgatttttgcctccccctataaagcccagtcccccctctctgaaatttcattatattcactaaatatccaaaaaaaacgaaagagagagaggggagggcagcagaaggggagcggcgaagccctgctggttcgctcacttcatcacaggtttgctcccatacatcttttgcatttgtactaatatgttatgtttgagtatatatgttgcgttttagttttagttccatatattttagcatatctgtagcacacagcacatatgtgtagatccagagcatagaatataatagtatgaattgagacatagacagtagtgttaattgtaagatgtagtttagtttgatttggagaatgtaacctacttttagaattttggagaacaatattgcagagaatgtaacttagggcgtagtacagaaatgcgaggttaacgcagttattgttttcatcaggcacaatgtcaaataaggtcacatttcagatagttcacggtgaaggaaatattagatttggtccagatggtgttgatctgtcagattttgtaatgacatctaagggcatcgataggcctgcggagagaatatttcagtcaatttatagttggttgttgagaggatttagaatagaccaagaagtctacacaatgtcagtatcagttgtagtgagtcgtgcaacagaaggttatttttgggaactaatgccgatggacagcactgctgcttggagacggtatgtggaaatagcttttgaacggtcatggcccctcgttatatttgtgtcggtacaagagaaagatataaatgtttcaatgcaaaccgaagatgtagagggtcctatcaatgcaggggatgttgttggaccatcgatgcaaaatgaggaaaatcaaccaagggaggagcaggccatgggcatggcggatgagggggccgcgttcgccagctcttcctctcacggagcgtcgatccctcgcccacacggtactttactttttattaatactattaaatacctgtatggtccttgtccagcaggatttgtagccgggatcttcggtactggggcctcttcgtctcacgccggtaggactggtcctactagccagttctacaacgacgacttgcacggtgcacaccaccacgacgtactaggctcctctcagcttggaggagctccagaggcgcacactcaggagcagccagaggtcacacctgtacaggcaggacgggttggccgtgccgtacccccggaccgactcacatactcccaggggcacattagggcgcagggtaggagggacaggggtaagaggcctcgtcagtagtgttctacctcttcagtccttatgtgaccgtttcttttggcttacaaacttgtaaagcagtactactgttgctattactactgtagtactacttgtgtttgtctcgtctacatagtccttttcattcatatggtgctagaacaacttatgctcacgacaacacactttcggcgcttcacggtagtgtcagatccagtagcgcgcacagtccacaacagcacacatgaaaagcggcagctcgagttgtcactatcaactttcggcgctgcctgttgacataaagtgaatcacgcccacgcgtgatcgtcttgtcacatctaatgaataatgtatctcattgagttcacatatattgcagtgaaaacgacgctatataattgacaatctgaaggcaacctcttcatatcttctttcccactagcacacaacacacgaaaatggaagcgccattccttgagcgtctcaactggtaaagcgatccttttgctggttggtttccaccatggtgtgaccgtcctttgtgcgattgtggggatggatgcatactcaagtcttccctcatgatacaaactcggggcaggagattcttccaatgcgcgaactttgatcaggtatgcttcatctattcgaagttcaaatggataaaaaaactaacttcttcgtacacaattgtaacatcttacgcagacatatcgtccaatgtgcaacttcatcgagtgggtagacatggagaacccacaaaacaacggaacccgtgcttacccacgtaatgaaacaagatcggactacctaaggcggaaggatgagcatgaacgtcgaattgctgctgaggctttagaatggcacgtaaatcccctaggactccccacgtggcgtgagcgtccggagtgtcgttgtggtg

SEQ ID NO: 8414 - DNA, 13894 bp, Oryza sativa
ctgccacccagttgtcgattagaatagcatcggagtttcagccgatcgtatctgatttaactataattatctctatttgcttcactgatatgttaaatctaccctttatgccaagatattgttgtatttgaatatattaggtttttgcttgatattctatatttgttttaatatcctgatatagagtagtatcggagtattagccgatacatgctagatctatatgatcggctatgctgtaaacttatatagtcctgttattaatatatatttcggtctaagtgatttatactgtctcggcatggcgaccgatctatcccaatcacttgatttaagtatatatcgatataaggagtatataccgttaacatctacagccgatcaagtaggtttagttttcttccttatttattcacgattgccgatcgatgcacagatgacatcggctaagatataaatgatatgtcatcggcctctggccgatcggctatcatttatagatttaactatggctcctttgtctttatttcttgttgattataggatcaaatcaactggcacgctcatacatccgaaggcgagttttggacctgcactggagttaagcagatatctcaggcctcatgttttctgtcaacacgcttttggcacgcccggtgggacctgattagaagttaggcgttagttcttcctcatggccgagaaacgagcaccactaccatcaagcccaggctccgttaaaggcaaattaccgaagccgggattgactgacatcattgatgacaatgtcctgccgatcgatcccgagaaattcacgcctgaccagaagcaaaaatttgaagcaatgatgcagcaagcacgggatcagtatctaagctcgttcatgcaaacccgcaagggaatgctggttcagaagtacaagttaaaactggttgctgacaaccctggaaccggttcttctaaagatggagaagtgaaacaagctccagatggctcggctcagccgagcaacaagggtgctaccagtggttctataggaaatcaaggcgataaccctcaagaagtgcacggagctccaggtgatgctgctcaagggccgcaaggaggaaatcttaatcagaatattgagctagcacaagattttttcaacaacttttaagatcgggttgattacgcggtgcatcatgctttgatcaatcaatccggggtcttagtcaatacactgtcgaacatgatgaaaacgatagccgatggctcgatagctgagcatcaggctacaggcccggcatacttgcaagaaggcatttttccgaattatcgaactttgatcactgatgctcagccagttgtgcaggcgactccatctgtcgaacccacgactcaaccaacagcgccagcatcaacgcccttacctgctacatcggccacggcgtcagcttagccgatcaaccctcgattgctaatgagggaacatccacagcttgctggaaaagcctcgaatcagccgactcaagatcaggttgctgctatgttttttccaccaccaccagttgttgattcagtgcagcagcagccgatccagcagacgtcatcaattcagccggttgtacagccgatccaacaacaggtcgcgcagccagctcagcaaacaccaccaattcagccggtggtacggccgatccaacaacaggtcttgcagccagttcagcaagcaccatcaacgcagcagcatctccaaccaatccagcaaacaccgccaaggcaacgccttcagccgatccaacggactccggtacgacagcaggtcgttcagccgattcagcacctggggccagccaatgcatcggctggatttgcagcacatggggggcaacctgcgcagcagtttgtgaatcaagttatcccggagcatttggttcatcatgcacaaccggatggcaccttagtaactcatatggttcctgagcacttggtgcacaacattcagccgaatctgcataactaccaagggggtaacttgaactatcagtatcagctttcatctccgcaagcccaatatcaaccagggggatcggcacagcaacagttcgctcctcagtttggtcagtacgagcccatgcaacagcaaccacaaggagcagctctgtcacaccccgaagttctttcccaagcctaaattgaagttataaatggtctcaagaaaataccagtgtaaagcaagagtaaaccttaataaattaatgcaagtaataatcggaattggcatgtggaatttttcttgagttctacatgtcgaaattcgctaacaagatttttagtggaattttcagagctctcgaaataattttaatcaattaaaattgagcacaggcaatatttaaatccctgggaattcctttcttcctttttcttttttctttttccttagtgggccgccggcccattccccctcctctctccccgcgccttgctgggccggccggaggccacggcccaactcagcccgcgccccctcctctctctcggggtcaccgacaggtggggcccacctgtcgggtcctcccccaacctccagccgctcgccgccgcacccgcaaccgccgtcgcgcctcgcgcccgcgcctcccgggccacgtcgtccacgtcgccttcgcgcccgcgcctcccgcgcccacttccccctctctcccgctcgcccgcgctcccgagacggccgggattcgattttcgaatcccgcctctctctcctctcccactcccccacgtcggccggcgattcccgcctctcccagccacgtccggccccctctctccctatttaagctccgccgccaccccctctctctttttttccccatttcgcctaactctctcgtgctccccatcgctcccgcgccgtgcacccatccgccgccgccgctcccgctactccggtcgtctctagccgccgctaggctcgccgccgcaccgtgccgtcgccgccgttgggttcgcgtggtcgaggtccacccagtccgcccctcctccatcgaggtccgtcgccggagcccgcatcccctcgcactccggtgagcaccacctccatcgccgccttcggccatggtttccgatcgccgtggttcatctccctccctctaatttctctcttttcctctcttagggcatctcggagctcgtccgtccgtcgccgccatcctcccatggctcacagtcgccgttcgccgtcgtcctcctccgcgccggccactctcggtgaggcatctctcctcctctattcccctccctctccctcctagccgcgccgggtcgagccgccgccccggtcgtgcgccgccacctttgcgccgccatctcccgtcgccggttgccgtcgccggcaacgcgcgcgcgccgccgcccttgccatggccggccggccggctttgtgccaagccgagccgagccgagccaggccgccaccgcaccgtccgatcggccccgggccgatccgggccgtcgatcccgtggaccggcggtggaccacccgcgtggtcccagtccacgttagaccgaccacccgtgcgccgctgccatatggggcccgcttgtcggcgccgccccctctctctctccgtgatttatttattgcgcaataaatcaattaaggatttttccgtttatagtaaaaaaacagtgtatcttctaaaattcataactaattcatccgtgctccgtttaagcccatccaagtctcagtaaatcaagaaaaatttgtccattaaaaatggttttgttctctgtttcagtagtcttatagcatgtttgtattgtttgcttcgtatgtcgcttagattttggttcttccgacgctccggtttacttcgagatagtcgccgaggttcctccagcagcagagcaaggcaagtcatgcctgtcacttgaatatgttgatcctatattgcaaatgctctattgtttttcttcaaatactgcattgttttataatgttactatgggatgttaacctatcgttacagccatgctatttcgtaccatgttcctttgttagcttgggatataacatgactagagattggactagggattccttagccatgcttagttcaactagcacacaatgagggagatcctattaatgtttagactgtaggttctaatggtaatgttggattagtaccaccgctttggtgttgattaactaaaatgaatcacatggtgggctatgggtgcatggttttgctagtcgcacccatggcaattaaggaccggttcgcgggaaaccctggaagaattcctcgtacttaccacaagccagcgtgggcaacggctggacttgtagtgtatctttcctctagctgacgcattcaggcaagggtgggcgtgatggagcgggacgggccctgcgacggcctctgtcgctttcggattcacctaggcacgagaggggactgcccgtcgcccgctggggacgggggtgaaacctgaggtgtggtgtgcttggctagagggggttatgcgaagggtcctgtcacggcctctttccggtatgtcgtggtggcatgtcggcgcaccgaaacgtgtcgtggggctgtgtcttgtgggtacagttgtacacctctgatcagagtaaaactattcgaatagccatgcccgcggttatgggtggtcaaccagattcaccgtgattagtttcaccctagtgtagtctaatgaaattggatagtttaggtggatgattgggcctgttgcaacgtgggatagcattggacagtggatgattaatattaattaattattacaactgtttacttctttcaacttctgtttataaatgctcgctttatgcaaatgaaccactctagctctcctttgataattctctgcatcatatccctattccggtatgacttgctgagtacagtgggtagtactcagtcttgctctattttccccaaccccagagtatgagtatgtgtcagatggtggtttctccgaggagtaggcttcgtccgtgccgtcgagaatgcctgtggagtggtgttcccgccgcagatcaagtcaaggcttagctccagttatcttttgtttttccgctgcatttatgtaagacttttatgatatttgtaagacgtggatctgaatgtcaacattgtcgtttgtgtaccccggccggtcctggacggggattttaatgcacattctgcttggaattctattcgggaatttctaggagtgataagttggtatcagagccgaccttgaccgtaggacaagccaaatggaaaaacctaagagccctctgaatccttttcattgcatatgttctttgcaattggatttgttccgggaaaattgggatctattcttgtggttcaagggaaaaatctttgtcgctcgtttaagcgagatttgtcaaaacaagtcagtctagggttttagtaaaattatttgaggtttattcgtcagtcagttgggatttgatgggtgaaatgcattgggtcctagctcaggaatatgggttgcaaggtatttatgcttttattgttattattagtatgtatctaatttccccattattttatcgctatgtacgtctgtcttatttattcgctctcatgcaaaatgatctatgcataaaatttcgttcttactcgcttctcttatttgagtcctttattgccttatttaaatttggatttgagcatgcattgatcctactcctttgtcttctctagatggccgaccacccacccaaccaccgcggagaaggcatggatgactttgtggcataattggcacgcatgacgctggtggtgggctaccccaacgcgccagagtacacgactgttccaccgctcagtggcgagcttcctcaccgtgtccacctggaagtccatggctacgtgggtacctgcctagctaatatggtggtagaggcatccggaggcacagcagatcacgcctgtcaggaggcagcatacctgatgatggccagactacgggagcgccacaactacatcttccacaacacggcgtaccgatttcaccctcgtcgagccagcggtgatgatgtcagtactttccgtccgacagtcggcgagaacaacaccacctttggtcacatgtgcgccgtgatgagggggatggacaggatgcactcggatctgcacaaggcgtccaaggccttgaacgatgggaagctagtgaggatcatagctctgaaggatgagatagcacgcctgaagaaggagaatgctcagttgaagggtctcccagcaccaggaggagtccggatccgcaccacgccccgcaagtcgacgactgcacccgtgcgcattcagcttgcgcccaagaacccacctccgcccgcagttcccgcagctccagctccagccccagctccagttccagtgtcagctcctgcatccgctctctccttcgcgccagcatcagccgtcaggggccccgccagtggcaacgggggttggttgcctgctactcccagtggtagccgcgaccatagaagcagcagttccagtggcacagagccgggcagtggcgagacgtatctgccagactccaggagccgctcagagggacctggtgacaagcaggaggacgccttcgacttcaccgaccgcaggagctgttccgagcattaggctcgctttctattagtttatcgactgtttagcttttgcctgttagtttgtgtgtttaggtctgctcgcttgtgggtcagttgacggtcgatatcatgtgcctatgatatggctgtcttaataaggatttttgcttgatgtttaagtgttttaattcagatcagaacaactgcagtttaaattcctatataataaagcttagttcttgagcatctgtttttcttcttttcccccgtctgcttctcctccagatggtctacaccaggaatggcacccgcaccacgggcgagggcagcaacggcgaagagcgcactgatggtgtgcatcccaatagtgattccggcaatggtccgccaccactccccgagaatccgacccttgcccaagtaatggctcatcagacgcagatgatgacagccatgatgcagcaaatgcaacagcagcaccaacagatgtaccagaggatgcagcagcaagccgagcagcaccagcagcagtttggcccccctccccctcagtccaaactgccagagtttctacgcgtcaggccacccaccttttctagcaccaccaaccctatgaaggcaaatgattggctccatgccatagagaagaagctcaatctcctgcagtgcaatgatcaggagaaggtcgccttcgccacacaccagctccaaggtcccgcgtcagcttggtgggacaatcacatgactacccgcccgccaggcactgaagtcacttgggcagagttctgccgcaacttcaggaaggcgcaggtgctagatggggtcgtggcacaaaagaagagggaattccgagcactccaccagggcaacaggacagtgacggagtatctccatgagttcgatcgcctcgcgcgatatgcaccggaggatgtccgtactgacgccaagaagcaggagaaattcctagcaggtctggatgatgagctaaccaaccagttgatatccggagattacgccgactttgagaggctggttgacaaggcaatccgtcaggaggatcagcacaacaaaatggataggaagaggaaggcggcgcagttccggtccaaccaagcaagccaccagcgaccgcgcttcattcccagacagcagggtgaacctaccaccatgatcgtccgccagcaccgccctttcaactcaagcaacttccaccagggcgctagtggcagccagaaccaccgtggaggtcagcccaaccgcagtgcaactccgcgcccaccaatggcaccagcacagtcagctccgtctgtgcaagccaagaaggagaccggagcaaagccagggtcctgcttcaactgtggtgagcttggccacttcgctgacaaatgcccgaagcctaggcgtgctgggccaaggtttgtccaggcccgtgtcaaccacgcgtctacagaggaggcacaagcagcaccagaggtcgtactgggtacgtttcctgttaattcaatccctgcaacagtactttttgattctggtgcaatgcattcgttcatttacaagaagtttgtcgggatgcatgggttaataagagaggaacttagcacaccaatgcgggttcataccccagggaatagctccacttcggtacaattcagcccttctgtaacaatagaaatccaaagatcaccatttctagccaacctcattcttctggaatccaaagacctagatgtcattcttgggatggattggctgaccaagttcaagggagtcattgattgtgcgaattgcacagtcaccttgatcaatgagaagggagaaacagtagtgtacaaatcactagtctcaccaaaacaaggggtctctttgaatcagattgaggtggagatcccagtggtcaccgaggagaagaattcgaggaaattggaagagattcccatagtctgcgagtacccagaagtgtttcccgaagacctcactaccatgccacccaagagagagattgaattccggattgatttggcaccgggaaccgctccaatttacaagagaccgtacaggatggcagccaacgaactagcagaggtcaagaagcaggttgatgagcagctgcagaaagggtacattcgaccaagtacttcaccttggggtgcaccggtcatttttgtggagaaaaaggataagacgaagaggatgtgcgtcgactatcgcgcactcaatgaggtcacaatcaagaacaaatatcctttaccgcggatcgatgatttgtttgatcaactgaagggagctaaagtgttttctaagatagacctacgatcaggctaccaccagttgagaattcgggaagaggatattccaaagacggccttcaccactcagtatgggttgtatgagtgcacggttatgtctttcggacttaccaatgcacccgcattcttcatgaacttgatgaacaaagtgttcatggaatttctggataagtttgtggtggtattcattgacgacatactcatctattccaaattggaagaagaacatgagcaacatctccgtctggtactcgagaaattgaaggagcaccagttgtatgccaagttcagcaagtgtgacttctggttgtcggaagtcaaatttctgggtcacattattacagctcaaggcgtggcagttgattcatcgaacgtggagtcagttaccaaatggaccccacctaagaccgtgtcgcagattcggagttttcttggacttgcagggtattaccgtcggttcattgaaaatttctccaggatcgcccgacccatgactcagttgcttaagaaagatgagaaatttaaatggacagccgagtgtgacaagagttttgaggagctcaagaagaaattagtatccgccccagttctgattctgcccgaccagatgaaagacttccaagtctattgcgacgcatcccgccacgggcttggatgtgttctaatgcaagagggtagagtggtcgcatacgcctcgcggcagttgcgtccacatgaagggaattatccaactcatgacctggaattggcagtagtggttcatgctttgaagatctggaggcactatctgattggcaaccgctgcgaagtatatacggaccacaagagtctgaaatacatcttcacccaaccggacctaaatctccgacaacgaagatggttggaactaatcaaagattatgacatgagcattcactaccacccgggtaaagccaatgtggtggcagatgcattaagcaggaaaagctactgcaatgccctatgcaccgaggacatgtgtgaagaattgcagcaggagcttgagcgtctcaacgtgggaattgttgaacataggttcgtagccgctctggaagcacggcctacgcttgtggatcaattcagagcagctcaagtaaatgaccccgaaatagttgaactgaaaaagaatatgagagtgggaaaagcccgggacttccttgaggatgaacatcgcacaatctggatgggagaaagattgtgtgtacctgacgacaaggaactgaaggatctgatactcaccgaggctcatcagactcagtactccattcatccaggcagcaccaaaatgtatcaagacctcaaagaaaagttttggtgggtcagcatgagaagggaaatagctgaattcgtcgcactctgcgacgtttgccaacgagtgaaggcagagcaccaaaggccagtaggtttattccaacctcttcaaatcccgaaatggaagtgggaggagattggaatggactttataacaggactgccccggacatcatcgggtcacgattcaatctgggtagtcgtggatcgactcactaaggttgctcacttcataccagtacataccacctatacggggaagaaattggcagagctgtgcctggcaaggattgagtttgatctattgagataattcttcttttcatacttaatgttgtatcaattgagtttgatctagtgagtcgtgcttagaatattgatctctagcctgccacctagttgtcgattagaatagcatcggagtttcagccgatcgtatctgatttaactataattatctctatttgcttcagtgatatgttaaatctaccctttatgccaagatattgttgtatttgaatatattaggtttttgcttgatattctatatttgttttaatatcctgatatagagtagtatcggagtatttgccgatacatgctagatctatatgatcggctatgctgtaaacttatatagtcttgttattaatatatatttcggtcttagtgatttatactgtctcggcatggcgaccgatctatcccaatcacttgatttaagtatatatcgatataaggagtatataccgttaacatctacagccgatcaagtaggtttagttttcttccttatttattcacgattaccgatcgatgcacagatgacatcggctaagatataaatgatatgtcatcggcctctggccgatcggctatcatttatagatttaactatggctcctttgtctttatttcttgttgattataggatcaaatcaactggcacgctcatacatccgaaggcgagttttggacctgcactggagttaagcagatatctcaggcctcatgttttctgtcaacacgcttttggcacgcccggtgggacctgattagaagttaggcgttagttcttcctcatggccgagaaacgagcaccactaccatcaagcccaggctccgttaaaggcaaattaccgaagccgggattgactgacatcattgatgacaatgtcctgccgatcgatcccgagaaattcacgcctgaccagaagcaaaaatttgaagcaatgatgcagcaagcacgggatcagtatctaagctcgttcatgcaaacccgcaagggaatgctggttcagaagtacaagttaaaactggttgctgacaaccctggaaccggttcttctaaagatggagaagtgaaacaagctccagatggctcggctcagccgagcaacaagggtgctaccagtggttctataggaaatcaaggcgataaccctcaagaagtgcacggagctccaggtgatgctgctcaagggccgcaaggaggaaatcttaatcagaatattgagctagcacaagattttttcaacaacttttaagatcgggttgattacgcggtgcatcatgctttgatcaatcaatccggggtcttagtcaatacactgtcgaacatgatgaaaacgatagccgatggctcgatagctgagcatcaggctacaggcccggcatacttgcaagaaggcatttttccgaattatcgaactttgatcactgatgctcagccagttgtgcaggcgactccatctgtcgaacccacgactcaaccaacagcgccagcatcaacgcccttacctgctacatcggccacggcgtcagcttagccgatcaaccctcgattgctaatgagggaacatccacagcttgctggaaaagcctcgaatcagccgactcaagatcaggttgctgctatgttttttccaccaccaccagttgttgattcagtgcagcagcagccgatccagcagacgtcatcaattcagccggttgtacagccgatccaacaacaggtcgcgcagccagctcagcaaacaccaccaattcagccggtggtacggccgatccaacaacaggtcttgcagccagttcagcaagcaccatcaacgcagcagcatctccaaccaatccagcaaacaccgccaaggcaacgccttcagccgatccaacggactccggtacgacagcaggtcgttcagccgattcagcacctggggccagccaatgcatcggctggatttgcagcacatggggggcaacctgcgcagcagtttgtgaatcaagttatcccggagcatttggttcatcatgcacaaccggatggcaccttagtaactcatatggttcctgagcacttggtgcacaacattcagccgaatctgcataactaccaagggggtaacttgaactatcagtatcagctttcatctccgcaagcccaatatcaaccagggggatcggcacagcaacagttcgctcctcagtttggtcagtacgagcccatgcaacagcaaccacaaggagcagctctgtcacaccccgaagttctttcccaagcctaaattgaagttataaatggtctcaagaaaataccagtgtaaagcaagagtaaaccttaataaattaatgcaagtaataatcggaattggcatgtggaatttttcttgagttctacatgtcgaaattcgctaacaagatttttagtggaattttcagagctctcgaaataattttaatcaattaaaattgagcacaggcaatatttaaatccctgggaattcctttcttcctttttcttttttctttttccttagtgggccgccggcccattccccctcctctctccccgcgccttgctgggccggccggaggccacggcccaactcagcccgcgccccctcctctctctcggggtcaccgacaggtggggcccacctgtcgggtcctcccccaacctccagccgctcgccgccgcacccgcaaccgccgtcgcgcctcgcgcccgcgcctcccgggccacgtcgtccacgtcgccttcgcgcccgcgcctcccgcgcccacttccccctctctcccgctcgcccgcgctcccgagacggccgggattcgattttcgaatcccgcctctctctcctctcccactcccccacgtcggccggcgattcccgcctctcccagccacgtccggccccctctctccctatttaagctccgccgccaccccctctctctttttttccccatttcgcctaactctctcgtgctccccatcgctcccgcgccgtgcacccatccgccgccgccgctcccgctactccggtcgtctctagccgccgctaggctcgccgccgcaccgtgccgtcgccgccgttgggttcgcgtggtcgaggtccacccagtccgcccctcctccatcgaggtccgtcgccggagcccgcatcccctcgcactccggtgagcaccacctccatcgccgccttcggccatggtttccgatcgccgtggttcatctccctccctctaatttctctcttttcctctcttagggcatctcggagcttgtccgtccgtcgccgccatcctcccatggctcacagtcgccgtttgccgtcgtcctcctccgggccgg

SEQ ID NO: 8415 - DNA, 14667 bp, Oryza sativa
aaatttacctgggcaaatgccatgccaaacccaacatatgaaaaattagatcgagttttggtaagcacagagtgggaagtgaaaaacccattggtgactgttcatgcccttagtagagatctctccgatcatacccccatgttgctagacacgtgtaaagggtctcacaaggatagtcaaccattgttcaaatttgagctcggttggctccttagggaggactttcaaaaactgttagcaaatatttggaccaaagatgttagaggggcaacaaatattgcgagatggcaaaataaaatttgaagacttcgtcagtttcttagaggatgggcgaagaatacaagtggggcttataagaaagagaaagtgaaattaatggcaaaggcagatgagctagacaaactagctgaaactagacttttgactagtcaagagctcgagttaaaaaattcagtaaaacatgccttggctaagatgttgagagaagaagagatcaaatggtatcaaagagcaaaaacaaggcaaattgtaggagatagaaatactaaatattaccaaatgattgcaaatggaaagcataggaaaactaagattttccagctagaccaagaagagggaataattaaaggtaatgagcaactcaagaagtacatctctaactattataagaatctttttggagctcctgaaaagaataatttctctatgtgtgagaaccaaaaagatgatatacctcaaatatccgtagcggaaaatgagttgcttacgagtgagttttcagaagaagaggtgaaaaatgctatctttcaaatggagcataataaagccccagggcctgatggttttccggcggagttttatcaagtgttctgggaggtaattaaggatgacctaatggcagtctttagagactttcataggggcaatctttctctcaataatttgaattttggtattattactcttctacccaagaataaggaggcaaggcagattcaacaatacagaccgatatgcttacttaatgtaagtttcaaggtctttactaaggttatgacaaataggattgctctagtagcacaaaaagtcataagaccttcacagactgcctttctaaaaggaagaaatatcatggaaggggccattatcctttatgaaacgttacatgagatgcataggaagaagttagatggggtcattctcaagctagatttcgaaaaagcatatgataaggtagactggaaatttcttcagcagaccatgaggatgaaaggcttttcggaacgttggtgcaaatggatagagcagatagtgacagggggaagtgtagctgtaaaagtcaacgatgaaatcggaaatttttttcaaacaaaaaaagggttatgacaaggggatcccttatcaccaattttatttaatttggtggcagatatgttggcaattctaatcaataggtcgactgaaagaggaatgacacgaggtgtaataccgaatttggtagataacgggttgtcaattttacaatatgcagatgataccattatctttatggaaaatgatgtagaagaagccaaaaatcttaaaatggtactaagtgcctatgagaagctttcaggcttaaaaatcaattttcataagagtgagatgttctgttacggaaaagccaaggaagtagaaaaagcattttcttttctatttggctgcaagatagggtcctacccttttagatatctaggccttccaatgcactataaaaggctggcaaacaaagactggaaggagttagaggatagattcgaaaaaaagatcagtagctggaaaggaaagtttctgtcaacaggagggaggttaatcctcatcaattcagtgctaagcagtctagcaatgtatatgctttcattctttgagatacctaaaggtatcttaaagaaactggactattatagatccagatttttttggcaatgtgatgaacataaaaagaagtataggctggccaaatggagtgtactttacaaaccttaggagtgtggaggtttatggattcagaacctagagattcaaaataagtgcatgcttagtaaatggatctctaagttaatcaatgaagagggaatttggcaaaatttgcttagaaaaaaatatttggcaaaaaaaccattctacaggttcaaatgcagcaaggagattctcatttctgggctagtctcatgacagcaaaagaatcattccaattacttggacactttaaggtgagaaatgggaaacaagttagattctgggaggattgttggatgggaaacaaatctcttgagaaagaatttcctaacttgtacaacctggttcagaataagaatacagtacttgctaaggttttggaaacgataccgttgaatgtgtcctttagaagagcgatagttgggaaaaacttggcagattggtatgtcattgtctcgaaagtggctaatgttaacctgacaagtcatcttgaccaattcatatggaaaactaataaagaagggttgttcatcgtaaactctatgtataagttacttatgtttgatggagtaatacctaggaaatctttaatttggaagctaagaattctattaaagattaagattttcctatggtatttgaataaaggggtgattctaacaaaggataatctagctaagagaagatggaaggatagcttattgtgtagcttttgtaactctaaagagtcgatacaacaccttttctttgattgtataatggctagatacatatggagtgtggtttattttactttggggattagacaacccagaagttgcgctcatatgtttggtaattggttgaatggttttgaacctaaactcaaaagacaaacttgggagggcatagcggcaatttgttgggccttgtggcttagtaggaatgacatcgtctttaatggctataatcatatttctttcttacaggtaatattcaaggcaactcattgggcaaggctttggtctttgcttcttaaaaaagttgaaggagaaaaagctcaagtcaagtgcagaattttggagaagcgagttatggagttcttctctacctttggatggaattttcgaagaagaattgaagtttagcctccatttctctttaatcgtttgttaaacttttatttgtgtgtccctatgtaatgggaggagtcttatgtactcgtgactatggttttggctgtgtacaccctcgcaaggtgtagagaccgggtttaatataatccattatctaaaaaaataatacttagtttaacccaaagttcaaatatttctaaattatatatatgcgatgaccatttcacttaatattatttatttttaatccaaattaaaaatatttctaaattgtactctgcaagaactcttttatctataacatttatttttataccacattttatatatttgtaaattgtatttctacgtgtactctcccaatattatttattcaaagtttagttgtttctaaattgtatttctacatagactattatatcaatgttaattatgttttaggttctagtccaaattttataatatctgattgtatttctagatggattcttatatcatttttttgttatttgtaattttttgtttttattctgaatttcatatattttcgaatgtattctttacgtagactctaattctttattttctaagttttactcccacatgatctcttttcccaataagatttttgtctaattgttgggagtacagctatcagagaccgatgcaagcgtgggatgcatggatgacaaaccggacgagctcgcgatcaatgaggactctctcgttcgctcgtgatcaatatggactcgttcgcgatctagcggtgggcctggacatggaacgcggacgtgcggtgatgagtcgggcggtgggctttgaatacttattggtattttttttaataattaagaatgattttgaaggtatgttttttcattctcatatctttgttaccacatattttatgggatgtgtttgaagggtaattcagaacatcccttggcattatttgttcttttactgatttttttctgttttgaattaacggttctctttattcaaatcatgcatccaacggttcatatttatttaatgacgtgactcattctggtggaatcttgggatccccttttcactaatgtagataatatcaaactatttacggaaccagactatatcattatatggagtatatgatagtacaaagtaatgtttgtccgttcgtgaaaaatattactgacgaaattatttagcagtgtattatacggtgtagattttgatcaattgtcgactttacttgatatttttcacactcgacactcggtcagttagggggtatcaattgatgaaacttcgtcaaccttgcctcttctatcttcttatccaatgacacacaaatctcccgcgacttctttaaaaaaaatcacaatgacatatcctctcgcatttctactaacttgcagtgatattttaatttcatccagtggttcatgcatgcattagcacggcaccggataatccattggttcacttggtcaagcactggactgatggctatatgtgtgtacaaatcggtagttcaactgtagctttagcgaatccgagtatgcaataaaactaactataagttgacttcgagactttagcccctctctcaaaaatataagtccctcccctagggacttatacttttgtaagagggattaaactttagtccctagtttccaaacaccccttagacgatatatctcagcatctctatctccaacataaaatgtactagtagtagcaaggatggaatgggtaccctactacaacattaatttctgagataaacgccgctctcaccgaaatttttgacccgttatagtgtgcaacctgtccatttttcgttcgatcaggtctctttattttacttcccaatgcgctgtttgaaattaatacgccaaaattttcatgctcctgcaagaatttttgagatactttataataattgactgtagctttgatgagcaaaggcaggaatgtttcattccattatcttaaaaaaaagaaattttgagatttttttcctaaatagaaccaacttatacctctatatagacacaagcacacagcgctgcctaaacactagtattcatgcatgcatccatgcatggttgtccattattactctcctggatagttggattgtcactgctcaacagtcaccattgcatgccatatctgatactgcaccagcgaaaagtttaaaccaatcagatagctaatagcttttagataactaagagcagtaaccacaagtttaatttgtcaaatgaagtggattgactaggacatttatgaagtattgcactcgagctcccgatcaatcgcgtgcagtagtgtctataaaatcggccccaaattaaaatttatatatgtaaccgaacacagaaaaacgttataggatattcaaacttgaagacaacaacgaaacatgatatttgttaaccggttcaaccaatatacatatccccataagctgactatagatgctccttttgtatcaggatttccatgaccatcgataggttaggtcactggtcggtcgtctctcgcctatgctatattattggcatgcggttaaaataacgcaaaaactatttcgagaggcctctcgatctggcgctatcgcgcgacgccaggaaaaccgtcccagccattccaccacgcatccacacgtcattgtcctcgtccattagcgtgcgagaaaaagaaagagagaaagaatgagagagacagacgtggcatgtttccttagacgtggcggaggtttcaaataaaattttctcttaaactactcatccgatctacgatccgattataccgttgtgttcgtaacaattaaatctttataacaagatctcacatgattatattttgatgaaaaaaaatataaattacttttataatatatctaaattacttttagatttcactgaattacttcttagacatataaaagtaaatttagtaactttaaaagtaatttacatatatattataaaagtaacttaatataaaaccgaagtaactttgtcacggcattagaagtaaattcgttgtagggataaaaatatgactctatatagaaattaaatttaatcagcatagattagcacatgtaagtttaacaatttttaaaagtaacttcaatgttaattggaagtaactttttcattgttcagaagtaactctctataaatcaatttaatcacctattgtttttttccttttatttttgtttttcatgtagaatgagaaaagaagataaaacctttgatggattataaataacattggtggaataactaatgagaattaattatgtataagatgtaatagttccttcatgataacatggaagttactttctaacatgtaataaattacttttaaattaataaaatgtttgaatatatgcaatatggatctcgttttgtcacatattttgagtggagtacaatgatgcaaatagatcttaaaaacaatatgtgatttaaaagatataagttattaaagagattaagaaaagatatatactattgcatttttcaagtaaaaggagacactgaatggagtgcctaccactaactgtgtagtcacgtcctatgaaaaaagatatgcattaaagttactttctttttgttataagttacttctataatatatgtaaattacttttaagctttattaaatttacttttatatgtctaagaagtaacttagtgaaatctaaaagtaatttagatatattataaaagtaatttataatttttcatcaaaatataatcatgtgagatctcgttagaaagatttaattattacgaacacaacggtgtaatcggatcgtagatcggatgagtagtttaagagaaaattttatttgaaatataggtggatagaatctctcataaatagagtggtatcaaactagctatcactagttgtgtagtcacgtccttaaaataagtgtattcctctatttaaaagagaacttacatcttcaagttgtaaactgtaattgacacaaatactggcattccaaatggaaccttgaagacttcgtaaccaacttgactgaattgtccaacatatatttggctagcctttcaaagtatcaaacgacgccaggcctcattgatttctcaaattataagaagaaactgatcaagaccaaatttgaaccatacagcaacgacgagaaacttaacaaagcggcatgcgcgcaggtgaggactttcttttagctaccagccagttcaatacgagtatcatctcatccaaaagttaaaaaaaaaattagtatatactccacccagtcaaatatatttgatgattgggatgaaataattttttttacacataaaaatacgcatctatggatgatgtaccatgcatcgtcccacatgtacaaattaaagaagaacatgtacatatacacacaagcatttaacttagctcatcaaatgaagagatgaatcatacgcaagcgaccggtttgtcgcaagccgaagacccgcatcatcgcgttgacgccgtgtgggaaaaagagagacttttgcgttgcgcgcggtggcgtggatgagtcgccactggcccatcggctacgacgtgtacgtactgctctgagctagctccagctagcgtcgccgtcgcagtcgtcgtcgcgcgcgcgacaccaacgacgaaaccccggcccaccgatcgatcgatcgtggtcgtcgtcatcctccgggccggccgccgcgccaccgctccaccggcggcggggcccgctgctcgcagctggctctctcgtgatcgacatgggcaatttgcgcgcgggtgacaccgtagtgcagctgcttgcgcgagcatacacgatcgagagagaccgcttagtcaacgggcgccgtgtcgtctcctgccgactttatctctctcgtcgccgtcgccgctcgccgcctagctggttggtccacgggctttccatcttgctacgctaagctttctactactttatacagcgacgacctaattaacagatcggtccatactctgatgtcgtcatgcatgagatgtatggagcatgtatatgttcggattcagtatttctgtattcttgcccgttcgcccaaattaaaggctactccggattaaccgtccactgttggtcacccaacactctcaagaagtgttcacgtttcatcactcacagtccaaaatgatcactctatcgactgtcttcagttgtgtatcgatatcaactccaaactacaatttactcgttttgtattaacacgttttctaaactgctaattgctaaacagtgtgttttgttaaaacttttctatattgaagttattttttatataaaaaaatcaaataaatccatccttcaaatttataatcgttaatactttattaatcattcactaataaaccatccagcattgcgtgttgttaatatggagatatttaactatttgccactcttacaagtggcaattaaggatttatcattggacccacatgtcatagatacaggagagtctatacgtcataaactgtgagtggcaaattcttaattgtcacatcttaaaagtggcaaaaagttaaatgccccgttaatatacgctactccctttgtcccaaaataagttcattaattatgtaatcaaaatttggctcggtaatttatatatgtttaataaaagaaacaagttacaagctgtatatatagctcgaagtgtattattcgttggtcttattgccaacagatgagaccaactggcaactttgtgctagacaagtagacagggatgacgactaaaatgtgactatctatttgccttgtcggcagcatcctcgagtttggttgacgttctggtgcaaaggaaaaaaatgaaccaatacacatctcaggttgaccagtagagagttgctggagctgacagttctggcatatggccggttacttgccttcacatgtcatttttctattggtggaaaggttgaagataccaacgcattttttaactttgaagaaaaaagtgataaatatagtttgaagaaattccccaccaaaaattttaaatggcataagcccataacctagctaacaaaggttaaggacttgaggtatccacatgtggaaccactttatctttttcactaaaaaaagcatttttgcaggcggccaaaagtagttttctcaagcggggggaaggaccgtctgtaggggtacaactgtgaaaatcctctagaaaatccccgcgcgtcgtcgtcgccaccccgcgctgtggcccgccccgcgcctcgcctcgccgccgccgctgccgccctcccctggcctccctccggccggatctaggatgggagccgccgccgccgccccctgtgtcgtcgtcgctgccccgcgccgtgtggccagccccgcacctcgcctcgccaccgccgttgctccccctccggtggggagggagggagggaggggagggggacgacgggtccggtggggagagatgtgttgagggagagagagagagagttgagagggaaatgagtggtggggagggggttggaggagaagataaggagctctagattttttttttggtagatacgatttttgcatgcggaccacataagtttcacctgcgaaaatagatttttgcaggcgccgcttaagtggtctgtctgcaaaaatcattttcgcatgcgccgcttaagtggtccgcctgcgaaaatatattttcgcaggcggacaacgaacttcaccccgatttatatttatgtaggcggtcatttggcttcaagggtcatgtccgcctgcgaaaaaaagacccccacattaggaaaaatgatttttctagtagtgtttattaattaggttgattttacaatccttacttcttatacttaatttattaatagacatctctacattaagcaggtaattagagtatacaaagttttcactaactggttgaatgcacgtacgtaattatggaattaaaaaagagagaaaatcacattatgtgatagagagggcgcctgagagaaaaaaaatcgttgatatgatgtataatcaattctcatatccggtaaatgaattatattgtgtctattgcgcatatcattacaatggattatcgttttgattatacataaattaaatattttaagaaataagcttattaaatagtttaaattaagagtaatgctccggtgcaatctacttgcagtattctactccaagtagaattaatcttgaccgtttattttgaagggcaggtaagtaatctcctaatatcgtttaggggtaattttggcatgggatgttttctttggttcgcatcgcattaggtccggactccatcacacgcagtcacctcgctattcctcccccggcctcgccgccttgtccgcccccaccgtcgccgtccgtatctcccaccgtcgccgccttgtccgcctcctcagtcgcattgtccatatgggagcggacgagtgtggcggcgtccgagcgaggatcttgagcaggagttctggcggtagtaaaaattccgacgtgggcttcggcggcggcggcgtcacgcacgcacgcaacgtcatttgcgtggcggcatcgtctcggctcattcgtcttcttgccgttccgatcactgcgttgtttcatggattatatggatcaattaagatcttgcacgaccaactccgacgaggatgacatggtgttcgatctatggattgtaaaatgataatacccctacgcgaattatttttcctagacgaaaacacccctccacatttctacttccactaattctggtgggagtagaactagatcttaaccctataattaaatatgattgagggtccagattactttctactccgagtagaaagcaccggagtgggactgttaaattaaatagtttaaaataaatgatctgagcaaatcagtataagaaaattccttcagaaatcatattttccaaactgtagagtaaataattcatttcaataatttgataaatagtctgcccatatgtcttatataggttaactaacttttgaaaattatgtgattcgcacaacattttctccctagtaaacgttgcacctatcaaatttgtgggagatggggatggggtggtggcaggccaccctgccaccatcttttggaaaggtaaaaataaaatagagatatgacaccatatttaaaaaaactaatatatttacactaaaaattatctacatttacactggttgcacaaaaacgtgactttatataaaagtctatcaaactttctacaaatacttctaaaccatcacgtggtatcctacatatgctcctaagccatcacatgacattttaataaatttaaaaaatcataaaaattatgataaaaagcaaaaacatctcatccttaattttcacttaaattgatgacatgttattttagggccaaactggatttatctcatcgaaagagaacaatcggggcctccaccgttacatacttacattagattgatctaattaattagagccttaagcggtcaagcccatctcacctcccccgtgcatgcgatgcacggtggaaaaaaaattctatggcacctccaacaattgcaggagatcgctgtcatggtggaaaaaaaaagtttctttgacgagctacattttatattgtatacaacacaacttcgactttatgaagatggatatgtcttgatttatactgtgctgtgctaaattattcgttgcctaaaacaaaccaacaattgatatatacttgagcatactcatagaacaggccatagatatatatatagtaccatacataaacaacaaacaacttggagcgaatttgttttccggcgagttcaagcaaactgattttacgtgtgcaccaccgggacatagggccgtgcgatgcatataaacggaggtttaattagaaggaaaaatatatagtatgaaccacatatattgcaaacctaaaaactatcacatggtataaaaataaaactttgagatttactcacgtcatcacgagtaaaacttttacttccagtgtacctatgccatcttatagcaatggacataataaactaccatgattatttaaatgcctaattctaccaaacaaagaagataaaatagggtagatgttgcaggcttctcattgaagattatgcacaacctgcatgagcacaccgtgcaaaccagctggcacacacatagatatatatcactaaaaattaattacatattgagagaaaaaaaaaacaaaattctaagacatttatactccgaagactattagaatttaaggtaatactctacacgtaagtgtaatactaaacgcctaatgcacgttagctaaaagaatgttacaaagagtgattgtttggagtatataaattcctaatgtttaatgaaaaactttaaagtaaaaatatttaaatcatgatggcaatcatgaaaagcccacactgcaataataattatgattgcagagttatttttatctataaaattatattcgtaggctatgtgaagtctcacgcactctgcacgaaacttccacaatccaaaatcgatttggactcaactagacttttttatttggaatatatatagtgtcactactcacatgcaccaaggcatccattaatcaacattaagaaaatgcagcatataggaaaaaaaatcagcaggtgcatctcagctgcacgatacaataataagttataaaagatctagccaattatgctacataacagaaagaactatcaatttctatcaattgttggcaaacaataatatgggcacaagtaccattactttcacgtagggatttctaaattattaattgtataaataattattttcatcatactactacacaaatggtttttgcgagtattcttttcacatgtggctcaaatgtgcagcctcgtatgtggcgagcctcttgcctcaaactcaagggacatatttgaaaataacttttgccatccttttacagataactattttagtggagtgcttaacccgcaatgtagcattgaagcttttacacataaaactattttattggagcacttaacccgtaagatagtattgaatcaatctactcttttcgttatagaaaaacatagctcattttatatcataataatattttattctttcaaaatttttgtatttctcttcataaaagtcatattaaacaatccaagagacaaaggtcaataacaaatcaatgaattcagtaaattgttatccttcaaagtagctccatgggttttaccacaacctgcatgtatgagcctctaaggtggcaattcaaaatcagtagtctttcttataataatatgattaaaagctatattttttcctaataaattgttattttaagattcatattgactaggtcttttctttaaaatatattagagtctcacatattacagagaagtgttatataagatatgtatatttgatcaattaaaaagattgctaagtaagtgttaacaaccaaatttggtagcatgtgtatcaggaaaggggatttgatcaaagaagagttggaggcggagatcgagttctggaacagagcaggaatcggctggagtcctgattggctatggctaggatcggctgagattgagttgaactagataagctgatatagccgatttcgacaatacgacccgtgtgcaacattgggttcgagttgatgtgcttcaagatgattgccacgcatagatagagtcctgagaaggcaattgtatctattaattaggatattttatgtaacttccttagagatatgtttgggcaaaagtctaccgcaaagacttgtgatattttagagtttgttagagataagagtcgtgtccaatatggacatatcttgtatttctcgggaataaatggaccccgagccctatgtaaaaaagattcaatacacacattcaatacaattccggcgcatcgccaccttttgctttagttttatttcgacgagttcttgctttcgggttgagctgcatcggttccgatcttcaacaagaggtaaaacttgtcgtgacgaattatgttcttagggattagtgcttccatcttcatgacactctaatctcgtttatataattcgccgagttatcatatatcttatataatctctagcaacatcgccatctaacccacaatcggctaacatctattaacagacggcaaccgattgggttagatgtcgacattgatctagattatataagatatctaccattctatgaatcttctagcggcttgattgtctagatataattcttcttttcatacttaatgctgtatcaattgagtttgatctattgagtcgtgcttagaatattgatctctagcctgccacccagttgtcgattagaatagcatcggagtttcagccgatcgtatctgatttaactataattatctctatttgcttcactgatatgttaaatctaccctttatgccaagatattgttgtatttgaatatattaggtttttgcttgatattctatat

SEQ ID NO: 8416 - DNA, 19881 bp, Oryza sativa
aggaacctagttttagccaagtctttaagacctctgctattccaaaaaattcctttcattgtaacccttttttctacccaacttgaaacctactctcccacgtatccttttaccacctttcctgcttttctttgggtatgatttgattaggatatcatcaatttcacaacttaggtgaaaatcctcatcatccatcacctcatccattgtatcaccacataaatggttaagcagatcactgtctacatattcctcctcctcatcattacaagaatcatttagtttttcaatagaaggagaaactttgtcacctaattcttccgatctaagaaattccgtctcttttaaaattaaaactgaatctgaaactaagttgctagaatctcctaggttcagtccaaagcatttaaattctcaacaatatgtgcttgcgaaaatgaaagaaatgaattcttagattcattacctgaaagaagatcgagattcatccaaaccttccttgatttcttcttttcaagggagtgcctcccgctgctgcccatcaacctctcactccctcttttcggggcaccaacacctcttctatgttagctagttgttcaaccttttcctgctgcatgactgctccatctatcttctcttcttccctctccaccctctcatactcctcccctagcactctctcaacagccacatccaacacattttcagccatctccaaaataacatcttctctcccttgatccccaccttcctgcacctcattttccttcctttccgagttttctttattgtcatcaatagccatatcatcattctttgttcttttagactccctctccttcccttcattattttctttgtattcctctccctctgaattaccatcctcctcatctccatcccaatcttccaaattaaactccacctcctccccattctcatcaacccctttcttttccacctcaaacttcaattcaaaataatggtcaccaatcaccacgtcaatcatttttgggatcaactttggattgagaaccgctacaaaaaacctcccaaactcatttttcctagtggttttcgtatcaactagctgcgttgcccccaaaagagagcccattgcccacagcgtcaagtactcccttaatttctttctcagcccaaaaacctttacccaaaccttaggcaaaagaaaaccttcctctttttcgaaccactcctcgaattctactcttaccccagtagccactcctccttcctttacatcagctctaccaaagttgatagcacgctgatttggaagtatattaaatgcggactaaaaataaaataatgagagaagtgtccgaacttttgcttatattaattaattggatgctcttctaggaacccatattaatcctacgaggtgaaaatagctacaagttaattgaaaattctttgaatccgtacgttgatcgaagaaaaataatataggttgaacatctaatctacactaaaaaaatacaactaacaaataagattggatccttagacctatactaatgcgacaatggagttcatagcatccaaaccataagcaacaacagcataataaaatataagaaaaccaatgataaagaattgttcatgacgatggacaatttttatttgaaacagattgaaactatctcgaatatacaataaaataagccaactttagtaggtgaaagaatgtcacaatagagataataagaaatgtcactaatagtctaaagataaagacggaggaagaaaacaaacaaatataccataatgtttttatatatgcacatataaagagttctctatggacataggaattaatatacttatctaaatattggtttgttccattattgtcgaaatataaattgtgtttccatttcaatatattttataatagaatgccaaagaacatatgctattatctgagaaaaaaatataatgatgctacccatgtaatagtatctatatgaaaattggtggttatcaaaggattttttaaaccatataaaaccgctatcacacccagttcaaaacataaaaattctcaacaatacggaggaaaacctgaccagtttcacagcgcttgagagaaaccggactcgaaggaaagtctcgatatatacagttcccaagtcagtatgcaactcaaccagtcaatgcctgttggtttctgccttgaaaatgtgcatgcctctcgttatatatctctatctcgtcttttgattcttttttataccatgttgtgaaaattgaaggtgctagggaaccttgctttcgataggtgaacgaattagatggacaaaaagccattagacgacaagacggaataatagccatgtcggtttaggtgtacggagctttcaggtaaacctcacagctttcttcttatgcaatacgcaaagagaataagagatggatatatacatctcgtgactttggctcaggattgtgcgtcaccgtcgaacttgcagcctctaatgttgaacttggttgacaatttgacattatccagcaagaaatgacctaattccgtttagcaagaagtgaccagatcaccatcgcaacactttgaatttattttaacggacggactaaaaaacccacgcttatataagaccctgaaaacttagccacactagtaaaaatcaatttttactagcagagcattaagaaaaccgtatgaaaaatacatctatttttacaagtagtgctcttaaaatatgtcgtatgtaagagaatcaatttttagcggcggggtcctaagggccccgcaaacaaaacttgtgggagagaataaaatagcatgtacatccccaccaaccaagccacggaaatcattttccccttgctcttttctttttttcctcggctatcaccaccaaccccggacctaacccctccctcaatcacttctctctctccctctctctctctctcgattcttcggcaagcggcggcggaaggaggtggcggtgccggtggtacgaggaggcagtggtgctcagttgtggcggcgcgggggaggggttggcccgcagcagcagccttggtgacgatggatcgtgcaaatctggcggcaaaggtggcacggtgaggcagtggtgcttggtggtggcggctgcgcgggggagtgggcggcttggcggcggccggcggcatgcttggcgatgacggatggtgcagatatggccctggcgagcctcgggagtggcgtttctaccgccgccggcctcgtctttcctcgtcaagtctgcggcgatggtgaggccattgacctagcaacgatgagctcgttcgtggcaggtagcggtaggggtgaaaacggtacggaaacggacagaaaccacctttatcgtttctgttttcatatttttttttcggaatcaaaatcggaatcggaaactccggatacgaaaacggaatcgaagattatcgaaaccgaaaacggagcgaaaaagaaccggtgcaaatatggtaataaaaatttatcggaataaaaaacccctcaaactgataaatccaattctcaagtcttaacggtcaataattcaccataaaatataatcatataagtccaatttttaagtctcaacagtacatcacaaaacacaatctatggaataaattatcttatgtttaaaagagtaatgctgttgataaatcccaatgcaggaaaaaatattcttatgtaacttcatatttgcataacaaatatttttaaagaaataacaaccaaacaccatggtattcactattcagtgcttaaaaaatcaagggtatttcagtctcaaaattttcggaaattccgagaaaattttcagaaagtttccgaccgattccgagttctgacagaaactgcccttatcattatcatttccgattccgtttccgagaaaatatttccgaatttgtttccgtttccaaaaaaaattccgaccgacagattccgttttcgaaaataggtccggaatccggaaagttttcgtaccgttttcacccctaggtagcgggcagatccaaggtcgagctctacggcagtggcgaggcctttgacccagtgacggcgacaacggcagatgtgctggtagaggaggctaattgggaaaaccatttattgtggaatttgtgctcattgatatatggatttgtattgtgatatgtttttgttcttagatttgctttgcaatgtggattgggaatacagggctactgcatctgaatattttcaattttttttcaaaacttctttgctggtggttagagagcaaatgcaatgcatattttcaattttttgaaccaaaataagcctcgcaggtggccggcttaatacatacgctagtgaaaattgattgtcactggcagcccacgtaacacgcacccgcaaaaatcgattattgtctgcggccacgtaacatagctaccatcgataatcaattgtcgctgatggttgaagagttgcttgtgaagaccttttattttctctggccttttgtcgcaggtggttagcctagtcgctagcaaaaattgattttagccgtcagaaaaaaaaccattttttaccgtgcacaaaaccttatttggaggagcccatggataaaattattttttactactgtacctcattttccacgcactactactaatactacgatttttttcagtcttgcagctcatgcaagggagcagaagcccaagaggccgaacaaaaccagcagcaaagacagcaacgcatcaaaccatttggcccaagtgtgacccgcatttcagcctctgacgcgtgatggtcagaaacgattgagataagttcactttaagtctctcgtcttaacaccgagtttgaattacatcatcgagccgtaataccaaatataaggtgtctctcaatttgtaaaacgatgtacctgaaatctcagacaatatagtgtccggttttagctaaagtgacgagtaggacccacgtggaccccacatgtcaaggctattcccaaaaaaatagaaaaaaaacaagtgaggcccacatgtaagcgagagaaaatggtgtgggccccacatctcttctttcttttctttttctcttctcttctctcagcgggcgtgcagtagcaggtgggggagaggcggccggcggtggagtggcaggcctgttcagctagcgtgagcatggacgtggccttgtcaggcacggtgagtagttgccacccggggacggtgagtagcgggcggtggcgcgggtggtgggctgccgcggtgaagttgatccaccgacgaggaggcacaacaccgagagcggcgatgtttggtcctcgtcggagtcaatggccggcaggcgcaacccgcgaggtttgtttcggtggcgacgaggcccgggaggcgaccgagagaggggattttcccattttggctcaatcatctcctctctcccgccgctgccgtccctagatttctagccccatacaggtgaatgggatggaatctaggcaccgttgctgatgttgttgctcctctactcgtggtgctcggtgacggcgtcaaggtacaacgggaaagggtgggactgggaggaggaggagtggcatccgaagaggggggaaagggcggttgtggcaaccatgtctgcaagccaagacccgcggagagagggttgttcgtgctggacgaggggcataaggtggtggagttgaagggtgtctagtagggtcgtgcctgtggtacgcggccgtgcccggcggtcgctgtcgtgccgacccgcggcaacgcgactggtagtggtcggcaacctttgggtgctgctgggagggactcgtgccccgtctcccgctgcctgtcgccagcaacctttgggtgctgctgcccgtcgcccgctgttcatcggccgtcgactcctctctccccctttcctcgtcgtcgtccctgcatgccgatcgggctgagggagtactccaggggaagcccttccaagttgcggcgacgacaatgtccgcgcggcgccggcggcactccaccaccggcacaccaagctatggtgggggcgggctcgaatgtggcggcggtgcgcgtggtcaaaacagctgtcgccggaagctagagtagtgggaggtagggcactactcccttcttttcttctcgcttacatgtgggcccgataaattttttaattttttttgactgactaggattcctcgttagcgaaactgcccatatatactgaatgagacctatttttcacaattttatataatttaggggtagagatttctgatattagatattagggaccttagacagactcgacgtaaagttgagttacgttaggcgaacttattcctttcctcatctctcgagtcctgggccacaatctgtgggaaggtctcagcgattaaggctcgtttggagcactggaaagatttgtgaatcctgacagaatcgaactgtctctaactattatcaaacttatgcaaaatcccaaaccaggcagtttttggtacacaaataatctgctcactatcatggcagctagcaaagtttgcttcctgtacttatacaatctttggtagctcgatcgccagaaaacaatcgccttaaacatcgatctgagaactggattgcgcaaaaacaacacttgagtgaaaaaaaaaagtcttcaactaactaaactaaggacctactatgtatatactgtatgaacacatgtatacagtacatgatattctgtacgtatacacgtgctaatcaaccgatcatgcagtagtgttcttggcttgctccagcagcttgacaacttcagccatggttggcctgttgcagggctcagactcgaggcacttgtctgccactttgaacaccagcttcacctcctccgccgggaacgacgactccagcgcgctgtcgaccgcgtgctcctccctcttctcctccatcgtctccttcacctgcacgtacacaccgattacccatgttggtatgttacaaacttaattaatcacgttattatcttgttttaatgattcgttgattaggcccaatagtagtacgtttgacagataattagtatacgcgtatttaattattcattgatcgtgcatgactttgtggtttgtagtacctggtgatgattggtcactgctaatgaatgatcagtctcagcaacaaaacactgtagatgatgtgtgtacgacatgaaatgaaatggatggaaagcttttaagttctgtttgacacggctctggatctaaaatcttttaaactgggtatttttaacttcacaaatatatgaattcgagtatgtgattacgttgataatatttagataaaatcattttgtttcattttaaatgaaatataagattttaaactttataacttaacaaacaaactttaaatctaacgcggatatagaatctggagctgtgtgatcttacccaggtcactagcctcgtgccgttctcaagaaacgactcgtccgtcggcctcatcccggtgaggagctccagcagcaccacgccgtagctgtacacgtcgcccttcgtcgtcgccctcccggtctcgaagtactctgggacgcacacaacatgttcgatcaaatgactgacagtggttcagagaagctggtgatgaggcgaggtgaggtgtggtggtcggacggagacggacctggggcgaggtagccgaaggtgccggcgacgacggtggtgacgtggctatggttgggcttcatgagcgtggcgaggccgaagtcggagaccctggcctccatgttgtggtcgaggaggatgttgctggacttgatgtcgcggtggatcacgtgcgggatgcagtcgtggtgcaggtacgcgagccccctcgccacccccgccgcgatcttgtgcctcgcctcccaccccagcgccctcctcgtctcctccttccctgcaaccacatcaagaactcaggatttccatggacaaaatcgccatagctgcttcgagttctgatgtgtatatgtaccgtggaggatggtgtcgaggctgccgttgggcatgagctcgtagatgaggaggttgaagtgcggggcggcgtagtagccgcagagcgggacgatgttgcggtgcttgatgtcgcccatggtgtccagctcgcgctcgaacccccggtccatctcggcgctgccgcggctcagcttcttcaccgcgaacgccgccttctcgccgacgcttagcctgtacaccgtgccgtacccgccggagccgatgatgtccttgttcgagagccccatgatcatggtcaggaacgacttggggctcagcgactgcatcgccgccgacctgaacatcaccatcttgccacctacagtacgtgatgatcaattgatcattcgcatcaacagagaagaattcagcaagaaaaacaagtcagaattaatctctgtttttttttaacctgtcaggctgttctcgatgatccgtttcttgcgagcccacttcttgtagagcaggaaggagatgagcatcttggacacgatgaacaggatagagcagattgtaatgtagagtgcaaccatggtagtatgcatcttgcaatcctgaagaaccaagcagcagctgcaactttgagcccttgatgactatatctatatgcaaaaaaaaactatattccccttgaagaattcagtgaaccctgaagtctgaacccaagaaatgaacaaaaaatcaagctctccaaaaagggcaacagagaacaacaacaaaagtcactgcatgaggctgtatgaacgagctgttctcagctcggaagcaacagagatgaatgaggaggccttcttcactgctgcatgggctcagctgctttggaatcagcaagttgtggcgatgtgatgtgaacatcatggagattggacacacatgtgagtgctgtagaagaagcacaggtgtctcgatgagcaagcagttgggcaggattgcatggaaaaagaaagtacattggccccaatcaatggggactggttggatcatgtgaatggcaggcagagtcatcgctcatgaacaccaccctttttattaatgggcgtgccaatcctaatttaattctgctactgtttatccaattccttttgttaatttcactgttgtttctttcatttttgtgtagtattttccatgaggttttacttttcagagaaggtagaattctactagtagtttcagaggtaacatcagaaaacaaccgcatagttactaacttactactgaatatccagattagagataatattagaaatttaggcatgaaactattttattccttggatctttttctgtctattgttagtcaaaacgttatcgaagcttgcgtgtactaattttggcggctgactctgaaactcgaacgttcacaatcacaaagccagcagttagatggaaaagcaatttctagtttggcagtgtcggtgaggtagggctcgattaatttgtcagtttgaagaaatttgtcctaagctgattcaattcgtcagtttgtgcaatggtgtacgagctaaaattgttgaaaaggctggccttgactagcttccaagaaaataggggtgttagctgccttttcccctgtgctgtgtggttgtaatcctggagctgcacaaggaccctgccgcctgtagtagtagcaacatctatcaaacttttgtttcaaatcacgtgatcaaactggggaagagctggcgaattctggacaataaggcaacgcgttgtatgcataattgcatgtatgtgtagtttttttttttttgaaaaaaatggttttctcacctaaaggggatagttatgataaattttaaaataaatttacgataaatgtactatatacctatattttttaataattatctatattgtattttagatgaaaatgtaggcgaagggacatcccctcgaggaagtaaaaacagtctccattttttgttctccactattgccatgcctatgcgttccaataagatctggatgaatatgcataggaatggttttatatataggttgggttttttttatctggtttatttggtggattgattttcacacgagaatattggttattgtaaagtgagttttttttacatgggaaagtgaaatggttagggtggggagaatggatgactccacttttaccataataaagataaagctaaggtgataattgtaaagtagattatttagtttaattctacatttctaagcactgattctgggtgtttcttaccaaactagcctaagtaaaatacatcaggaggatatcaatgaccatcgaccaactttgattatatcatgtttatttccagtggttgtgttatacaccaattaaatataataaaataaacttaatataatttttttgtgtggctttcataaaagtagtttattattacctccatctaaaaatataatgggtacatgtattttaatatttaactcttctaatatatgaccaacaattagtttaatataaactatacaccactgtctagctagccagaatttaagtttttctttggacaaaaggagtatttgaaaataatatcattgaattgagtttcgaatgtactttcctatgattatgttctacaaaggtgattttacagtgttcttaaagaggtatcaagggtatcacattctttctagtgtaaaatttagtatctcttgatatctccggtatttggaggtaaaaaattactaatattggagaactgatctttgttcggatggcaaaaatcacattagtcccggttcgaataggaatcgggactaaagaatatgttcagttctggtttataagcccaacgacactttatgatctttagtcccggttggtaaacacaccaactaaatatcatttttagtcctggtttaattgttgtcgagccgtgtcaagccaccaatgatctttgactaaagataaacactttagtccaggttgtttataccaaccggaagtaaagataaaaaaaatggaacgagatagccgagccgcatgggcttatctcctcgtcgtccttatcttcttcgcacggctgagacaaagaacccccgcttcgccctcctcctccccctcccctcgatctcttcatatggttgagactacggcgacggcgggcggcgggcgcgcgctcctcctccgcatccctctcgctcctaccttacccctcgccgccactccccctcctcctcctcctctccctggcggcgccacccgtttctctaatgccgtcttctcctcctccccccttccctccgtcctcgatgacgacggatgacggcgaccaccgtggccaagagtagcgaggaggtgcccccggcgagagggcttcctctgtatcttcacccgccgtttccacatggcccagagcgcaaaggagagggggccgggctagggtgcggaggcagggcggcgcacgacgataggtacattgtcttctctcctatactacgtctcatcttgtcagtcgtcacgttcttgttctcgatccgagtttttggttcgcaggattttgcatttttcttttcagttcggctcccgatgtggtgttcggtcggggtgcttcatcgatggaccgccacccgccgcttgccatctccccgtggaggctccgtccacgctcgctgctcgccgtttaggaatttggttgagatgagcggatccatgtttcttttcttccctagcggttgttcttgatgtgctagttttttcttgtataaatcctaaggaattacctaaggaatggttgattatattggttgttgtgcgatgcatcgatgcatatctttttaggtatttagggatggattgtttggtccgatacaagcagcaaaaaaaaaacaatgaaaaaaagaaataaaaagacctttagtttcggattgaatgttccggtttacaacccaggactaaagatgagtttctcagtagtgttaattacttgataaattaaaagtcaaaaactagttttatatatcacgctaattgtaaccatctcttatattttggaaaagaggaagtactatatttctcataggaatcttggaatatcccaagaattcactttacagacagggcgtttgcaccgcaaaatttcactagtataaagctttgatatatacgtgcatgtacatacagctgtcatatatagtatatatagctttagtacgcagttacacccactacttatatatactgatcaactgatatatatatatatatatatatatatatatatatatatatatatatatatatatagtgctcttgccactttgtggaaggctagctaggccccatggggttttaagccatatatctttgacctaactaagtgaccaatccaacaggagatcggcgacctaaaattgatggttataattaatcttggcaaaccatgcataggcacttataagccccggaattgttatacaggtcaggatatatatgttgtgctctagaagacccctgtgcccttcattgccgcaaaaaggttccagcgaaaaatttgaatggccatgatccaaaacgagggtctgaataatttgccatgcaatgcaaatgcaaggccgtcttttgtcacctgaaaacaagctagctaattccctccgtttcaccatgtaagactttctagcattgtccactgtatgtctatacgtatgtggacaatgctagaaagtcttatattataaaacagaggaagtagcttattagctgtacccaactctagccactacatcttgcaccgaacagacttctcaaaagaagatgatcatgatgattaaggagagcattaagctattaattatcacttacagtcgatcgatcgagccgtccatctcgcaactgtatggcgagcaggacgtacgagccggtacttttggtacgacctcctcgatcacatgtactaatcagtaatcattatccatctatcctcctgctcgccactacagtactatacgtacctaattagggggtttagcccctctctcctaaacaccccctaagctacctagcaaaacagcaatagcatatatatacaccttccggcgcaaaaaggatcagcttttatatacacgaatgtctagctagattcgtatataaagattaagtttattttaaacagatgaacgtatatatactctcagtatgtacgtaatctcaatctaatccgtacgtgtcttgtttgttgccgtggcaattggcaacacacaatcgatgctcagctcagctcgcagcagctgcaagcacacgttgcgatcagcaaatcacctgagaatgaccggtagagatcaacggccgtccagatcaggtgatcactagctgaattgcttgctcaggcatgcaggggctacctgggcctctcgtacgctaagcccctgcgtgcgtgtcagcttgtcattgtcatagttgggtaatgggtatatatgttttttcactttgcaggagaaattaaaccgagagtatattcgggcaaaaataatttctggtacgctcgagatcaaccgaaaccgccctgggggagccggacgaactcccagtcggcatcattccaattccagcatatgtgcaactgacgcccaaaatgaatcgttacatcgaccctatcacacccggtcggccgccaccatcttcccaagcaaatttacacccatatctctctctttggtaaatctatagctactgtactatatatacatgcacacacaagtgtatgttacaatgtagccatgtaggtgactaggtgtagagcctctgttcgtccgtgacaacttttacggtggtccctactggtcgtagtagaactggtgcggacaaccccatagcttttctatggttttgaactttgaggagctaggttgaagtagtagtactgaggctaccagctagcgggcgagaggggggcaggagaaggggtcgtcgtgggggagtaggtcgttggtgcggagcacggtgaataccatgagagcgagcgtgacggctacggagaggatggcgagcgcgagcatgagcacgctcgccgccacctccctcacctcctgcgcgtactccgccgccgccagcgccagaaccgttagcgggaatgagtacgcccaccacgccacactgaaccgccgcatcgccctcttaaacagtgtcggccgcgacacctgcatcatatccaagctattagttcatttattttgtttttaagttaaaataaaaataattaaccatgcttcatgacatgcattattgctttctaaagattcgtcttttttttcagctaaagagaattgtttatggcttaattgctaactaagcatgattagttggccgtgagtctggaggcactggcacgatacacacacatgcataaatatatattttagagaaagaggatgatcagcatacgtggcaccctagtggtatcctacagtcctacacgatcctagttggatcagttctttcccagccactaaaattaatgaaaacgaaaagcaaaaaggagatagatagatgcagagctaaaaagctgagggaaaaaagaacctctcagcgaaatggatggagcagaatttgatcatttcgagaaaatgcgcatcccccacttctcttcccccatcctttagttttctctcgcaatatctataaactctacctatatcatgcatctatataggacttctattttcattgtcaaatgcatcctaatttctaggggttaaaggaggaatctttgttgaaagttttggatcaatggagagcacatggtgctgtggttcttttagaaatgagaatttttatgatctttaagaatactagaaacaaatgcccgtgctttgcaacgggtaaatgttattttaatcttattattattattatacgatttagatatggtgaaattcactgtaagaatttacttatatttttttttagaaaatcataagctgtaattaggagtctgacttttgtctcaaattagattgcaagtttttttaaagaaatttcttatccgactccttttgtatttttaaaagcaaacaaaattaaaaaccgactcaaacaaagatgacgtaccaaaacaccgataaaaatattttcaattttttataatagtagagatagagatatgatactaaaattttacattatttaaaataagatacctctcgatattttttaaaatggtagagttaccctttagaaatggaatttatcttgagcgttggataaaaaatgggacggtttggatcggatgccatgctgactcatcacgttcatcctcggcgtttgcgtgcaaatgcaatataatggcgtaaacgcgaggcttttgctgtggagagctagcttaattaccagggaggcgaagaggaagagggagaggaagaagagcatcttgcagcaggtgtcgaaggaggccgagatggcgtcccaggcgagcgacgccatgctgggcgcggcgaagaagaggaagaacaccgggcggagcatcgccggcagcgagtcggagccgaggaaccgctggtacagcgtgacgaacagcacgaggtagtgcgcggcgcccacggcgaacatggcgacggcgccctcgtgccaccccatcctcgccgccgccctcgccgtcaccaggttcccgatcaccgtgatgtggctggccgggttggccaccatggacaggaacttcctcccccgggtgaaccactgcccgtacaccttgacgtcgagcgccaggatgggcagcgagaacgcccaccagagcgcgcggtaggggcgcgcgtcggggcggaggagcagcggcggcgccgcctgcagcagcagcagccaggagatccacggcgcgaagaggtagttcatggcaacgtggtgcctgaactcggcgcgcacggcggggaaccggaggaggcaccgcgcggcgtagagcgcgcacagcgccaccagggtgagcagcgccagcgaccagaggaggacgaacgccgccgacggcagcgaccgcaccacggggcccagcgcccgcgggtccgtcgacgcgtcgctcagcgtccgccacagcagcgcctgccccgacagcgccaggctgatccggaagtaccccgcgtggaaccgcgtcagcatgccaaacctcgccaccaccggcgccgccgccggtttcgtcgacgccacgccgccgtcgatggacgaggcggcgaagggtttaagcgaacgggacgaggtatccatggcgactcgactcgatcgatcgatcgatcaatgtcagtggagaatgtgttgcgtcgtgttaagcttttggaagtgagatgggtatttataggggggtacgtgacactgtgacggctagtgttgtgaagccagggtgcatgtgggtgaggcggtaaccgagggtggttgtttcctgcaggttttaattgattctggggttttttttctacttttttatttttttggggtagcaaataggttgatcagctagctgaaagatgaattatgctgtgatgtgaaagaagaatgcctatgcaatgtgggcaggttacttctgtggtagagactgggcttgtactttgggaaactattcttggcttatgtttcctctgatttgggagctagttagcccagttgctctgatttggctagtgttgtctacaatgtttgaacattaattcttcactatagaggttagtacctcgaggtatctgaattttacactaaattttttggtaccttcgtttcaaatcttacactagaaaatatgatacatctcaatactttttcaatgatgataaaatcaaccttctaaaatatattgcatatccattccctgccccccgtctctctcactctcaaaagtttttgtttcttgaaaattcactatataaaatttattactaacaattgaagtaaaaatatgtgtttagtttgatggatgtaatacctttatattcgtatttaaaaataatttatacgatattaattttgcaattgttaataatatattatgaactaaattaatggtcaatatatataatggtggagatcatataaaaagctagtgtaatacactttctatagcttaaacaattcactttcctctctcaaactattttgttggatcacttatcacataaatatttttttctcgttttccctcctgagctattaaaaactattcaattagcagcttaataccatttttcttctttttttctctttatacaattcgtaattcaatatgcaattgtttagccatagatgacaccattgtcaatgttttgaaatatttttaatctttttccgtaactgttcgctaaaattttaaaatctcaatgtttaaataaatatgtctcggtgtgtgcttccaatccatgcaaaattgcaaaccttggtaaaaagaatacttaataagagataataagttgtaatgcacctaacaaccctactaaattttagtgcgaggcatatataggacagagagaaataacgagagtaaactaaaccctttaatagtttaggggaataaatgagcaaaagaaaatagcttaagggttaagtgatccggtaaaatagtttgaatgagtaaaatagaattttttttcctatttttagaaaggagttagcactatactacatactaagcgttatttccaccagttagcaaatggatgaaattaacaccactggtaccgctacgtgctcgttaagaaactgtagccaattaaacaagaaaacatcacatcgtcgtacagctactactctcttctatagatataaaggattttggacggatgagatatcccttatgttctgggaaactgtagccaattaaacaagaaaagatcacatcgtcgtacagctactactcccttctatagatataaaggattttggacggatgagatatcccttatgttctgggacagagggaatagtagttaattaatctatccacacttctccatcggacagattaaaattgctactaggtacaactcactctcaagcctcccccaaaaaggtgatctctgtgctgatcgatcagaaaatccaccgattagtacataacctaattattaacaaggtcgaatcacgccgtgtatatatataccggaaattttatccatgatcagcgcttgcagcaacagcacggcgcacctcgactccagagtcgtcgtcggagtcatcgtcgccggccggtcgccggcgactttcttttaatttgcctgatatcgcggagacacaaccgatggaaaactaaagcacgcagcaaaatatgcaggtgcaggcaagctagctagcatgtccactttggcgtcgcattgtggcctctgcaattctgcatgtacacggagtgtgacagacagagatgaggttttgatcacttgcagatatgagatatactatcctatctctccaaatccaatggcaactacttcaccggcagtggaattggaccaaaaaaacggttagcacgtcctatgattgtgtgctagtaatgatcgagtctctgattcatcacttgtcaaatttgggcattcagtgaggattgaccgtgctgataagcattcaggcaagtggtgactggtgtgttgaaaagcttgcatataatgcacaggatgtatatgcagcagattcaggaagtcatgagaaatataagaaaaaaatggtaataattgcttggtgtcaaaatagagattttcttacattaatgaactatttgaaaatgtgcatttgtttttatttctagagagggcctgaatggtgaatctgcatagcaatatatatatatatatatatatatatatatatatatatatatatatatatatatatatatatatatataatgtggattaggagattctaagaagatttctggtgatgagttagtgcacacgtcatatatacggctcgatcacgacctgagtagagtgaccaaacaaacagcacttgatgggataattaggtagtaaaaacttaaacgcgcagttggcgatatatattatcaaaccgtcctatccgtgccgaatatatgtatattcagcaaacaggcttatcagaaaacgatgtttggctagcttcagtcagactgaagagctagctagccagcaggataacctatctgcagttctgcactttgcaatttgcatgcgcatatatatatataattaatctgcagagatgaggaagctaatggtggggatgtgagtggatccagctggttgtaaaatctgtacacaacaaagttactcgccgccatctgaaattctgaattgcttctttggttcaacgcatttggaggaagaaaagggtagtttccttgcacgataaaattgccatgaaacaagcaaaaagcgatcggaatacctgaatcatggtggcgattttgacctgaaaggagacggggacgtacgcagttacacattgcttcaagttgcgaaaaatgtgtagagtcgccctgccgtttttttgacaaattgacccttttcaaaaacttaattcgaaactaacccctgtcaaaaacttcaaccaaaactaggccgtcggctcagcgccaagcgcattggcgctgaggttggccgtgtcagcgccaacgggactggcgctgacattgtgccaccgtggcggccgggccgatcccctagctgacgtggcagctacctcagcgccaaccgcttcggcgctgaggtgcccaacctcagcgccaagtaagttggcgctgaccttggctacttagagcccggccgaggccgccccagccagttcttcctccgttttttccccagccgcccgcctagggttcggtcgccaccgcgttctcctcgcccaatctcccccaaaaacctctctaatcgaaggtgatttgtgcggcattgagtttgggat

SEQ ID NO: 8417 - DNA, 21233 bp, Oryza sativa
tagaatataatgagtatcatatgcattcatgctcatgccaaaactgactctgtacagtactctgtgctaaaatggtttggcagaataccctgtgactaagcaacaaatcaaactaccaaaaagctaatttacattgatatgttaatgcacacgacgatagattctggtgcagctactgaccattaaagcagtcatgacgagcaatatgagcagaccagtaaaacagggcaagactgggttggaatctagcgttcaccgaagtactaattttagattatcagtaagattatttccgtacaaaacttactaagatcatttcatatgatcaaaacatttataatgagttgcgcgtgatagagatagagtgctgaatagtgcgatttagtcaacttactgactctaaacgttccaaaaatgaagaataatggacaaagtaatgaattctagccgtgcatgaacatgaagctgtaatttcgagtgcttatttcacagagtgcatgcatgatcaggcctagcaaacaggagacatcttatccaggtgaatccttaagtacttcatttccatgcttaattcagagtaaagacatgcatgctacatcaaattaggcgactaattaattactcaagaagacaccaaacagaaaagcagtagaagagactaatcaagtaatcaacacaaaaaaatcaggaaagaagattatacagttacttaccagaatttgggcaagcccaagcacgaacgaatcgggacgagtggtaacgcatcggcgggttcagcatcgcgaagaactgccactccaggaccttgcgcgtgtacaggttgacgccgaacagccgcgagcgcatgaagaagtaggccacgttgccggggagctccgggtgtatgaacgccaccgtggggatctcccgcggcagcttggtcgccttgtagccctcgtcgttccagatatccttgacgagcggctgacagtcgagacgccaagtcccggcatcctgatcgaccagcgtccacatgctgaccaccggtttgccgtcgtactcgcgctcgtggatccccatgtaccggagatcgtcgcctctaaacccaacgcaccggcgcttatcgaggtcaggcgtgcccggcggcagctcgcaatccggagggagcgggacgaagcgcagattctgacgtctcgcgctgatgtcgcaggagaggagaccgtaggagagatccacccaccagactatcgtcttgtgcacgacgacgccgttgccgccccagggacggtcgcgcggcgggtagtcgaccacatgcgtcgcccagatttcgggaaccgagaagtagatgagcagggcggccttgtctgagccgactatggggtggagatcggcgacgtggaagatggttttcgtgatggcgacgagaccagcgttcccggggtgaaggatggggaagccgtggtcggggaggcgggtggacttgtgtttgagcgtgtcgcagatgaagtacgccttggggaagccgtggtgctcgccgagtggcccacggtagaagccgtcgaggacgggcggctccggttcgggcccctggctggcgtagaggaggaggcggccatggcagtcggcgccggcgacgaaggggtggtcgtcgatggtcttgcggcgcggcgcgatgctccggtgcacgacgaggcgggtggcgcgcggagctaatgcggccttgatcacgttgtccatgccagcctcgaagtagtcgccgcggacgacgtgcggcacgcaagccaggagcacccatttccgcccgtccttcttctgccagcgcttgtccttcaccgccgtatccaccttctccattggcggcgcttcggacatggctggagagagagagagagagagagagagagagagagagaggggagagagaggagggagagagagatttgggttggtgtttggggatttttttttttcgcagcagagtggattcgctatttggtctcggggagaggccggccgtggtctggtcacgttctgtgccgccgttgtgtcgtggtttatatcgccgactcggcgtggagttcccgtggatggcacgagccggtacatttcgtgctcgagaagagaacgcaaatggttcatcagcgctagcgtgcgcgtgcgcggcattgccatgcaacggttagaacgagcgcgaggttcagggtagcgaagacatagcctggggggcgcggtggcaagcgtgagctagcacaggggagaaggggagaagcggacggcgagcatgcacgagtgcgatgtaccgcgtgcgcgcgcgcgcgcgccgatggtgacgcctgacgcgcgggcgcacgggagtaccgagtacgcgacggcgccagccgcatggacatggacaggcgcgcaggcgagggatcgatcgaagcgagagcgccgcgccgaaagctcgtgcgattgccatgggcggggaacacgacgcgagacgacggggcgcacgctgggagagcgaggcggttgtggtctggatcgtacggcgcgcacaccggcacacgggggtctggcctgcgtcgacgcaggcacccagccagtcaggcatcgtgggtacttggttttccagtttttgcttactttgacacgtgatctgcaatgcagcggtcacttggaggacaccgtgtccggtgctcctggccgcgttctccgactgcgccacgcacggcacatcaaccaaaacagtgcaatgttatggtttcagtttcggtctctgtatcaggctatcagcacattaatttttttttgagagaatccctaatatgtcacttcaaattaactggttctcttatatgccatttcaaattagcttattccttctatgccactggttcaagtttgtgtcctcccttttataccattgccgtcgctccaccgccccccttttatgccattgccgtcgcttcaccgccagttgaccgttaactttatagttaacaaacgaatttgtccttgagagttggtatacaaccaataataagtattttagtactaatatagctactggatacaatatatgaaaattgatttttttttcatcacatgcaattttagccatcaccatcaaaaaaaaattcaatataatcatgaaatatgtagttttccaacaatattttttttagtacaaagagcatttttcactggctctaacaaaatttggttcactcaaaaaggatttaagttataattttttgaagtttacatattttttagttgagagggcatattggtcatttatgaaaaactaacatttaaataacagtcaactaacactgtagtgctgagagtggcataaaagggtggaaaaacttaaaccaatggcatataagagagaagccaattttaaatggcatataagggaactggccaatttcgtagcatataagagattctctcttttttcccctttttgagtaggaaaggcatgagctctgccttgagagcaagtttaacggtatagtcaactataggttccaaatcatgtaaagttaatttaatagtcaatatatataatagttatcaataaacatatactctccccgtccaaaaaaaaaccaaatcctgggtatgtctagattcaaatccagggttagtcagagaaaaagaaaaaaaaaagaagagtccaagtagaaatacaatctaaaaatagctgaaattcgaaattaaaaataagcaatattgaaagaagtttccatataataacccaatacaagattaatcaaaattcgaaataaaaataaaataaaatccaaaattagaaaaagaaaggagagtccaaatagaagtacaatataaaaatagctgaaattcggaattaaaaataagcaatattgaaagaagtttctatataagaacccaatacaaaattaatcaaaatttgaaataaaaataaaataaaatccagaattagaaaagggaaggagagtccaagtagaagtataatataaaaatagctgaaattcagaattaaaaataagcaatattgaaagaagtttctatataagaacccaatacgagattaatcaaaatttgaaataaaaataaaataagattcgaaattagaaaaggaaaggagagtccaagtagaaatacaatttaaaaatagctgaaattcggaattaaaaataagcaatatcgaaagaagtttctatataagaactcaatacgagattaatcaaaattcgaaataaaaataaaataagattcaaaattagaaaaggaaaagagagtccaagtagaaatacaatttaaaaatagctaaaattcggaattaaaaataaggaatattaaaagaagagtccatattagaacccaatatgagattaattaaaatttggaataaaaataaataaatccgaaattagcaaaagaaaataaaagaagagttcaagtaggaatataatttaaaattagttgaaattcggaattaaaaataagcaatgttgaaagaagagtccatataagaatccaatacgagattaattaaaatttagaattaaaaataaaataatgtccaaaattaaaaaaattaaaagagagttcaagtaggaatacagttttgaaacaactgaaattgaaaataaaaaaaaagcattaaaagaacataatacggtattgactacttcctccgtttcacaatgtaagattttctagcattgcccatatacatatagatgttaatgaatctacacacatacatatgtctagattcattaacatctaaataaatgtggataatgctagaaagtcttacgttgtgaaacggaggaagtaattttttttaaaaaaaactgaaattagaaaaagaaaaataagatttcagctaggaatataatttataaataactaaaatttgtgataaaaataaagattattgaaagaaaagattgtccaaaacacatgatgagataaattaagtaacaggcctataaaggagtagagtgatggcggttgatacaacatataaaaattgttaataaaacaccaaatagaatcctaatgacgattaaaaggagggacatcaggcaggctgtgaagcaaacgagtaagacggttgccaggatttttagaaagtaaaaaaaatgaaccccattgataatcatattcgatttttaaaatctcaataacaataaaaaggagaaactgcgggcggggtgtataagagtatagttgcagagccaccgatggttgacgggacttctagaaactaaaaaatgaattccaacgatagttatgttcgatttttagaatcacaatgacaataaagagtaggcggcggacgggctgtagaggggcatagtggcatcgtttgatgggacttctaaaaattatagaaaataaaaataaaagtccaatttttaaaggttcggaacttctaaaaagtaaaagaaaaaacaatgttaatcatattcgattttaaaatctcaatggcaataaagaagggaggcagcggacgagctgtagaggagtacaatgacaaagccgctgacagtttggcgggacttttagaaagtaaaaatgaacccaaacgataattatgttcgatttttaaaatctcaatgacaataaagagaagagacagtggacggaccgtagaggagtataatggcaatgtttgatgggacatctagaaattataaaaatgaaacccaacgtgacaataaactctaaaaactataaaatccagtttttaaaggttccaagaagaatgaatagaaatagtggtagatcgagcaagcaaataaagaaggagatgacataagcggtagcaactggtgtggcttttaaaaactatataattagaaacacggggacttctaaatgcccaacaggacaataaactctaaaaatataattttttagattgaatttttaaaggttccgaggagaatgaatagaaaaagtggtagatcgagcaagctaataaagaataatatgacagtagtaaggggtagcagctggtgtgacttttaaaaactataaaattaaaaacacgaggatgataaggtttggtctttcaaaatcttaagacaacaagataactatttaataaattttaaataaaattatattaaaaaatatataactttatatgtgtgctagccgcgtaattgcgtgggccacccagctagtttcatcatatgctaacgaatctgatgattgatgttggtgcagctacgaagtatttaaataggatcatgacaagcttaattatgaacgctagctaaaacagggtaaacaggtggaaataaagagtaatcagtattcaaatacatgtgtcaaaaaatatattcattgcagtcactcacatataacgatccagaaatgaagaaacaacaggtggagtaatcccatgatgcatgaagtagtatacttgtaccacagattacaattagtagtgctgcactactactaatgaacaaggattttggtatgcatgctatcttgtcaggttaaaacatggcaactcattatcagtacaaaatcaacattgctcactgactgccacactgttagcatccacaccaacatcaggcaaggttatgcagttactaaaagtctaaatgcataccaaaatctcactggaacaaagttggcaggttccaggcacggacgaactgggacgaatggtagcgcatcggcgggtggagcatctcgaagaaccgccactcgaggagcctgcgcgcgcgcacgtccacggcgaagatccgggagcgcaggaagaagtagaccacgtcgccggggcccgtggggtggatgagcgccaccgcggggacctgccgcggcagcttggtcgccttgtaggcctcgtcgtcccagatcgccacgaagctcgccgcgcagtcgaagccccactccccggcatcttcatcgagcagcgtccacatcctgacgatcgggtcgccgtcgggctcgtcgtcgatctgcacgtaccgcagacggccggcgctcaccccgacgcagcggcgcttctcgaggtccggcgtgccggcgggcagctcgctgtcctgcgggagcggtacgtagtgcaggtccggggggtcgtcgccgtagacgacgtcgcaggtgaggaggccataggagaggtccacccaccagagcctgtcctggtgtgagaccatgccgttgccgccccacggccggtcgtgcggcgggtagctgagctcctcgtcgacccaggcgtcggaatcggagcggtacaggaggagggtggcggtgccggacgcgggagcgggctggagctcggcgacgtagaagctgatggagtagcagaggaggccgacgttgcctggatagaggatggcgaacgggtggtcggggtcagggaggcggctggcctcgcgggtggtcgtgtcgcagatgaagtaggccttggcgaagccgtggtgcacgccgagcggcctgaggtagaacgcgtcgagggcggggcgcggctccgggtcgggtccctgggtggcgtagaggaggaggcggccgtggcgttcgtcggcggcggcgaggtaggggtagttgtcgatggccttgcggtccggggcgatgcggcggggcacggtgatgcgggaggcgaacggaggggcgccgaagtttaaccggagctcggtgcccggaggaaagtggaactcgtcgtgggcaacgtgcgggacggagacgaggatcacccaccaccccttcgccgcctccctcatctgcatctcctccgccgccctctcctcctgcagcctcgccatttgcagttcggcaatggccggaggcggagagatggttgcggtggtggtagctaggcgagtatagctgctatgacggtatcgatttgggggtttggtgtttgaaaattttgggcagcgaaatggagtttggctatttaaattgggaaacaggagatcgacggcaagtttggttgccacgtttgcgaagaagttttggttgtcacatttgtgaagccgtcactggtcgagcggagtcagccctgtattgagtgccaggccctgtataaatgaattttcgcccaggaggcagtgaggcacaggatattttcctgatccataccgaaatttaaaattatttactgtaaaatcctgcacctatagcggtaggcctgcttaaatggttttttggcacaggatatttacctgtttcataccgaaatttaaagttatttactgtaaaatccttcactactaatggttttggacgaagagcgcatttattatcagtactgctatatacatgtacagtgtaaaatacggagttcagaatgacaaccaatctggggacataggacgaacaagtaagtcatccagcgaccaattggtccactaaaaacatgtattttaacaactcgtttcaaagattaccaggtcatctctatcacaattcacagcccacaagtcacaaatgttacaagatttattccaagcaccataaaatttcagtccgtaaaaaatgtcttgtcttgcatgcactggccaacagaagcatatactctctccgtcccaaaaaaaaaagacaaacctggtttccgtgcccaatgtttgaccgtccgtcttatttgaaaaaaatataaaaaaaaattaaaaagacaagtcacgcataaaatattaatcatgtattatcatctaacaacaatgaaaatacgaattataaaaaaatttcatataagacggacaatcaaagttggacacggaaactcagggtttgcctttttttttttgagacggagggagtagatccgaatcatagcagtgactggtctctgacctgtatcatttttttaatggaagacctagatcaaattaaggaaagttagttatgtacttatgaaatcttctcaattaagatcacatgccgtttgaagttgaatgaaaaggtcgtctggtcatataagtggatcaatcaccttagtgagaagaggcgtagtcagatggagcagaatagcagatccttaggcctttcaccgtaagtccatgatcttcattttagttctcaaacatagacaatcttcctcatcaacatcagatgatacttgatacttcacagacaaatattcattgatcaataacgcagaaaaatcagtgctaattaataattttgtagatagggacaactcatttgaaacaataaagtccattttgagttcaagacagagagagaactctgaacagaaaggacaagaaatataatgattcatcataaatcctgatgctacatatataagagtttcaaatctgaaagcatgaattcattttttagcaaacatgtgaagcttatttagaaagcaatgcttaataaaaagggccaagaaagctttgatactgttgaccttaacactaataccccccccccccccccccaaaacaacaaaagcagttatgcagcacatctttgtgcatattcagaatgagcgcgttcttaaacactcaagcaacagctagcattcttatgttattgggttcaaaacgatatgggattgacacttggaaataaaagcggatactgaacagccaaacacacagcttatactcagagcaaatttacctagatcagtcatatgattttaaatgtattatggacaaatgtttgcctaaagacatgcattcatatgcatcctattaggagatgatctatcaagccaactcagttgaggagattgtctggtaacagcacagataacaaaaagaaaagatctgcatacacagaacccatggggccacgacattctgtatatgttcaggcagaaattgacattgtgaatttgtgaccagctgtactgatttacctttcctcatgaaacatcactacaaaactacagctacagcattccagagcagccaatcacagtacgcaagaagtaatgaagggacagaggaacagtatagagactacattttatctagcatcctgtttgtagatgcatgagatatgcttagtactatgaaaaatgaatatatatgtgcccatttcaatgattttgctagtgttcaacgaaattctgaaagcacatgttaaaaccctctctaaacacataatctgaactttgatccataagactgttctacgacatccatgggcctcagttgggtggagtaattatttaagcacgaaacatgtgtaactaacaaccaccacaccttgagagcaatgtaaagcatcctttagcactcgaactgatgatagtccatataatgtctagacctggactgatggcaaaatgcggtacaacagtaactgacaaggtagctataattatgtatatctgaaagtttctgaaagcatccactactaggacaaaggtaaccacagaaataagcaaccccaggtgaattattagctaaaaactcttgcctaagcagaggtcttgcataaaactctaccattcggcaatttagcattcttctacagaaaaaaaaacagcactgcagcagtaagcaagaagaaatgcaccatgctgaactggaggaacagtccgtggaagcgacggtggaacctcccaaacgcggacgaagaagggaagagtaccaacacttggcgtcttggtcagtggatcatcccgaagagctcgtactccagaacctccctccgcgccgcccaacatcagttggccctggaagaagtagatcacgtcggggtcgttggggtgcaagagcgccagctagcgcggggaccttgcgctccatttcgctcctcttgtacctcttgccgtcccaggtctcgacaaagggcacctcgtactcgcgccgccaccgtgcgtgcactcgatcgtgcagggtccaaatggtcaccacctgttcgtccggaggaccatggatctgcacgtaccgcatcttgttgcccgcgctcgccttgatgcagcggggcgcttggcgatgtcgccctcccctccggtggccagctgcacgcagaggaagtagctaggccgggaagaagtcggggcggagtccgagggccgtggagtcggaaggctccgccgcggccgggccatggatcactcagaggaggcggcgaacgcaggggtccgcgccgcggcggcgatgtaggggtagttcacgaggctggtgggcgtcaggggtgatgcggcgggtcgtcaagcgggaggcaagcgtcggttcccggcgggaggtgctcctctgagtaggccattagcggcacgcaggccagtaccacccacgggccacggctgcaccggcggtggcgcgctccccggcgtccccgcgcggcacgacatgcccagagccccagagcatgctatgaagaattgggagcggaagcggggagaattgtcagggcaggggaaatggtaattttgggattaatttgtttcttttttacaaaaaaaaggccgtgataaatcgctgcgaaacgtgtcatcgtcacgtatgagtttcactggcatgtcactttgcaaataggattcgttaaaatatcacatttaattctacacgttagaatactatctataaccaaattaccctccgtttcttttcttcctctctccaacgccagtagtggttgccagcagccccagtgcgtcgttcccagctaagtggacgacctccctcgctcccaccactgcttgagcgcaagctccagcattccaatcccgatcgcaccgtctatccaacgcccgtccattatcaatgcgttaccttccccgagctcgattaccgcttacgtggttgttgtccctgtaattgctccatccccaagctcagctttccagagctcgaccaccactgtcaccgagctcagggtggagtggatgacgacgacagcgatgagagggcgagctgctgcgttgtggtctcatgtgtcggagccttattcaccatggcctcgtcagagctagtattcatatgttgttatgcttgtgctgctgcatgtgttgccgtggaggctgcaccaaccgatgacgaccgacggaggttgaatcggcggctcaggcacgatggcttcatctcaaagtggcgacgctcgagctcgaggacagcatgagcaacgactgtggcgtccgctggtcgagcttaaggacagtgcaattgacaacaatgatgggcatgcttggaggtgagctaggcggcgacgacgacagacagacatgctcgggaaaggggcgtcctcacgtgggtgggcacacggcaagggacaaaccggagttggaaaagaggatgggtatgtaattaagaagccaacggtaattaatttgctcatgtatggtattgtagcaagtagctattggtcaatagtgacattttatcgagtccacttttgtgaactggtatttcaaaacctacttaggaaaatggcacaatgtcaaatttgttgatgcctatgagacaatcctaattccttcatccaaaaaatacaaatagaggaggtttgtttatttcaaattttttgttgtcttcttcaatttttatctttttttcttttgtaaaaaaagtaagggcccctttgatatggaggaaaaatatagaaattttggaggatttcaatcatataggaaaattttctatgaagcctttgaaacaaaggattgaatcctatacaatgctttgaaattcctatggaatggacaatcctgtaaagattttggaggaaatttagcaagagcttcaacctctcagtaatttttctttgagtttatctttctcatccaatttatgtgtttttcctgcggttcaatcaaacggccattcctgtgtttttcctgcattttacaatcctatgttttacacttacactcctatcaaaatcctacgttttctcaatcttgcgattctaaggggcccttagatctttcgtcgcaatcctggtctctctctccaatcaacttcgagttccgacttccaagtaaaaaccctaattcttccccaattcctccgaattgagccgccgtcatagcgatggccgagcttaataacagcgcaattaacaacaatgacgggcatgcttggaggtgagctaggcggcgacgacgacggacatgctcgggaaagggcgcgtcctcacggtgggcacacggcaagggataaaccggagttggaaaagaggatgggaatgtaagaagccaacggtaatttgctcatggatggtattgcagcatgtagctatgggtcaagagtgatattttatcgagtccacttttgtaaagtggtatttcaagacctacttataaaaatggcacaatgtcagatttgttgatgcctatgagataatcctacttccttcatccaaaaaaatacaaatacgggaggtttgtttatttcaagttttttttgtcttcttcaatttttatcttttttcttttgtaaaaaaaaagtaagggaccctttgatatggaggaaaacataggaattttggaggatttcaatcctataggtaatttttctttgagtctatctctctaatccaatttttacgtttttcctacaattcaattaaacagtcgtggttcaatcaaacggttattcatatgtttttcatacgttttacaatcatctaatttacacttatacttctatcaaaatcctaagttttctgaatcttactattctaagggcctttagatctttcctcgcaatcctggtctctctctccaatcaacttcaaattcctacttcccagtaaaaaccctaaatcttccccaccagttcctccgaattgagccgccgtcgtagcgatggcgaaccccgtcgtcccgtgcccttccgccgccgcctacggccccggcggctgcgatggcgtaggctgctcctccagccacaacgtctgggctcaccgtgtccgccacaacggcggcgtctaccgcctctgctcctcctgcgttctcctcggccaccgcgacgccttctgctccgtttgccttgacgtcttcccgggggacgcgcccttccaagatgatttctataaccccatcgtctcatgctcctgctgcggcgtcgagcccgtcgccgccgcccacctcgcctgcctcacggacccttcctacttcgtgtgcccagcgtgcgccgccgccgccgagggcaggaccttcacttacgccccctcgagcggtgccccgcacgcgctggcggagcgcgtgctcctcgtcgcggcgcggctcgcgcacgagtccgtcgcccgtgccgcggcggcggcgcgcgagcaggcggagcgcctgatccgggaggcggccgccgccaggaagcgcgcgcgcgacatggtagacgtggcctgccgcgtcctggaggcggaagccagggacgccaaagagcaggccgcggcgcccccctcacccgtgctgaccaagaagacgaccccgaagaacagcgcagcaaacaggagcagcgacaagcctctcaagatcaattcaatacagaagccggcgctggcgttcgccgcagcggcagccgcggccgccgccgcggccagctcaacgccattgtcgacgccgtcgcccgcgggggaaaggaagccaatgaaacagggaagaggtgagtcaacaagtagttattggctgccgatgatgaacagcaattgtgatttgagacaactattttttctctgtacagtactaattgccgtgtaattctctcagcttcagcaaacagaggagcaaaagatgatcaaaggacactgtttggtgcctttcaaccgtgatgactccatgtgttttttgatctttgaagctaagtgacattgaatggtctgggctattggccgtgcagtgtaaaaagaatcccaagtttagatctaataacagctagcaattggtgtatctatctacttggtgttcatattattaaaatttatttctaatgattttactgctgcgcaaatgaaatgcaattgaatatcccaattcaaaagtttatataactgatggcttcatttttcttaggaggatcaatggtggcagaatttgtgcttaaactttgaactagttggttttctaactcgtacatttcaaccaagcataagatccttaggtccctacgtgtacaatgtacattgttgttccatggtattacgttgcgaatgtacaattaattttgcaatatcaagaaaataggatcaatgttgtgttttactattatgttaaggtacaattgttcttttctatgtctcaaaaatttgctagaattgttctttggctgctctaaaccgtggttcggacgttctgtaattggtaactgagataactaattgatcctaattgttctgtactatactaatcgtcattgtatggttctagcaggttcagcaaaaggaggagcagagcaaactaaaactgaagagttagcctgaacatttattcactgatacacagtattaaaactctgtacgcacgtatagcagtgatagtaaagataagaattcacagatccaaaatttaaattctcaaccacgtgctagttcggaaatgtaaacaatcatccatcgaatatacgagaattagaactcagtgtaccatcacgaacaatgtcatcagccatccaccaattaacaaacactggttgtgtaagatagcagagagttaagccagatatctaattaaagacactgtccaacatcagtcagggtgtttggtttctcaactgcctagtaccgtggatatgtcaaacagaggaagcagggagaagaaacaagatttccaaacaaaactttcatctgaaactcaacactgaactattcatacaatactttcagctgaaactcgaggaactatgtttgaaccgtccatggagacatgtgacacgaagtttcgcatcagacacaatgcctcatatgcgtcagtagccttgacaatgacaaatgacaagtacctgatgaatgaaaaagaagataacacacacatgaggttcagtgaagaaaattctctcttgtatgcgagtgcatgtgaattgaagtggtcggcgatccaaagaggatggaaagaggctcacttaggaaaagcagtggcattcctcagttcctggaaccttggattgatgaagagccttccagtggttgacagcagttcgtcagctttgtcactcgaaaagttcaagtcaagctcatccgtcagattctgcaaattaacacaagcaattctagttagtcaaaaaatggtaaacctgtgttcaataacttgataggaacttagcttatgtatttttttccagaagctaaagatgcaacagtacatgcaccagtaaatatatgtctatattatactcagtgattttcagacttcagggtcattaatacaaacaaacgaagttgctgttatggaatatattctataagtattccgtagtgttaaatgacatacagatacatggccaacatacagcattactacaacattgtaactactaaaatgtagaaggtactaaacatgcaaattcacatatagtccttgatcgattcccattaatttacaatgtcaaaagaactatacagtgcaaatctgtatctgctagattagatgcaccctctggtgtgcaggattaatcatgaaccggccaaatgagatgtgcagaccatgcccagcatcaaaataactcaaacatgaatagcacaaatggacaaagcacatcagcatgcagcgatgagacagagcaaagaagtgaagaacagcgcagcgtacgtaccatctgtctcatcatcctctccgcggcagatcgaatgtggcagctcccaagcgcggacgtggcgagaggagtggtacatcgtcggcagctggggcatcttgtacttcttgcactcgagcacgattctggtgaccaggtcgacggcgaacatccacgagttccgcgaggtgatctggaagaagaacaccacgccgagctccttggggtggaggagcgcgagcaccggaacgcgccgcggcatcatggtcttccggtatgtcacgtggtcccagatctcgtcgacgcgcacccggtggcggagcgaccaaaccgactcctcccccgcatcagactgctgcagcgtccacatgctgatcatgatcgtcgatggcgcgccgcggccggcggcggtgtcgtagtcgtggatctgcacgaacgccagctcgccgtcgctcacgttcacgcaccggtgcttggcgtggtccgcgtcgctggagtacggtagcttgcatccctcagggagcggcacgaagcgcatgtctggcttcgcggcgaacgcgtcgcaggtgaggaggccgaaggagaggtccacccaccagagcatcccggcgtggacgatgacgccgtcgccgcaccacgaccggcggcctggcgggtagttgaccttcgttgaagcccaccctccgagtccgagctcatgggagtagcgtagtagggtggcacggtggatgccattgccggactctatctggagctcggccaacaagcggatcgggtggtcgcgatccgccgttctgcggatcatgccgacgttcccggcgcagaggagccggtactcgtcggagcagggcgggtagaggtaggccatgcggagcgtagcgtggcagaggatgtagccgccgtcgttggtgcagctcggtgcagggtcgaatccgagcgcgacgccggggccgaaatcgtgggcgctcctcctggcgccgcggagcaggagtccgccggcggagtcgacggcgacgacgtaggggtggtcgtcgcggtcggggcagaaatcccgaggcgcgggggagacagggacagagtcgctctggcgcaaggtgaggagggagacgcccggcgggtcgcgccagtcgaaggcaaggtggtcgccggcctcgaagtcgctgtcggaagaggacacgctcgggacgcaggccaggatcacccacgtggcctcccgcggcggcgccgccatcctctcgtcccgccggaacttgggcgccgcgccgtcgaacaggtgcgggctatgctccatgcgtctcttgctgctccgaacttccgaagcggcggcggcggcggcggcgttggagtggtcggtggcggcgatgggcggggtgggatgaactggaaatgggctgctcccctcgattggtttgccgctttaacggagccagaacccggaggggcgagaaggttctaaattctaatcgcatcccggtgtttggcaattggcactttggcttgctgaccaagccggttagttacggttatcaccatctaaccacctacagtgcggtgattttttttcactaatccatgtggttataagctctgacggtaatttttcgttaatctcatgttttttttagacaaaaaggttattaaaaactagagcattgcaaagctgtggatcgaggaggattcaccaaaccaaaccgcaccgatgtatcgtggtagtccattgtacgcttgtttgggaccatggattagtttcagtctttcagagaagaaaaaagaatgttacgcttgttgccttgtttcctatgctcgacttgtcgcggccggagattgcacggtgcgccaggccgccagttggcagatgccgtttgtgacggacgatgtggtgcggtccgtgtatggcaaaaaatggagtgaagctaagccaccgcgcgtgcacttcccaccgatcgcgattcacagccgcacgggcacacggcacactagtaccagtactactcccacgcgaacgaatcatcggaagtggccgtgcgcgcgttccggccgctacatcgcgccgcggcagcgcgcaagccgtggaagaggccaagcgtcttgtgcggctgctacatttgcctccgctccaaatagagacgttggtactgtactaccgtgtttttcaggctcaccatcagcagtagtactctgtaacaataggcttggacggctgccccaagttatcggtttatcactaatcaggttctctaacctcgaacaaatccccatcttatatgagatttagcacgcatcagccagcacacacagttgaggaatgccgtgaacaagacattaatcgatgaactgtttgtcataaacacgtggtttatgacaatatttcatcaatttgtcatacagaaagttcaaacagtcgatcttatttgatcctgcaagctaacacaagcaatgctagttgataaaaaaagggtgctaatttatagtatttgatagtttgcgaggaactagtcatctgtaaaaatgttaacaaaaacccaaatcaggtaaatgctatatttgtcacgtgaaatcaagcttcaaacccccagcagttgcaagttgcaacagtacattaattctattatacggttgcaccagtacatattacattcgctaattttcagacttcataactatggtagccactaacaccaactaaatgaggatatgctctacatgcagttgatgtttccatgatgaaataaaccagccttggtgctagcatcagtacacaatcatagtactaaaagtccctcgcacttcgtccttttttttagatggatctttgaatacttttgcacttgcattattacttattagacagcgataactgtctagcatgcagttttatgaatcagagtatgaatattcaagatcatatgaaaggagcaagcatgcatgcagcgctgtagcctttcaatctgtacggattactaattaccagcttattgttggaataatcctcacacttgtgtattttcaacacaaaacaaacatattatcaaaattgattcaacgttagaattaataaaactaatttatattttagatgctgataattttttctataagcttatcaaacttaacaaagtttgattaggaaaaaaagttaaacggtttataatatgaaacggtgggccaaaagtttgctagaattattctgcggctgctcaaaaccgtggttcagacgttctgtaattgtaactgagatagtaactaatagtctcctaattgttctgtacaatactaatcgtcatcgtattcgtatggttctagcaggttcagcaaacggaggaacaggagcaaactaaacgagttagcctgaacatacattcactgatacatagtattaaaactctgtacggaagtatggcagtgatatatagtaaaaatatgaattcacatatcataaaatttctcaaccgcataccagttaggaaatctaaacaatcacccatcaaatatgcgagaactagaactcagcgtaccatcacgaacaatgtcgtcagccatccatcagttaacaaacactggttgtccaagatagcagagagttaagccagatatctaattaaagacactacgcagcatcagtcagggcgtttggtttctgaactgcctagtgccccggatatgtcaaacagaggaagcagggagaagaaacaagatttccaaacaaaactttcatctgaaactcaacactgaactattcatacaatactttcacctgaaactctaggaactatgtttgaaccgtccatggagacatgtgacacgaagtctcgcatcagacacgatgcctcatatgcgtcggtagccttgacaatgacaaatgacaagtacctgatgaatgaaaaagaagaaaacacacacatgaggttcagtgaagaaaattctctcttgtatgcgagtgcatgtgaattggagtggtcggcgatctaaagaggatggaaagaggctcacttaggaaaagcagtggcattcctcagttcctggaacctaggattgatgaagagccttccagtggttgacagcagttcatcagctttgtctctcgaaaagttcaagtcgagctcatccgtcagattctgcaaattaacacaagcaattctagttagtcataaaatggtaaacctctgttcaataacttgataggaacttagcttatgtattttttttccagaagctaaattgcaacagtacttgcactagtaaatatatgtctatattatactcagtgattttcagacttcagggtcattaatacaaacaaacgaagttgctgttatggaatatattctatcagtattccgtagtgttaaatgacatacagatacatgatcaaaatacagcattacaacattgtaactactaaaatgtagaaggtactaaacatgcaaattcacatatagtccttgatcgattcccattaatttacaatgtcaaaagaactatacagtgcaaatctgtatctgctagattagatgcaccctctggtgtgcaggatggcaggattaatcatgaaccggccaaatgagatgtgcagaccatgcccagcatcaaaataactcaaacatgaatagcacaaatgga

SEQ ID NO: 8418 - DNA, 56720 bp, Oryza sativa
ataaaaagaatttaccaatatgcttcattttatcttaaatcaatccacatgatcaaaattgatcaaacttcctgtagagtgctttttaagtaaccatatatcacatctacggaaaaaaattaggtggttccattatttttacccattatatttatctaaaaaatcaccgattaaatttatcagttaagtagttacatacgtactaaaaattgtactacgtacatatgtacttacgcacaccaagccccacatctttcttttttcccctttctcacttaaattagatggaaaaccaaactaataattcaatgagcacgtgtgtcattaagcatctaagataagaaataatactaaatgagcaaccatcaataaatgataggtaagtagaggttaccatcaagctacagcaaataatacttgactacaaatagattgcaagtaagactaataacgttccaacaatcctaagatgacacgtaatgctttaataaataacacaaaatctaagaataaaagcaaaacaccttgccatcaatttacacttaaactggtggagcaattatattcaaccattatattagatctatctaagtaatcccttgctcctaaaaacaattaatccctccctatatacgtacatacacaagagatgtaaaaaaagagagtgtatctaccatttgccctgtatggtaggtttttttcagcgttagctcctagcgatgttatcaaggaagccatgtcatcctggcaccacttgacaccaccccgtcaattttcatgaatgtatttttttactaacgactatgtaaaaaccagttgggtgctcatataaacgcctatgcataaccatcttatgaatacacatacaaacattatctcctacaagaggaaaatatttgtaaaaaaaaccaagaaaaattatatagatccgagagactactatatattcaccatgaaaaacatacatatgtgcgtgcgtacgtacgtacatacatacatgcttacgatcgaaaatagcacgtggaaccacattatatccctttataattatgccaatatcatcttaataatgttaataactagcataaacaattttgacaatataaattattctttcgtatattacccatgaaaatgcagaagtgattagatgcataataaaagaaaaaacaaaacacatattagctcgtatgtttgtgaaggatgatgataataaagtgatatttgtttaaatataatagacattatcatatagtatatcaaagtttatggtctattttacggaataaatattttttttattctaggtaatgattcttatagtgaatatggtgagatatcttttagtattctttttataaacagtaagtgaattgcgcgggcttccttgatgcgcgggcttccttcctagtttatgtaaaaaaaataaacaatgaaaattcaattaaaaaggaaaaattccatactttaatttcaacttattttgttaaaattatttccgaaacaaaataatatgtatacccgcgcgaatgtgcgggctaccttcctacttatactataaattttgttaataaatttccaatacacactctatatataagagaattagcaacttttgttttatatttccaatacacactactagtttctgttaaaacaacaataaaacgagaaagaatcatatatatacccaccagcattgtttttttttactgccaacttttattctagcaaaatctgttagaaatgtcttgaaaaaaatgatcattatcacgccaataaatcctagcattattattgtgcatattagcctcaaattcgataagtacttgatcgttctacagcgcaacagttgatgtaaggccaaggtgaaagtcagattacgctgctgatcgagatcacctacatggtgatgatgatatgcatttcttgattaaaggatatagctttatttcatcaagtgaaaggtatagtaatatatagctagctatgtgtaaatgtttcctaatcagtctgttgatgagaacgacatgcgaaagctagctagcagcctaggtagtacaatgaaaatcatataccggctactgcaaatcgcctgcatttcaccgtggttcgttggggcctaggccctagaggccggtgattcagaaccgataagctaacaatagacgatcgacatacgaaagcgcttatattactccgtacctgaaaacttctccacgctgtttgacaattcgcgtgcacagtttccgttttacatatcgttgaaaccccctctcacgcccggcgccgcccgcccggccggcagcgccagctgaggcgtagacttcacctggaaaaaaaaattcccgtggagtcgtggacggacgacgacgcgcgccgccgtaaaccccgacctgccgccccggccacgtacgacgcgcgcaagcgaccgtgcaggtaacgccaaaatacaatcaacccagagccggtggatttttgccgtcgctcgcgtacgacgcgtgggccggctgcgcgcggcgaggaggatcgatcgaagactccacggccgtatggcgaccgcgtcaaataacgaactgtcacgtaacaggcggtaccgtaccatcgcgaggccggccgcagcgccgactgagactccgacggcttccgtgtcaaattcgggtgcgccccacaacgccgagctccccatgatttctcccgcatccgcacggcggcgccccacatttttcccgtgcgtcgccgcgtgccaggggaaaaagcccggaacgacttatcagatactccctccatctacttttaataataatatttcatcttgacacacagaccaagaataagtaattctacttatcatttatttaaacatgctactagtcattcctcgtaaacaagcgattcaataatatttacatttctcaaagcccatgtagctaatcatgtgtggaagaatggagagtcacgcattaaattcgagaaaatcattaagatggtaggttgttggattgaaatatgactatcaaaaataaaattttcagatttagaaatatgactatcaaaaatagatagagggagtaataactcaaccactcaactgagagctgacctgaccagtgcggtgcggcagtgcctagtagtacgtagtaccatcacttcttctacgtctcacgagcttatacaagtactctgcgttatatgtgtgtgtgtgtgtgtgtgtatatatatatatatatatatatatatatatatatatatatatatatatatatatgtgtgtgtgtatgtatgtatatatatatggcccatgccgatgtggaacacagtcaatacaggaattaacatatcccgtgttcaaagccaacgtatgcgtaacgttgtcagtatatgcacagtccaacggaagaccggtaatagtacaaatacgtgacgggccaggctaggctagctagctaagctgctggaaactgactgggtctacgctggggtctcctctaaaaaaaaaattacggttcacagatatcgcattcacatcccagagccggcccgggcctggccgtgactttgtttgaaaaggccaatgagaagaaagcgaaacaaaacaagcgatgaaatttaagtgttagatgaaaaacaatctgaggatatgaacaaacacgtagaaaagagggatctagtaagctgtcattgtttcttttgttttgttgctttgacaagtgtacataattctcaggaagatgctattattatacttattattgtactgattattacttactgcgaagtatcaacagctgtttttgcggtagaaaaagaactaagaaaaagcaatgaattaatacaactttttgctgctgcaaaaccaggaaagtggagaagaaaaaagaaagtgtataccatgtgcccactgcacagctcggccgagctatcgaaaccaaaggagagaaatcaagaacctatcctgaacaaagaagagtaaaaacttggaaatctatgtgaaaattactgatccgaactcgtttttactgcgtctcgctgttggtgttgttgctcgtcgtgttgttgctgcttgtgttgttggtgttgctcgtggtgttggtgttggtgttgttcgcgttgctgttgccagctgccgccgcgtgctggccgcctatgatggacgtgatcgccgccgcgagcgccaccgtgaagttggggtcagcggtgatcgccgccgccgccgcgctgacggtgtcggagagagggccaggcagctgcccgatcggcggcctcggttgcgcgaactgcgcggcggcggcggcggcggcggcggcctcggctgaatcggaggacatctgcaggccggagaacttggactggttgtacagcacctgcggcggcacggcgaacgccggcgccatccctccgcctggcagcggcacctggaactgcggcgccggcgcgcccggccgcgcggcgttgagcggcacggcgttcggcgcgcccggcggcgcgtgggtgaggtcgagcgtgaccgtcgggaacggggccgacgccgagatggtggccatgctggacgagcacggcagcacggtgcgcgccaggaagttggagctcatgagccccgcggcgccgtcggcgctcggcatggaccccgacagaagcatcgacgccgccgccgacgtggtggacgccatcgccatcgcggccggcggcagcgggtggttgtgcgtgccctcgtacgtggtgatcaggatggaccggtcctccgcgcaccgttgcacctgttggtcaattccgtcacgttcacaaagttagaccaatcaaacaacaccccttgcctacacggtagcactgctactcccagcccttcgtactctctacttctgagttttgacccgtatctcagtgagtcgtcgtgtccggtcattacctgcttccgcaccgggcagccggtggccatggtgcagcggtagtacgcgcgtggacaagggtttcccttcgccatcttctgaccgtacttcctccattggcacccatcggcgatctgcacggaaccaaaacgatttggaattcagcacgtctcgatgagaaaatgcctgtgatcgatgtggttgctagtggtggggtcttacgattggcgcttcggatcgcgcgcgaacggagacgcgggccttcctcatgttggcatcctgggcttgctgatcatggctcttgcccgccgcgccggcggcgcccatctgcggcgccatggcgcgtcccggcaaccacgccgccgccgtcgacggcgcgtccgggctgtcaccacgttcttggtccttgttgccggtagacgacgaccgacgcgggctgccggcctccgtcgacgagttggacggctcctccgccgcctcgccgccggcgccggaggacgggcccagatcgaggaattgcctcggcacgaccgcgccctcggccttgccatcctgaaacacacaccaaagtgggaaacccggttatttccactccaggtagctgtgtaatactactactaataactgtggtaatatagggtggttttacactaattattttacctggtgaggcggaggtggctccggctgggtcggaggctgcatcatttgaggcctttgctgcatgagcgcgacgagatgcatctgcagcgcctggtagctggtggtcacctgggtcagcatcccccggagccgctggttctcctcgttcatgcggcccagctccgcctgcatcgccgcgagctgcaaaacatcacacgagagagcgtaaatatcgagcgatccatccatgaccaccggtcggggtcagctcgggtcagatccaccatgctcgccgctgagctagcacggtcagggtcaaccccgtcgaataatcgagatcgcgatgacgatgaattttagttagctaagctgtatgtatcgatcaaccggccctgccgggctagctacctacctcgttgctgctccggctcttctcctcgtgatccggccgcgacgccgcgtcgtcgtcgaccaccatcgaccggtcgctcctcgcgttgttcccggcgggaagaagctgcaacgaacacggacgagcacacgcgttagatcgccgtgagttaaacaggtgtctggcgatcgacgagcgaagaaggcggcggcggctaacgttaatggtgaggtcctccttcttgatggcgaggccggcggcggcgggtcccttggcgtcgtccgcctcggcggcgacgccgcccgagacacggctcttcttcatgttcttcttctcgtcggagaagaagtccacctcgacggacctgcgtgccctgccgccgccaccgccgctgtcgtcggcctccatggtcgacctgtggaacggcggcggggagagcaggttcaagaagccgagcgggcgcggcgacgcgtccagagcgagcagcccacctcctcctcctccgccaccaccgaggtggcccttgtccatgcaactggagctcctactcctcttgtccttcttcccggaggcggagaagatagagaagagaagacgacgtggtagggagagagagataattaggggggagaagagagtgggagagtctgaagtctctcaccggtgggaggaggctcgtataaaaaagggaagcaccctcgactctgacatcaggagctgcgtcagtggcgaggcgcacacgtggcgagtccccattggccgacccgggagtcgacgacgactcgagcctggtgccgaggcgaccggatcgtcctttccggcgaggcgcggagacggctcgtttacgtgcgtgtctccactttagctttccgccttttctcttccggatcagaatcccaactcgttaagaaagcgtgagattttttttttccgtggagcggaaagcgaccgacggctcccgtcgtcgcaacgccaaattaaccaaagcgaggccccccgcaacggcgactcccaccccgcgccggtctaccggttttcaacatccatcatccatccatccaccgttgcgctgtcactcgcccacaccacgtagcttgatgaaagaggttttgtgtacatttgcacgggcagatggacggtgcaccgtacacgtccactccgccgctcgacgtgtcgatcgatcgccactactacggttatctcggattcgatctccggcggtacgagcgccgatgcaggtgtgcaatagggaagaaatattgaggtcagcatgtactgcacgaggggcgttttttttttccacggtcagaaggttccttccgtagattacttgccccccaaccgagaaaagagaaagaaacgcaggtctggattggtcagagacgagttcgggaggatcgtgcctgtgattgatcggctacagctacagggtcgcgagtccacacagcggactcggatcttaccctttctttattgccgctactaaaaactttctgagatcttctatggccaggctgggcccaccagtttaacgtataaataaatttgtttctttgtgtattttgctctgagttcgaggagggttagggtttgggtcaatgggtgcagggaccagttcttccaccgttccacgaaacctccgctcccgattgggccgccgggccgatccacgtggagaaaacgtcaacgcccttgactcccgcggcccccaccgcccaaaacccccccgggcccacaccccgagatgcaagtacgtgacacgcagcctctttttttcttttttcttttttctttcttcttcgcgtcgttttcggataagactgtcactagttgcatacttgcatgtcgaactgcaaataagcagggggatatatatacagtgggagaactggagaaatattatgttgtgggaacggtccaagatgcgatcgctggtgttttgttaatacacgaatctagctaaaagttggctcctgcctttttgataattgggataaagtcggtgtatgcatggcatatcagcatatgcttggacaatattggcatgtgtgaactttgagtttgtagggtaagtagcccacaaaagtttctctactttttagaaattaattgtttttgttggagagtggaggaattatataagacacatgcttgaaagagaggttgcaatttctctctcgagtccggaagaaattggtcctaatctggttgagttaatttcaacacgatgatagcacaaagtccaaaaggcaaggcaacgctatttcacatgtgcctatctacttatgctggattgttccaaatgggtaccatataaaagttttaaacagctactagttgtctaatgcaagttgcatactcaaacacactgtaaactaaaggtgtcgtgggaggtagaattgttctttagctgagaagtgatatcagagccgaagagttgaaaaccaagaacatctatattcaagattgcacgatcatgcacgagacatatgaatcaatatgatgggagagattggtgagattaatcccacactgatttttatttaatgtagttctatttgtctccagtaagtcgttataattggtttgtatgtgtgtgtcgtatgtccggcgaagttctggaataaaaccatttccactatctaaataggtaattctaataatgatagtaattttctttcaagaaaaatctagttgtctcatatttaattaaaaaattgataagttattgacgatcgaaattttagaagtttaactaaatattgtcctaagcatcagatatattttagtagagtagtagtagtagtagtattttcttaggctgtgttcgggagtgagggttgtgtgcacgcaaaacgaaatagtgtttagcacataattaattaaatattagctaaaataaatttaaaaaatagactaatatgttttttaaaataactttcatataagatttttttaaaaaaaacacaccatttagcaatttgaaaagcgtgcgcacggaaaacgagagaaatgagttgggaaagtgttaggctgtgttcgatacatggggttgggaacccatctccttcgcacgaaaaacggagcggtccattagcgcgtgattaattaagtattagctatttttaaaaaaatagattaatttgatttttttaagcaactttcgtatataattgttttttaaaaaaaaacgcaccgtttagcagtttgaaaagcgtgcacgtggaaaacgagagacaggggttgggaacaccctaaaacgaacgcagcctaaaagagaatatcaagatttattgaatatttagtccctcctggttaaattttacatgttatccatgtttccagttggttggatgattttttttttcgaacggtaatgttgttgccgatattttatattaagaagaatgtgtctcattttaagagggttggaagactacttgtttatatacaggttagagctaattctagcctatttgattggtttttttaaaaaaaaatcgtgagttcattcttattgttgaaaaaaagaacatcgtggttgattgactttttttagttaaggcttatctgaactgtgtagaccatagaaatttcaacgaaaataattttctcaggactacaatagtaaaataccctccttgaatcggtgaagatggaaggcatagaaatttcaacaaaaaataatttttctcaggacttcaaaaaaaaaattagcccactgaatcggtgaagatgggcgacaaagtggaggccgccggcgtgcatgacccgcgagtatacgtaaatacagtggcgtgcgacgagtcgacgacgtacccacacgccgagtccgcgacacgacgcccggtccgacaccccgccagcggccagccagtcccaagtcccaaccgactgggacccgggagggagttagagcactactagctctaatttttctatagctaatctaatagccaattcatacaataattgcttactatactactccctccgttttaaaatgtttgacaacgttgactttttagcacatatttgaccgttcgtcttattcaaaaaaattgtgaaatatgtaaaactaaatgtgtacatgaaaatatatttaacaataaatcaaatgatacaaagagaataaataattacttaaattttttaaataagacaaatggttaaacacgtactaaaaagtcaacggtgtcaaacattttgaaacggagggagtattactatatggtctcacctgtcatacacacactacgtcttgaagtccgtgctacagctggctatagatttatagcccgttgctcttctctcttattttttatatctcattaaaatatgtttacagctggctaatagactgttattatatctgcccttagcaactccgcgttacgtacgtcccctccctgacaccgggcgcacgcgtcgaccggccgcgtccccacccaccagcgccccgaagaaatgtgctacaggaacaggagagaaaccgtaggagatgacaggctccatgcgtcgttgcgcgtgctggctgggcgtggattgcggcgccgggagagctaggccccacgcgtcatatttactcgtgcggaaacggcgaaactcccccccccccccccccctgggcaccagctggcagccagctccacccccccaaccgtcaagccggccaccggcagttgaccgcgcgctcgatcggatccgcccccgcagccggtgcgccgcgctagcatgcgacgaatccgagcgctctccttgccgccgtcgcgtcgcgtgggcgtggacaccgtcgacgcggtgtccaacgaaccaggcgcgcgaagcgatgggagcacgagggcggacggacggacgtacgggcgggccgggttttacaagatcctagaccctaggatcggtagcttctagagagaatcactgtgcgatcgagtcatggaccggccggcatgggcaagtgagcaactgatgattctttccggtttctacacgagcggccccccggtccacgtctcctctaccggccaaaaggcgcgtctcggcctcccacctctgtagtctttctttgacctcaactgattagtagcagggggtgttttagatctatggtgtaaagttttagcgtgtcacatcgaatatacagacacgtttaaagtattaaatatagactaataataaaacgaattacagatttcgcctgtaaacttcgagacgaatttattatatctaattaatccatcattagcaaatgtttactattgcactacattgttaaatcatggagtaattaggtttaaaatatttgtctcacaatttacacgtaatctgtgcaattagttatttttttcgtttatatttagtattccatacacatgtctaaacattcgatgtgacgaggtaaaaattttgggaaggcatatgccctcgattgcgcagggaaagagcgcacatgcgtgcacgctgcatgccccggtttcggagcaccggtcgtcgttgcgttgagtttgcctggggatcaaggaacggcaaaatcactcatttcaggttgcatctgaagttctgaacgatcttatctgagcttctgagagacttggttttacagagaagagtggtaaattacgagagaagcgtgtgtaactggaggatcagtcaactgccaccgaaatgggcaactatgtgcaactgcatttcgggatggtaggctgcccagtcgcgtgcgtaactgtccaaggctccacttgcatgcatgggacggggatcgtcgaacgcgcacgctgttcggtgttaggtctaagtgagtcacgatcataaaacgactcagaaaatacagttatgtctagatagcggagaaaatgcaatgagctgttgtgtacctttacgtccatgcgccgatgcacggtcggtctcatcttcagtttagtgcaagggaagaaaaatccggttatctacaaactaccctattcgagtagtatataattcctttctgaaattcttgtattccaaatgactcgttgttgtttagcttctgctcctccgagtgggaaagaactagctttaacccgctgacgattgtggaatttagaaacgcagcttaattatatatttaaaccgaacaaaaacaagcgatcaagttcaaaccacgtaccaaccgtggaggattagttatatatattcttccgagttctgacgccggagtagtactgcacggaccgatcgatcgatcgatcgaccgtcttgggcgacttaattacccgcagaattgatccttctttgacttaacctggccgccaacgtagaagatctcaagatgaagcaatcaatggaggagctggtcaatgggggtttcattattacctccccctgatacggattaactggcgtgattaacttgatcgatcggtcgatcgacgcgtgatgattccatggaggacacaaatgtcagcgtaaacaaaccggtcgcccgttgacaaaagaaaggtttccacgtacgtacgtgccaattgtcaccgtgaccacgtacgcatgtgtagcaacgacctagctaagattagtttgtttactggagtagtagtgcattgtccaggctacaggtacacatctggaattatgtgtgtatttttttttaacgtaacgccgccttctccctcgtctgttcacatttctagctagctagtttggtttcttcaacgagattttcacgagtgtgctgacgaattaagctagcatgtggtgtgctgtcacgttcttgcacggtttttgtgtgcagcacttgttgcctcgttggttagttccctgccgtacgtttagtataagcaaaatcaacactgcaatttggatgggagcagcttttatttgtcgggagatgcatcggggatctggccgatgatttcatcgagggaaatatcatatatatttttatgtaaaatttagtatcgtcaattatagttatgtcaagtgtataattttttctttaaggaccataaaatttctcttttatccaacaacatttattggcaacttgttcgagtttataaagaggtggtagatgcatattaagaattcctgcaaaaggcgtattgtaacatttcggaacttctctgcatctaaaaaaatgtttagtatacggggagtcatttagtggatgagggaaaaaaaagtgatcgtattattagctctactccaaaaccttaaaaaaaatcatatggaatagtaatatatagtacaaatataaactaatatgaagcatttgtccgaggattttttttttcttttcaaaagagagccaggggttcatgtagaatcaaaaaatctcaaaaatcctcattttgttttccccagagaaaattactgtaggggtccattgagcatatcgtacaaatatattcctcttctctcggatattaatcgcctcttttttagaccagctattggacttagactgagaaaactgtatatataatacatagcactgattaaaaataactttatttattgattttgcacataccattcgaggatagcaccctcaacgttcgcattttctcgaacaaatgaaattatgattcaaggtgcagctcaatggtttagccccttgttttggaataatgcacgactcatttacggcacatgaacttcataagtaacctacattcactactgttgactttttagacgtagcaaaaataccgcgaaactactactcttatattatcttcagtttttaatagatgacacaattaattttttaatacatgtataaccattcgtcttaataaaaatacataatttttattttgttgtgacttggtttatcattagcttaatttacactctcatatttgcacattttttatacggcgaatgattaaatgtgtgtgaaaaaatcaataatattatctatttaaaaacggaggaaatataagtctcaacaagtttcaaatgaaaacatgttccgggacggctggactatatatgtaagcaaaaacaaaagtttacccgtattataaagcaggagttttcaaaggagctggatttgttaaactcaaattgtaggtgaaatttcctgggtcggcaccactcatttccaaattccaatcgaccacaggaaaaatcaagaatgagaagaagggtcagagagggtagaacggtagaactgcccacgtcgtatcgcactatacggttggaaaatggaggcatcgccccctcgaagcggcatcccctgattggtggatctggtcttcatgtagtcacctggaacgcgacttccgcagctaatatatctactccttccatccaaagaaaacgagaaaccctgatttccgtgttcaatgttttaccgttcgtcttattttaaaaaaaatatgaaaaaattaaaaagacaaatcacacataaaatattaattatattttatcatctaacaataatgaaaatacgaattataaaaaaaatttataaagacggatagtcaaagttggacacgaaaattcagggtttgttttttagctgagggagtagtaattaacaaaattcgccgaaaacctctcccaatccatcatgcacgcacgtacgttctaacgtgtccccgttgattaatttgttaggcttatgctaatgcttagactaacctaaccgtgtaggttatagcagataacgtagacaaaagcacctgtccctttcgattagcaattagcaaaccgggttaaccagctatccatcccatcgcgatacaaaccacgggatcgagtgccttgttagaattaatctcgtgatgatctggttgagatatttgtggcgtcgtttgaccagatgtaattacgtacaagagccaggaggaaattaaagtcttcttgctctaatcagttaggaaacccgggcagcttgaagatgccgatctgcgtcaagaagatgccgtgaaaattagcaaattgtactccttcgttctaacacaagttattttttcacaaattgatttttaaacctcttacaaactttttattaacaaatcgataaatttattatctattcaatatattctagctacacctaataattgatactccatccctcctaaaatataatagattttggttatatgagatatatatcttataaataaatacggtctaaatctgtacgattaggatgttaccattcaatcaaaatcttttatattttaaaacagattagtattttaaaacagagtattaacgaagcccgttcaatatttttctttaagtattaaattttattttacacacgagaaatcaatttattttaggacatgaagagttctacagagagtgtgaattcaggggcaggatggagatgcacgtacgggtgctaagcttgggttagcgacgacgacgcaccccgcacgtctcctgcagctgatttcttggaccggcgctttttgacgccggcgattgaacccgcgtagaccagacgagcaccgtgcctactcagcaactaacacatctctctctctctctctctctctctctctctctctctctctctctctctgcccatgcagcctatggaaattgataattgatttactatcaattaggttcacctaattggagaagaaaactggatgtgcaaactgcaaagtgcaaaaggctttggctttgggaaaggctatggctacttggcgagggagctgggagtttcagctacaaaaaatgcattcaaatcggacgcagaaaaaggcctgttctttttccaaaggtttccaaaagggaatccatgcataccggacacttccaagcgtcttttgttgtgatttactactcctatctcccccagaatggaaaatgtgaaaaacaaggagaatcaatcttctttagcccttttgaccaatgtaagaaaagaaaattcttatttgcagtgatgcagaatttcttcttgtgagtgaccccggcccagttcttacgtgcacactgtacctacgagcctagtatagggtcctttatcagctcggttgatcatcctcattaccctgccccttgttaccttaagaatgagatcctctaactttgggggttataagcagaggaataataccatgactctgaggtgtttctagctgtctgattcacagcaaacgaacgagatcgattactaaaatatgctaaaatactgaaaaaacagtgatgcgatgctatatattttactgttttacactgttgctacagaaaatatatgcaaaatcacaatttcttattgtaccatcagacttattttattgtacgcccctacctttagtgcctaaagtcagaggatctggatcctatcatcttctgctttatttgttccttattagacgttgagttgggtgtcacaaacactctctccgtgattttgccttcgagcttgaattctcccaacacggttgaaaacacctcagctgatgcttaataacgatagagtcagtatttgtatacctataactcgattatttcctataacaacgatagagttaatcaacttatgaaagttgactagcccaagataaaagaggaagtaaaaacgtggagcgttacgggtgcgagaagcctcgctgcatggctgtcactgtaattagccttttcagcagggttgcagctctgtttttgcttttgtaaagtttccttttgtacagttttcttcttctctaatcaataaaattggcggcctcgtcaattcgttaaaaaaaaaagttgactagccggctaattagagcataattaattaagtacgactaagtaaaatatgtggttttgtaaaatttatgttgagtattatatgttgcaaagttaaacacggattcaataaattgtttcaaaaataccgacgatgaaatattctttagaaaaacgtgccatttcgtagctttagaaacgtgcccgcggtaattttagtgggagcttctttacatacgcacctcacatgacaaaatggaagatatggggtatcaggtaccgactatcaaatcatgggagagtttgatgacaatagggaaagagaaagctgagatctactcctagtactactacttgggaatcggaatacaagacagatttttgatgatgtacaggtgacgaaaggaagctggttgaagagcatggacggcattgaccgcgggatatgattgtctgtgtgtgtgtgtgtgtgattcacgccccccatatttcttctggtctccacaaccacgtgggctcgagagttgccaaccaatccaccaccactagtcgtcgtcgtcgtcgtcgtcaccaccaagcgacaagcaaagcagctagaggaatattggagagacgagtagacgctctctctctctctctctgtgtctgtctagacccggatcgatcggtttttgccttgcatttataggcgtgatggcgatgtcgacgactgttcgagttggaaaggaagagaaacttaattcttttctctgagaaaaaaaacatggctcactagtctctgcagcttggaaaagaaaaatgaggtgaacagcttggtctgaacttctctagtctgaagaaaaggatgggcaactattttgtcaagagctactcgctagctaccgctgtctctgcttactgactctccgcgatgtgtcgagttttttctgaaagtatccgcgtcactgttcagactattgggctatgcctatgcggaatacaatatagattcagtaggaggatcaattgatcgagtgtgtcaggtttataaaatcaaaacaagtgtgtcaggtgtattgtatattcagggatcatgggggattgcaagtactgatacggtggagggatactaaattagtggtactaacagcagccatgtttgtacttcgagttgagtctttgactgcaattattgaaacatgaaacttggccatggctactgatacagttagttgtgcactttctgaacttaacaatgccaacatggccgtctgattctgcttaggtttgtcccatgttgtcatcggcaactcccttgattcatgaacagaagagatgtcgtggtaaccggtttgatatttctttagtttccagagctgttttcagtgttctatcctgattccatcagttacttctgaaacacactccaaatgtagatcaggcttattcaatatgtcccttttaagttattaaataccgtatgcgttcacctcaatcaattggttgattttagcacaccacagtactattcaacaacattacttttttgcctgttgctgcatcattatatgcaagataaattgatcagtgaatgctgaaatggccaagtttttcaaactgcaactggtaaatataaattgaatcagcagttcagcaccacatcaagtggaatgcattgggatccagatacacccaggatcaacctccaaacaaagtcttcaaaatggtttcagtcattgaatcttttgcagtcaattttttaaacacatttttcctgaagaagggatatttagattttagaagaggcaattcactgattcaccctagggtttacaaaaccgcgtggttaccacgcggttatcacggttaccatgcgcggtaacctttttagtttttgtaaccacggtatgtctcgcggttaccgcgggagtgcgataagcgcgccaaaaacggtaaggggagccctgattcaccttcattaacatgattatggttcatgccaaatgcttagttcaacatgtactttacctacttgcatgttgcagaaaatgtttttgcaggacatgagcaccgtgacagttgggtccttgttttttaatgtttttgcaggacatgagcaccgtgacagttgggtgcttgttaggatgttcgagtacttaacaattaaaaacgcatcacgcttattttccctcttaacagctgagctacttcgaagaacacgggcatctgccctttaaaacgctctaaaaatcacagtaattaagcatccacaagtacgtgacgacgcgggcaaaatctttgacgcgaacatgggcgtggtcaccgcgaacgacgcggcggcggccgcgccgggcaagctccggcggccgagcagggcggcggcggcggcgctgtgcccctgcaagggccgcggggcgccgaagccgccgccggtggccgtgatcgcgcacgagtgccccagcgcgatgcgcgccctcgtcgtggaggtccccgcggggcgagacgtggtgtcgtgcgtcgccgcagtggcgcgccgcgcgcggcgcggcgcgctggtgctgggcgcgtccgggcgcgtcgcggacgtggtgctccgggagcccgcggcggtggtgctccgcggcaccatggagatactgggcctggcggggtgcttcttcccgtccccaccgccgcatgcggcggcagagggcgcccccggaggcggaggcgcttccgcggcggtgttcctggccgggccgcgcggcggcgtgctcggcggcggcgtcgcgccgggagggctcgtcgccgccgggccggtggtggtggtgctggccacgttcgtcgcggcggcgttcgaccggctgccgctcctgaagggggaagagaccgcgaattcggaagggtgcgacgtgcatggcgtcaccagacgccggcggtgcggtgctcagccgccgcagcagcagcagcagcggtgcgggtgggcgctgtgccggaagctgggcgcgaagagctaaccggtgtctaacgcaatgggccgagtgagatgcgggctatgtggcccaggaaaactgggcctgtttagttttctagtttgggcctaatgtcgcttacattacctcggttggccatttgaaatcagaagaggaaatagccaaataggggagaaaaccacaagaatgtgatacaaactcaacaaaggattggcgaaacatatgataacagtgagatggggtgtttgaaatcgtaggcggaatccgtaaaagctggtaaataagtaaacttgatgctctcacttaaacttgtgataaaattacggttacttggagttgcatagattgatttgccttgggacctggcataggggaaaaacgttatgcgttagctgatatttgaacttatatgttccaaatggtaaatgaaaattctgtgcacttttcatgtggtgcaatcctccattcccagctggggtaatgagaacacacgaggaaacctattcattttccctgtaggtgttcacaagagtattctagcaaatgagccatcacattcgacacatgataaacatgagaaaaaactaacggtgaagaaatccgtctccttggatatctacaaccattataccaactggagaagtggagatcagcccatcaatgacgatttaactctttaaataactgacatacaaccagtattgaagataaccttatgaaaaccttcatcttgagtgcgagcaacaaagcagggtagagccaacgcttcaacgagcttcgacatggtaacctcgttgacctcctgatcactgtattcactcacatccgatgatgagtctgctaaaaaaatacagaatcaacatctatgccaaccgtgtccgttgacagcggaactaggggtgggcagaaaaagaccgaaccaaaaagaccgagaccgagaaatttggttctaggtagtgaaaaaccgaattttgttcggtcaattcggttagtctcctcggaaaaccgaatagaccgaaaagatcaaattataaaaaaaaagtctaaatgcaacctacaatccactatgtttaataggattaaattctaattttcacatccctacttcttcaaggcatgcaacctaataaaagtctttacttataagtgcttatgattttttttgtgatttttgtgttgaaatttccattatatctttgcatatatgaaaatgttgttgaatttcggtcaagactgagaccgagaccgaatttgtcagtcctgacattttttgcgctgaaattcggtcttcacttttcaaagaccgaaagaccgaagaccgacaccgaaattttttggttagaccgaatccccacccctaagcggaacccattgatgaactgacgagggctagggagtaggggatcacacctgttaccactcgcggtcttttaaacattattgccacactcttttcatatgcacaaaaataacctagaattatgtcctaaaattgaagcaattttgctatatatttgtcgacaatttttttcctaaaaagttaacatatataattacagtataattataatgtaattacgtcgtaacgtgcatataacttttatataattttaaaccgttagatttgtttcaaaatttatgcaagtgaagaagaaaaaagtcactgcgtgcacatatgtgagaggattcgttcccacgacctccgtttcacgaaaatagcatgttacggagagatttttgaaaatttaaaattatgtctattaaaattttaggaaattttttttcgacaaatatataggtgaccgaaactgaagtactcgcttatcaaattttgcagaggacttctaccaatccgggccgggcccaaaatgctgtaaattattcccagattaaagggggcccacctgtctgtgtaaccaaaccctccagtgcagcagagaatccaatccaacccaagaaaaaagaagaatccaatccaatccaccacacacgcgcaccaaccgaaggcgaaatccccaaatcgaaatcgacccagccagccagccggcacgccgatccgatccgtcccacccacccacgcatccggccgccaccgctgcgctgcgccccgccctcttccactctcccactccatccccatcccaaaccccgcgccgcctcttaccgcttcgcgtcagcttcgatttgattcggttcggttcgcgcgcgccccgatctatcccgcgcgaagtcgattcccacgccacccgcgctgttatgtgcgcggctcccatggcttccactgcccagccgcagcagcagccgcagcagcagcaggagcagcagccggtggcggcggcggcggtgccgactccggctcctccggcttccgaggcgcagccgcagaagccgacgagggtatcgttgtcgtacgaggagatctccaagctcttctcgctaccaatcgcagaggcagcctccatcctcggtaatcccgcccgccctcgctctctctctctgtccttctccagatgtgggcgagatccgtcgcctggctcgatttgagggccgcgcagcagctgaacgaacttttgggtgggggggggatttgcaggtgtttgcaccagcgttttgaagaggatttgccgcagccacggcatcgtcaggtggccgtatcgaaaggtatgttttgccctgtttcatgagccgattcctgtgttctcgagtgattgtgttgaacttgaatgtcagaactgacgaggaattcagcagattagtttcatgagctgattcctgtgtttttgagtgattgtgttgaatgtctaactgacgaggaaatcactggtgcgagaaggaagaaagaaagctatttgccgatgagaacttgcatgcttgttctaatttagggctatttgagcaaagagaagtatgcagtggttgtatcctatatgtaaacatggtgctctctttgcttatatattttgcagcagttggtggctttaacaatttacaaggtagactgctttaggaactgatatcgtactcatcagaggcttatcttaatagttgaattaagcgtatcccaaaaagtaagcaaggagacgaatgaattatgtcagatgttggctacttgaagatgttcatgaaagattgaagtttgcttcgaaggaagaaaagaggcgctagattctatgccctagaagccctattatgtaggtggtaattcattgctttccactaaatttgatgtgcgctctcagtaaaactccacctcccttgtcctcccatgctggctgcctctaaccagaacagatagcgaccaccccttgctccgccatggcaatcatccattaattcagagctcttcctgacacaggccgaatatatcaagtataatctacatcgaagaaatataagtctaattccttggtattgactagttactaagatggatgaattattttattccacaatcagctgctaacagaactgctgctaagaaacaaaaggccatcatcagaagcttcaatcacagcacctgtggcttttgggatgcacttggtgcgtgccttgattgagaactggaggtggcagcctttgccatggagaaaacagactgaggacatggtaggatgaagggtaaaacaggaaggagaataggcgaatccttgtgtttaggtgggaaatagtaaacaaaataggtaacatggcattttattaagagtgcacgtctgtttagtggcaaataattaattggcatctgtaaaatggcaaatcgttgaagccatcactgttgagtggcgaatagttaaatttccctaataaaatactccttccggtaaatattcgataactgaaatatgctgtctagctgcataattggttaaagcttgttcaatggctattcgaatgcccatagtgagttggttcaaactgttattgaagatggtatttactctattctgcatgcaaacatagaacaactacagtctgaaagctatttctaccccatgttgtcttctcttccgcatattgattatgttttcccagctttgttcttagtttcttctttgcaatccaattatttatattatttttcttaaatattcatgcttgcagcttgtatctgggaagtctggtgatgacacaaaaaacgctgaaagagagaaagccaagggacttcttgagatatctaaagttgcaaaacagaaggctctaagcgcatctggtctatcaacagtgtgagtagtgcgttttaacttgattgtgttgatgcccatattttattcctgtttcctgtgcaataataaatatgtcttctctcttctgcaaatgttaactggacatgcttggttctcactgaatgttagccacgacaactgcttgctagtgctattttcttgataatcaacagagtatactgaggtagttgatggaataattcaaagctttttctactcgcatgaatatttcagtgtaatatcacgcttaactagtacaagatgtgaagaaagtagtacttgaaattccagcatttccttgttctcttatctatctggactgataattatcatctatggtagatctggatattctgttacagtccaactccatcccagttgtaatattggctgttttatggcagtgtcctatggtaattcctattgcgactgattgtagcttgtactgccagcagattcaagttatgctgaatgcactatgttgtaaacaacagtgatgaacatatatgtggccaagtaatacatatatcataagggatggaactaatttacaggacaatctgttttttcataaatttacttattaattttaagaagaatttgtcccagttttttttatctgctactaagatttctgctctggatcctgtataacttgagagtctatgcacgttttactgcagacaatatcaccattaacttaagctatgtagtgcaatagaagaagttaatgatatgctcattcttgccttcttgtcgctaatctgtattataaatctaaaagcacatgacaattttaattgtacttgtagcttctgcttagtaaacttttactgctactagcttttggcttgtctgatttaactgctcaaactcggttgttggtctcatgacccttaggtgttctattattccttttatggctactttgagctgtggacatggataattgtgcttatgaatttcagctggaaaaaaaatatttgcgcaatacttgcatacagtgtgtttttgtagtggttcattgctcaggattctactgaccatccgctgtctgagtatggatgctggggcagtagagtgggacattgggttggtaccaggtaaacctgaccacaacaacagtttagaccatccctctgtgggactctctgacccgaggctgcgtgtttctatgttttcacacttggatgctatcaactttccctctgttgttaccagttaccactattgtagtctaatttggtttctcagttctctgcatcaagcaccatatgatgatctattgtcactattgaagcggtttgcagcatttgttctgacacttaaatctggacatattgatagatcaccaggcgctttccaaggagtggcaaaatctcaacagggaagttcgaaggcaggacaagtctcacccccaggaaaacaaaatgtgttgggtggatcagcaatcttgtcctatggtacccaaaccaaaggcatcccaacctacatggacgacttcaagtacggatttccatcatctggcttgtctttgcaaactatgaaatggtgggggactgacagccacacggagaccacacctgcgaaagacgataacggtgaagcccctgaatcagcaaatgaggcttcgaagggtatgaccgacgatgagttggactggggagcagatgaagctgaagccgaagccgatgccgatagtgcgatcacaaccgaaccatctgcacagctgtgctccctgagaaggaaagctgtagacgatgggcgcaagctgctgactggcaagtcctgcgggggactggagctgtgcaggctgaataagaggcagaagatggccctcgcccaggtgttcggagcctcactgccggagcagttgaggagcaagctcgggtgatgattttgcctgccatttgtacctctgtgtaacactagttactagtagtagcgaccggcatggttaagctggttcctgatgtaacttgtcctgatccatttgtgttgtgagaactagataaattcgttgtgaagaggatggtaggagttttgcctgcctgctttcccatttcacgcataattcctttcgtctcaaaataactttatttattcataattttatttgtctctaaataattttatcttttaagccataattgcattaaaagtttataaaagtagaggacatatattggggtatgttaaaataatagacgattgcattgagatttgtattagggtttgttaaaatgagagacaattgcattaggatttgttaaagtgatggacattttagtcatttttatttctttgtaccttacaggtaatacgattttactgagctatcgttgatacagcaaatgaacaatcaacaatcgtacgtgttgtacgtctacctacgtggagtgaggctgggtcgtcagtcacgccgcatcgggctattttggtttgttgccaattcttaccctttatagactgtagtcatttcgattggaatcaatattagctggggcaaatctatctaaagttggcttaagatttgacacaactattttttcttttaaaaaatattgtacaaacacacgtgaccatataaacacatacaccatagttagcgtctatcactaaattacaagtacatgtgctaagtttagaaaattaaattaaactcgagtggatagacttcttttttttttttaaaaaaaagaactaacccattaagctgcacccgcttcgtgaaacaaccaaaattatggcatgctttaaaccaaaatgagtttcaagatcgcatttctatatatccattgtctttaaaaaaaagacaaaattatgacaagcttcaaaccaaaattgcccatggagcctagctggggtgattggggtccatgttcattggttgctcaacgtggacatcgaggccaccgcgaagaggtcatatcactgatcatgcaccacccggcgtggctagttagcagcctccatctccatttggccaacaaagtggcagcaatttccgcatgcaagaacgacaactcgagaggagacggcaaaacaatgttagtgaccgttttattggcgttttgttccatcattttctttagcgctgttctagagcttaatttgtgccgtgcatgctagcttaattgattatgataacctagctacgggtgtaaaactgggatctctttataacgattaacgaaggaatgttatgggatattttaatgtttttcaattaagtgtccataaaaatcctgtaaaagttttttcattactccattcgtccaaaagttttaaagcttatttattttctgttttttttctccaaatgagatatgcgtctccatatgcatcaaagacttaaatgaaggacttgtactttttacaatgctaaattaaattgttaactaaaattcaagcaaacattgtaatactagttgcatgaatcatgaatgcatattattttttctttgttatatgtgaaataagttagtttctacttggtctttgtgataaaagaaatatgctataaacttttggttggggggagtatgaataagccctcttataattcgactaattaatcagagggcttttgctgcattacacttagttatggataacttcaatcagcatttaaacatgtgtagaattatatggcatccatctcagcgtaacatcttataactgactaattacaatctaccttctttatttccattttttttcatgaaatgtatagcatttagatataaattaatttcatagagccattgaaggtttgaatattcttttaaaaaatgccatggaaatattttggttgctctaggaacgaattgtgctctagaagagagcgaagacaacgatgcctaaaacagtgtcaattgaaatttgtttatcgtagctgttagtttgtactacgttactctatccaccagtactgttcacatcagagttcaaatcgtagtgtccaaaaatatggttgccactacatttggttcccctatgcgagatggatctgtatcaaacatccaaatttcccacgaatattttgcgagtttcaaaatttgaattcctttttcaaattccaaggtagtacaccaagcactatcaagcttgctattggctacagtgcatacatacacatccctagctatctacccagtacacgcatacgtacatgcacgtattgtacgtacagcttaattaattaattaattaaattagacgttgacgagcggcgagccggtgaggaactcggtgaaggcgagcgcgacgaggccgagcatggcgaaccgcccgttccagagctcggcgtcggcgctcatcacgccgccgctcctcgcctccgcggtctcgccgcggagcagcggcaccagcgacgccgcggagagcacggcggcggtggcggcgaaccacgccagcccgctccagctgccggcctggtccaggagcccgccgccgcgcgacgcctccacggccagcgccgacacgaaccccaccatcgccagccgcccgttgatccgctccggcgccggcccgctgaacgccagcacgtcccacagcttcgtgctcgccgccggcttcgccttgggcgccgccgccgcggggctcggagtcggggtcgtcgccggagacggggacgacgacgacgtggccgtctcctccttcgtcggctccacctccggctgcagaacgatcaatcccaagttagcaaattaagaagcaatcaccagaacacacagtgatcaagtcaatcaagcgtggcatgctcagctcacctcggactgggccctgacgacgagcgcgacacgccggcgaggcgcggcgcggccagcggagacgacaccacgccatggcgcgccaccagcagcagcggcggcgacggcgaaggagctgctcagcgccatggtagcggccgccattgcaaataactcaaacacaaaaattaaccaactaaaacgcagagagagatcgatcgagctggaggaagcttagcgaggatcgaattgaagcaaagaactcaggcgagcgagctagctagatcactcttcttcagttcttctgctgctactgctgctgcgggtgacgagacgagcataaataggcggggagatcgagaaggtcacggggaggtggggagcggtggtggtggcggaggcggcggccacgtcggcgggggagaaggaggcggcgacgtggagggcgacggggtcagaggttggtggtcgcggtcgacgtggacgtcaagggcaccgtgcgtcgcccgccaaaaaagggtcaggaagagtccagaaggcgcgcgccagtagtcgcgggggcagggtggcggtttatggggccacgtgtcagtgaccggtgatatgcttatagccttatacaaggctagtagcacaagtggctgtgtatggtttttaggtggacaacatgacgagagacgcgtgatcaaactcttcgttacatgtggttgtgaaaattttgaagacgatggtcatttttataatgattttttattatttattgcttaattttaataatcttcttccttatatatatccggcttcacgattttttaagtccttcgcacagcatatctggtttttagaaggacccctatgtaaaataacatttcaggagaactgtttgtggggaacctagatctaattacgcataaatcagagggttttttcgaaaaattttcactccgcgcactgttcctatccgacgtggcatcgcccagcggccgctccatgcgccgtcactatagccattttagttgagtaatattcacatcaacttctgtaaatggtaactttgctcaaaatgtacattaatatctatttttttatagtatgcaacattgttttgttttaatccaagagcttcataattgttcacttggtgggttacaaattattttctttgtatagctaagtttattgttggatcaatgttccggaacttatttatttcatttcatgatctggaatataaatttaaagcagaaagattctccgtagaattgaatatgttgtcgaagggagactccaggaccctaggttactgttacttatcacaaatggcacgcaagaaaacaaaggagcgtggtgggcatcgacggtctcttcacctcctcccgcgcatacagcagttggagcttcatgctcaccttgaattcgatttcatatggtcaattggaggaggccagatgctggctgcgttgcccctagctccaaaccaggtcgtcgggcatgcacatgagaaggcacatggcacacaagggagaaggctagggctgggttgtgacttgggaggaagagggggctgtccacacacccgtgcctgcttatcggtgccgtgcgcgcgagaaggtgaggctagagacaaagaagacatatgggttaggattgggagaggagaagtggtgcgaagtggaggtcgccaggccatggcgttgcggcggcgaaggttagggaaggtgaggaggagcgatagaggcatagggagaaatcatgatcatgaggccaaaggcagtcggacttggatgatggatgaaacggagtatgacgaatagaaaattacaattttttaagtagggttagatatccattgacataggggcaatctaacacattaagaatcatagtccactatagataaatttttatgccgggttcgtcaatatttttgcattgctttgagaggcctgtttacgaaaaacgatttttctatacgtgtctgaaccaaacaacatccaaaatatttttacatgtagatgttcttttagcccgcatgtaacaaaatagggtgtgcgtccgcaaaaatcatttttatagtgactaaaacaaaacaatgttgcatacttagaaaaaaagacaaatacattatattatattaatgttaaagtgtacttttgagcataacattgataattctcaactagaacggctataatgaattgaaccatctctgtgaaccgttgccaaggatatagaaaacgtgcagatacagccagtatcgtaggcaaaccatcacgaacgacgtgaaaatctccgacgcgttcgcccgtagtatgggcttggccatctccctcgtgctgcgccagccgagaaacccaatcgcagcggcgtctacggcccacacggtgccggcaatggcgacgagcctaacgtccggtgcggctgcctgccgcgccgccgtcacgaggcggaacagcagcgctagcgccgccataggcaccgacacgttgcaccacttgagcaggctgggcatatcggacatggagaaaccgtacttctccctgaagtagaggaggcacatggggagcgcgaagaagacggcggcgtaggagaggcctatccaagacacgccgccgacgaccaagccgccggctatcgcgcttgcggctgacacggcggccacgaagcgaacgcaggcatagcggatcaccttcaggtggggccggtcgtaggcggcgaggtgcttgggcatgtccaccgggtaggcgcacgtcttctggaagtacgagaggcacagcattgggagcgcgaagaatgcggcggcataggagagacctgtgtatgacatgccgccgccgccgccgccgaccgccacgccgccagcgaccgcgcacgcggccgacacagccgccgcgaggcggacggacgcatcgcggatctcgcccaggtcgagggcgaagaggaccgcggcggggtctttgggattgtaccctttcatcatccgctccagtgccttcccgctctcctcgtactgtttcctcctggtgagagccatggcgagggcgccgccgtgcgtgaggcaccacgcgagggacaggacggcggctacgtcggcggcccagacgacgcaggtggcgagggcgacgtcgccgccgccgccggccctcgcttggttgagcaccgccaggacggcgacggagagcgcgacgggggtgaccgcgacgcacgcctggacggacagcggcgtccgcgcgatcgggaactcctgccgcaggaactcgagcgcgtagacggagaacgggagacggaagaggagcgcgccgtagccgaggacgaacgcgagcgccagagccgccggagcgccggaggccgggtaggcgaccgcggcgccgaaggccgcgtacgccatcgacgccaccagcgtgatgtgaaccacggtcttgaaccgcagccctattgcgtcgattctcggctgtttcgtatccattatggctcctcctcgatcaaatcgttactacgtctacgtgaaaagatcaaaagaagaggcaataataggttgccttatatatataggagtaattaaggaccgtttcgtttcgttgtcggttggaataagtccatttgcctccctcaattcttgccctttatcgaattacatccctcaaccgcaaaaccgggtatattacctcccccaagtgttaaaaccagtacaaaaacaactcccttggtggtttttgacagtggttttactgacgtggcttcctagtcataaaaaaattaaaaaatacttgaggacccacatgtaagtggcatttctattcttcctctcctccaccactctcctctctcctcccccttctctctccccgaacagagcacggccaggggaggcgccggaggcgcgtgaggtgtggggactgccggaggatgcggcgggcgcacgccgcgagggagaggatccgctgtcagcagcagtagatgcaggtggtagcggttgcagcgggggagaggaggatgcaggagctaggaccgaagcggagctcgaacaaggacccggcacaccaaggtggacgcccggggacggcggatccggatgccggtgctgtgcgtcgcctggatcttccagctgacgtgggagctcggccacaagtccgacggtgagaccgtccagtggctgctccagcaggcggagccggcaatcgtcgccgccacggggacggggaccataccggtgtcggcgctgacatccgtcgcaccatgccggggctagagctaggactctcacaggacggccacatcagcgtgctcgccgcacagtcgctcagccagttctaccaccaggtcggcagcgccgatgccgccggtcaactgccgcacccgcaccaccatcaccaacaccatcagcagcagcaggaggacggggaggatgagcgctacgacggcgagtccgatgaggagtccgggcagtagtaggcgcatagccaattgttcatccatgcatctcacgttgtctctttggagaagaaaaatagaattccaggaaggacatgcagctaatggaggggggatgcttttgttactgttgggttgttcttcatgaggttttttatgtctgatttgttcctcgtgaggtgtcgaagctcgaaagaggctaccacttgctccggcgacttgttgggatggatcatgatcatcttcagttgttactcctgctgctccatggatggtcgccagtttatccccctccaagtgtttaggtgaaagcttaatcttttgcactccacagtcagcacatgacatgctcttcgaaaggtagcctgatgagcttatgtattttgctggaggttggcggcgcggatagacagcaggaggatgtgttgccggccgagcagatcgacgccgtggcaggtgaaccctccccgcgtgggcgccgcggccggtgatcctctcccttgcggcgtgcgcccgcatcctccggcggtccccacacctcccgcgcctccggcccctctcctggccgtgctctgtttggggagagagaagggggaggagagaggagagtggtggaggagaggaagaatagaaatgccacttacatgtgggccctcacatatttttaagtttttttcgatgactaggatgccacgccagcaaaaccactgtcaaaaaccaccaagggagttgttttgtactggttttaacacttggaggaggtaatatacccggttttgtggttgagggatataattcgacaaaggggaagaattgagggaggcaaaatggacttattccttgtcggttcgatgtttttcttttcccctctttcgagggggccgcctatgcatcactcgggtgatttttgagattttttctttccttggatttgcatccaacggactacaaaataaaataattaatacaaatttacttacacaacatttttatcaaaattacagtgcacttacatgttatatcaactaaatttacatatgtaattttagttatataggactgtaattttatatttgaaataaaataactaatgcaaatttacttacacaatatttttatcaaaattacagtgcacttacatgtcatatcaactaaatttacatatgtaattttagttatataagactgtaattttatatttgaaataaaataactaatgcaaatttacttacacaatatttttatcaaaattatagtgcacttacatgttatatcaactaaatttacatatgtaattttagttatataagactgtaattttatattttaaagaaaataataagtacatatttacttacacattatttttatcaaaattacagtgcacttacatatcaaatcaactaaatttacaaatgtaattttagttatatatgactgtaattttatattttaaagaaaataatatgtacatatttacttaaacattattttttatcaaaattacagtgcacttacatgtcaaatcaactgaatttacaaatgtaaatttagttatataggattgtaattttatatttcacgacaacgacaagagagacggtgtctctcgtcgatcagtattggccgtgctaccggcggctggctcgccggtcagaggccactgtgtcatcgtgcttctccgacacggtggccgatgtgctggtgtccgacgcgccggctgacgagcctgaaaaaaacgtgaaatgtcagaaaaaaatcacgcgagtgatcgttagcaaaatcgctttcgggtgaatgggctccgcgagtgaaataaatttagaaattgggccgtattggcccaatgtgagattcatcataggcagacaggccggccgagccgtattcggcgccaaattctggcccatccactgaccagcagggccaacccctcgacaagtgggccggcacggcacggcccgttagttgttccgagcccaaacgtggctgggccaggacgtaaccggatcaatttacatataggaaagaaaagaaaaaaaccttagcgtccaaaaatcattgtgcctcgagcactcgagtatctccgccgtcctttccgcgtcaaagaaaatccccccgtctcgtctcgtctcggcctccgcccctttcgtcctcgccgatcccccatctcgcgagcacagcaagggttagggttggggcgcccatctccatctggcgagcagaggccggggagggaggggcgccgtcgtcctgctgcatcctggtgagcatccacatcctccccgacctaattttgtctcgaatttgcttgcgctaaccctagctttttttttttttgtgggggagttaaccctagcttcaattctagatctggaagaagctcctctattaatttcagggcctaaactttaaaataacagtttgtttgttccccaaaagaagtttgtgagggttcaactgaacccccatgtcccaagttggatccgcccctggtttgtttccaataaatatatataataatagtaaattggggattcacttgaacacccatgtccaacatgaggtccacccctgtgtagcattggacgctgattgagtattgcaatgtgtagagaattcgaagggtgatcctgtgctcgggatagtggttttcacgcgctattgtgtagtagcaatatgcgccatctactcgttatcaccattttacctagtatattgcttcttggtaggcgcattggtagtgatattgactgtagtttaggagatgcgatgtgtttctcttccagaactgacattgtttgtatgagtcacagtagaatcgtattatacttgctactatcctatttctgctctgttgccatctacctgctggttatgtgttggctgcatgtaagctactgatcaagctcgtaatgggtttattctgcgaattccaggcgagatagaagcatgatggcaaagaccctgcaagggactcaacagcaatatgcagcaagtggatttcctacccagcaataccccacaagtggctggacacaatctgcagctgaaattcttcagttggataatatggatcaagatacatccgtagttcgcaatattattcaccgtaaaatgtaagttcttaaaccaccaatattgggattagctttgactcgcagattactagttgctttatactagcatgccgtaccaacaaagtatacactgtacatatgttttctgcaactttagttgaacatttcaaaaactgcaatgctactggcacgattttatctaaaatctgtgactgctagtgaccagtctgtctgataacatcacgtgcttttggtggcttgttgcaacttaagttgtagcaaaccgataacttattgcagttattatctcttgttcaactatatcctgattcttttttcttatccagtgtagagtacctaaatgagcggaaggaattctgcaactttgacctatcctttcttatggaaattggaaaatgtattgaccgacatctttttgagaaagctgattcaaaggtttgtgttgtctcttgctgcattagaactattataggatatatgatcacctatggtgctttaatttggtgtggtttctactctaatattggacaatattgaacttatctacatgctttattgaataaatacaaaattcagcatattcttgtaatccttaaacagaattgttactgctgaacagtttggtgtacttagaagttgattatttggattcatttatctaaatagttctcagtcacttgctaacatctgattctctctcagattaagtatatggatcttgaaactttaagaaccaggttgaatgctatcgtcaattctgcatcatttcggggtagtatgtttcattggagtgcttcagcagcttcatccaaactaaactcacaacagctgcctgtgatggaggtgcccatctaccatgatagagttactcctggacctaataatctgccctcctgtgcatataatgtatcctccactcagggtgagttgagatgatgagttacctattttaacctcacaatacaccttaatttttttaattctttattggcttgattttggcaggatataaccaatatgaaaactgtatgggtgctgctaactttgctcattcgttggctgataaacccaagcagatgcctgaaagattagcaaacaccatttttacctcatgtgcatcaactctaccgaaatgtagccctagtattgatgtactgcatattggccatataaaagaacatttctcaggtgagtttacatcccctttcttatgtctgaaacagagttgagctgaagttatttggcatcataaacactatggtcaaattttgccaggtgatgcgtatcaaaatgatagttcacaaccatcaacctctgggagttctagttctttgtcagcagtgtgggatcaaacaacatgttctagtgcaatgagaacacttccgatggattctttctcaacagtgaacggacaaaacctttccacaaacaataaaagtttgtatcccacaaccggtcagggacctttgttgcaacaatacatagaatgtgagatgaagcaagagacgtggagtcggtcactagagcaatcagatcagtcaaacattaccactggaaaccgtgacttgtatcatgctcaaattcatccgtacatcaatggagagcacaaacgggatcgatgcattcaaatgaaagaaaaacttgggcatacttctgatcatgaaggtttctccagggagaaaagctcaaatttaagcaaccactttatgcatcatcagcagggcttcatgactaattatggtgcttgtagccctgtaagcaagacagtggatagagctgaacagacatcaaatagtactgtatcaaagccgacttcacctgcttcagatggatcttctggcaagcattatccagcaaaacgcttgaaagttgatgttccccatcttgtccatgtcaatgaaatggaggcttcaaaggaacaacaacctgctgccaatgagacttatgcatctgctgaaacagtacaatctgaagtcactaattcaccaacaaaatcaccatgttgtacttccttgggggacaacattgcttgcaccgataatgtacatggaatggatatggtcagattgtcggggagtgctgtacaaactgaagaagaatttcgtcgtgaaaatagtgacattgagatgaaggatgcaaaggttgatttattggaccaaacattgtcaggggacagcctgagggcaaggaagagaagaggggcctcagtactttatgcattaacttctgaggagcttaaagatcacttgtgtactctgaaccatgatacttctcaggtgagtgaataacctgttggatcttgtatgatttatctagtattgtaaagcacttgattattattggttgatgtagtctagagaaattttcaaactgagcagctgcaaaattaactaaatattatgtactttcaattgattttcatttggtactaagattttgggttttgttgtcactcaagctttcttgattatattgtacagagtgtgtgcttgttttaagcaaagtttatatctcttaacatgattaacttattttttgtagagcaaagtgccgactgaagagctgctatcagttgaaggcttgcctgatcagaacacatgcaatttatgtgggatggaaagactcctctttgagccccctccacgattttgcgcgctctgttttaaaataattaattctacaggatcctattatgttgaagtggaaaatggaaatgacaaatcttcaatatgtggcagatgccaccatcttagtagtgccaaagccaaatatcagaagagattcagctatgcagagacagatgctgaggcagaatgggtaacatatgcttctcttatttctctctagtcatttggaatcatatacgaattactcattttttgtttaattatgccttttcagtgggtccagtgcgataagtgcaaagcttggcagcatcaaatctgcgcactttttaaccccaaaatcgtggatccagaggctgaatatacttgtgcaaaatgtttcttgaaggaaaaggataatgaagatgttgattcacttgagccatctactattctgggagcacgcgagttaccaagaactagactaagtgatcatattgagcaaaggctttctgagcggcttgtgcaggagcggcaacagagggcaattgcttctggaaaaagtgttgatgaggtagttgtgttatgcttttcttttataccttgtcccgtgtacagaatatgctggtgttgcattctgctaccgttgaacaggctacctcactgttaacctattgaaccacagccaaaagttacatacgtctttccaattgcatttttgtgcttcttgctctatgtgctggattgaaggttacaagtaacatgttagtccttatattatagtcttctaagttgacttagataattcattacatgaatgcatctttactgtcatacgtttctttttattttttacaatgtactgatggcatttcacttaatcatgttcttaatacttctcttggtgcatctagcaatgtgtatttatggcttcaggattgcagctgattacacatgaattcatctttggaacacatgttgatgaccatatatttgttgcgtttcagtatcctttttagtgaaactacttttttcttctttttccttgcattttattggattccgataaaagttggttctgcatattcatctgatttagctgaccaagatgtcatattacaattcatggtcaaacttggaacataaacttgtggatgctttgcttagtcttatctgatcatctatgctgatcttaatgttatttttctgcctctaggatttttattacactgtaatatactggagaaacttattgggcgaacttttatggtccaattattaggtaccaggagttgaaggtcttactgttagagtggtatcttcagctgatagaacactgcaagtccaaccacgtttcaaggatttttttaaaaaagaacaatatcctggggaatttccgtacaaatcaaaggtgattatgtgatacttatactttactaatgctattattataacatccatttaaattatgctttcattatttagtggataatgtgggttaccatttccgtgttttgtgcttgtgcaggccattctcttgtttcaaaagaatgaaggtgtagatgtatgcctgttcgccatgtatgtgcaagagtatggttcagcctgcccatcaccaaatcaaaggcacgtttatcttgcatatattgattctgtcaagtacttcagaccggaaatcaagtcggccagtggagaagctctccgtacctttgtgtatcatgaaattttggtatgagaatgcataatcattaaacacttagtgttcttgatcttgatttcagtttatggatctcatgttggtctgattatcttccaatctgttttcccccagattggctacttggatttctgcaagaaacgagggtttgtaagctgttccatatggacttgcccatctacaaagcgtgacgattatgttttatattgtcatcctacaatacagaagatgccaaagtctgacaagcttcggagctggttggtcttcatcatcttttacagtcaatcctaaaattatttatgggccttcatttgataatcttttcaatatatttaggtaccagaatttggtaaagaaggctgttaaggagggggtagttgtggaacggaatacactctatgacttcttccttcagcccaccaatgaatgcaagaccaatatctcagctgcatggttgccatactgtgataatgatttctggcctggggaagcagagaggctccttgaaaagaaagatgatgacacctcacagaagaaagaaactcaactaggaaggcttctacgggttgccaaacgtgatgaccggaaaggaaacctcgaggatattttacttgtgcataaggttggttgtttaaatcatggtgctccctttcttcagaattttttttcgccgggccttcttcagtattttaggcacttgaccccttaattttcattgttggcagcttggagaaaggttgcgaaccatgaaagaagattttttaatgctttgtctgcagcaattttgcaagcattgccaccatcctattgtatctggtagtagttgggtttgcaccagctgcaaaaacttctttctttgtgaacggtaagcattcagtcatgtaaacttttgtgaccatatagaatgcatttcccatactgaagaactttctggaacagcactaggggaaatgtctgctgttggtaaaaatatataattgcacatggcacttgcatagttcaaccattctagcttatacagtgaccgtttgcctgtcaaattgcaaaatgaatctacattcctactcttttgttgttattcaattactctttgtcgttaaggcacccattatttatgatgccattcttatttgtcctcgtagttgttatgctgaggagctgaatacccctctgaaggacaggcacccagctacaacaaaacaaaagcatgcatttgaaagagtacgtatatgaattcatctatttaaggtagctacaatctgcctgcatggaaatactaaccagattactaatctcctctgacagatagaggaagaacctcttccagaaacggatgatgtagatccaacaatggaaagcaagtactttgacagcagaatagatttcctgaagcattgtcaagacaatcaataccagtttgatactctccggagggcaaaacattccacaatgatgattctttatcatctacatgattcaacttgttcttcttgtcaccgtgccatggatcaatgcttggcatggcggtgcttggtttgcctaggctgcaacttttgtgattcatgctataaacaagacggtgaaagtttgcatattcataagttgaggcagaaaaaagaccatcacgtattgcagaagtacactctacaggtatccttaaattggtagctgaatctttttcatctcctatttgtgtttttcatgaatgtttattatgcactcgaaattaacatcttctgattttttgggaacaactctggggatctgatttttttttggttgtttgctcttcgcatgattatatttggcataaactgtagaatataagtgagttgcactattattatttgttccataattttatccttttggtttaatcttgagcatatgtgtgaagtgtatgcttcactattcttatgtgttgcttcatgttatgttttgtcccagtattttgtgactgcatatccaaattttcaatcaggatgaaaaatattctatgagcttttagattctaatgtggtaattatgtggtttcatcccaaatattattttctgctagtgatatttacggtgcctcttgctaatgaattggatgctttcaaagcaggactaccttgaaggcttggtgcatgcatcaagatgttttgatcgaagttgcacttccaaactttgtttgacgttaaagaaactgttcttccatggtgtacgatgtcatacccgtgcccgtggtggaggaggttgccatatgtgtgtattcatgtggaaactgctgttcacgcactcactgctttgtgacaatgcagactgttcagctcccagatgcaggtaaagtgtgcatcacccgcaatattgatctgccttccggagttgtgaaataattttcacaattttattttttccaattggcttgttaattatctttttcccttttaaatcttttcagggatataaaggcatatattgctgacagaagcatgacagaccttagtatatctggatgagcttcatgtgaacttgtagaagttttgttagacaatacaatttgttgctagagatgcaataagctggtgttgaccatagtaagtggcacagtagtggcaatagcagcatagtttcgctggtttccccagtatttgcatgaaggcatgcagatggtggtggtttggggatcaactttatcctcgtattttcttgaatcgcctatttcgactttcgatggaggcatagcaaaaaccttacgtaggcaatctgacatgttcccgtaaatacctgtatagttccttattatagctagattaataggatagaggattttcattcctttttattattccttttcttgattgtattgaacaaaggcacattttgttcagtgtttctgtgccgtggcaaaagtccaaattcaatgaatgtgtatatttactcccttgtcgatcgacatgtcttagtttatgagaccaatctctgactgtatctatacactgacctttatagaaccggatattttcctgataaaaatgaccctgtaaatctgtaaaaatggaggcaagctaatcgaagggtgcaaacgtgcaatccttaaattcgaatttcactcgcaacaccaccgtctacgattatattgaagtcgaattaagagcacccaccccccccaaacacgcgagaccacacggaggagctccctcgaacgtcggcaacccgacgctgctcacgtcgacgacgtacgttcgcgaacgacggcgtccggcggtggctttggccatggacgatctccgagtcggaccacagacgatgatctccacgtacgatgctgcacctcctcccctgtcccgctcggtgtgtactcccctgtcccgctcggtgtgtactcctcgatcccggcctttgtccacgaggacgggacgtacgtcgcggtagccatagctcatcggcgcgcacggtgagggcgatgcgcgtgggagggagccccagcgcgcgtgttaattaccttcacgtagcgatgccgagggagagttcgcctcacgagtcgaggagcctgtgtgcacctcctgcgtcgccgtcgtcgctgcctcatcaggatctgaaaccgcgtattataccagccagagccaggttggtccggctcgggtgaaaacgcttgggcgtggccgcgtcgtgagcggctgagaaggcacggtttgtgccgggatgtccttttttttttttctagcccaaaaggctcagcctaacttgtctgcacctggaaaatgtgtccatgttttcgtgtatgcgagtttacagagcgattcgttcgcacgggccggtgtactagctaaaaagcgtgcttgtgtggctgcgcggcgattgttgtacggtaaaagcacacagcggcttccagacgccggtacgccggccgcgcgcggcccaacctcgtaacggttttccccctcaaaacatgccagccaagcgaccgtaagagcaggtacaatagcatgctataagccagctgcaaatatattttaaacagataaatgagcagagagaagagcagcgggctacagatttatagccagctatagcacggactccaagacgcagtgtgtgtatgacaggtggggccaggtattattagtgtagtatgtaactattgtatgaataagctattagattccccgaaaaaaaagctattagattgactataaatgaattaaagctagtagttggctatactattaaacttgctcaaaaccaaaagtccctgatctcaaatttagcccctctctcccaaacaccccttaaatgacctagcgtgacaaacattttatgatctccggatataaaataaaccacctcatattttaatttgtgccatgataggtcgcatcaagccaaaaaaaaaccctgaacaccgtcgtttaaggaacacatacaacttttgttttaggatcaccgaaacaatagttgacaaagactgatgctctatttgtttcagcttagaattattataattattagttgataccccgcgttttgttgcgggatatgtggattaatgcatgtatatatgatttacggttttgctagctaactgtcgatagttttcaatcctgaaaactgtcaattttttggtcgttgattccgcgctaagatttgtgctgagatattttgctatcagatctaaaccctctttttcacaagctagtctcatcatcacatgtttatggcagatttgttcaagttacatctaagttacattctagttacatgctaactacattgtagttatactattgttatatacttatattgtaagtatagtgtaactacactataactaaattgttatctctatataagatataaagttgcatatattgttttaatacatatatacaagttattattattatagtatagttctaatgaaattatataatgtagttagattcgaaagtttttcctaaaaaatactcgacagctttttagctaatcccatgatttatggagtgaaatggtagatgtatatgtttcaataatgtaaaaatggtgtagagatatataacgatttaatattgcttgcatattgagttctaaaaatacaacaaaattataattgatatgtcatgtttgcatgatatttaaaatactctaaataataattgctaatgggtgatgatatggtacacttgcatgtgatttaaaatactctagataataattgctagtggatgatgacgtggaacagttacatgttaagctttagtagttagtggacatcaactatataataagataggatttggattattagtaataatatgaagcaaataagtggattattatgatagattattataatttataaaccagattagtataatctggtagtctcatctaaacgtttttttttcatattattgtccggctaaagacccactacccttaaaaattttatgcaaattatccaccactaccatcgaacctatcaggttgagcgcatccgcttcctctctctccagtcgcgcgcgaatctccctcggccgcacgtgcatctgctttctctctccctagtcgcgtgcaaatccttccctaagctcccaccctacactccggctccttcccaagccatgccgccgccgtctctcatcctcctcccactccgcaatagcttagggtattatagacattagcttttcaaacccaataatctagagaaaaaactcataacttattataatccagcttatagtaatctggtttatattagattacaataacctagtgaaaccttgagttgaaacaaacaaagcttaagatccacgagaaaaaaacaagaagaaacacatgcccaaagatccaccccataagaacaatgagaaacacagcgccccccacaaacacgcaggacgacgacgacggcatgcaactgcggcggcgaacgtcgtcgtcgacaacgacgatccgacgatgcccacgtcgtcgacgttcgcgaaccacgtcgtgcggcggcctgggaatcgatctccggtagagctcgacgatctcgtctatcagcgcccggacctcctccctgtcctgcacggtgtactcctcccagctctccatcccagcctcgaggacgcggtggtagtaggaggattgcagttccttcgctcgaatgacgagagagcgatgggagcccaggcgtgtgaattttaagtacctaccctggcatatcgagtagaggccgcagttttctctcaggagtagcctggttcttctgcctattcgccgtttcgtgtcgatctgaaccgagtaccaccacggcagccgccgtctcctccgcttggggcgatttgcttgtctttcctgtaactcgttttcatgttgcccctccatgcgatgagtttaatttggtcctagatgcatgtcattatgttgtgtatatatatagtttgggaatatcaagcgaaagagagagagagaatagtaaaagaaaagcagaaaagaaatttgacaacctctctcacctgcagattttcgcctgtatagtatattgatgagaatacggtacgtcctgtccggggaacacgtcgagaacacacggaaagatcgatgaaccaaataagcgactctcccatccgagataccgtgtgttgactctaatcgcattctactaggattaggattagaaatatacgtactagcaatagagttttgattttatcatgaatacttgtacccctccatttcagattataagatattttgactttggtcaaagttaaaatgctttaagtttgactaagtttataaacaaatatagtaatatttacattatcaaattagtttaattaaattaataattcaatatatttttataataaatttatcttgggtaaaaaatattactattttttttctataacttggtcaaactcgaagtaaagtcaaaacatcttataacctgaaacggagggagtaaacattaaattgaaattccacttgtataattgaacaaggttaaaccattgagatcgtcggaaactgtcaagcaacgagcagcaagcagcaaccccgcccgcccaaaaccggataaataccaaactgaaactgagaccgaatttaccattcctgatatttttatgttgaaattcagtcttcacttttcaatgaccgaattaatcgaaaaaccgaataccaatcgagacctaagtttccacccctacttctcacgcttcatcttcatcatcttcttctcccccgacctcggtggtgccttcggctgctgccttcagcgtggaagacagagcctccagggccgcagcggctgggtggggattgcgtcgtcgtgcacgcagggctgggggcgtgctaggatgcatgttcggtggggctgggggtggcgacagaaaaacggcgtggaagaggtatgccgacaccgtggcgcgtaacaactccatggaacccgaggtctccacgctctcggacaccggcctccacgcccgcaccgccaagctgcaagagcacacgtgccgaggagtccctcgattccctcctgcccggagctcttcaccctcatggagaagggagggaagaaggggagagagggagagagagaggagggagaagagttggccgctgacatgtgagacccacgtggattccacccaccacgtcagctaaaaccggccattatactaccaaggaaccaaagttaacattgtactgtgagttggggaatgagctatacttcagtgtttttgtctagggataaatattagactcgacaataaattgagggaccctaagtgaacttattggttacacctttatgcgatatggcccaggcagcctggcccagccagctatggcatcgtcttcctcgcaggcgcccccctcataaggaataagttcaccagagatccctcaacttaacatcgagatttttcaaggtcccttaaccacaaaaccagaaatctccacccctaaactatacaaaaccgttcactcaaggtccctaggtagtatatatgggtggtttcgctgacgtggcattctagtcagaaaaaaaaattaaataaagcacgtggagcccacatgtcagctgcatatcttattttcatctcttttcttctcctttctctcttctctcttctcttctccctcctgctgctgctgctgctgctcccatccctgccccggctgcggtacacgagatccgccgccaccgccggagtcctcgtcgttgttgccggctggagagtgtgccgtaatgttgggggaggtcgcgccgggctcctcgtcctcctcgctgcagctgcccccctccccccccgcccccgcaccgtcgtcgtctcccccgctggcgccggccagttcacgtcgatcccccgcaggaatggcatctcgacgtcgaggcacgccatcatcgccgtcctcccccgaccttcgtaagatccatgcatgaaattgagacgccaagattgcagcatgcatgcacgcacaacatcgacgtagtccgtccatctatactcaccggaggaggaagaggaggagaagaggccggcgccgctgttccagccgcacaattgctgcgtctgtggggcggcaccacgggaaggctcgggtgaacccaagcctgggaagcgcgtgcaggtgaggtcccacgccaggtcgacgcggcggtcgccggcggcgcggaaccgcctcgtcccgcgctgccgccagaggagtcagggacggacgcggaaggccaagtgtctcctcgtcgggtgtgggtgctggtccacgagggcgtggttcctggagtccggcgctgagcacgacattgttgtcacactggacggcgaggtggaggcatcaatgctgctgctgcttttcgctcaatcagatgattcgatcacattcactgctactttccgtaaaaaaaaacattcactgctactcgagatcaagacttggtactactcatcgattaattaacttgtactcaagacactgatactgatcaatcaatcaatcagtggttagtgctcgtccgatatagaaaggcaaaagacgcaggcaagaacgaggagaggacggacaggaggttgcatagccatcagaaaaggaaaagagacgggagagagagagagagatcacggtgatggtcggagatgcggaggatagcgacggcgagagggtgcggctgttcgtcggccaggtgccctgcagcatggcggaggaggagatcctcgccgtcgaggcggtcacggcgtcgtgcacggcgaaggacaacgccgtcccgtcgggaggaagatggctgggccccgcggggacggacgctgccgtcacggacggcgcgcagcggaagcacgccgccatcgccgctccgcccgccgccggcctcctcactgaataagggaagagggaagagagaaaaaggaagagaaggagaagaaaaaaacgtgcagctggcatgtgggtcccatgtactttttttaaaaaaattgctaactagtgccacgtcctatatatactgcctacggactttgactgaacggtcgttttgtatagtttaggagtcaagatttctgattttatggttaagggaactcaaaaaatctcgctgttaagttgagggacctccagtgaacttattccccctcacaatcgccaccgattcggcaattcttacagtccgccggcgactgcggatgggatatggtatccagttcgtcggcagccaccagatgtgggccccgacgggtagatttggattcgctagtaataatttttaccttttatccaccttcgagagttcgagttactgctactgattagagtaattaagtgagtatactaatgtatgacatttagattactgcaaaaattgatacatcggtgcggtttggtgaatcctcctcgatcaacagctttgcaatatacatcggtgccgagtaatgctctagttttaaaccattttttccccaaaaaacatgagattaacgaataattaccgtcagatcttataaccacatggcttagaacatgtacaaaggtagagactaatatgagttctctatattaattaatatcactagagactatccttctataataatagagataataagatttctaaaccattaatacactaaatatttttttattatacttctttccttttctataccctcatgcaacaaactttctgttaataaatgcaaagagtcgactctgagccgttgtcatgcgtagcaacgatgtttctcattccttccttctctttcttccacgtcaccaaatttacttacatgacaacgaaaagagcctgttattaaacaccactgtacatcccttagtgaaaaaaaaatcaccgcactgtagggaggttagatggtgataaccgtaactaaccggcttgttcagcaagccaatgtgccaaacaccgggatgcgattagaactttctcgcccctctgggctctgtctccgttaaagcggcaaactaatcgacgggagcagcccatttccagttcatcccacccctcccatcgccgccaccgaccactccaacgccgccgccgccgccgccgcttcggaagttcggagcagcaagagacgcatggagcatagcccgcacctgttcgacggcgcggcgcccaagttccggcgggacgagaggatggcggcgccgccgcgggaggccacgtgggtgatcctggcctgcgtcccgagcgtgtcctcttccgacggcgacttcgaggccggcgaccacctcgccttcgactggcgcgacccgccgggcgtttccctccttaccttgcgccagagcgactctgtctttgtctcccccgcgcctcgggatttctgccccgaccgcgacgaccacccctacgtcgtcgccgtcgactccgccggcggactcctgctccgcggcgccaggaggagcgcccacgatttcggccccggcgtcgcgctcggattcgaccctgcaccgagctgcgccaacgacggcggctacatcctctgccacgctacgctccgcatggcctacctctacccgccctgctccgacgagtaccggctcctctacgccgggaacgtcggcatgatccgcagaacggcagcggatggcgaccacccgatccgcttgttggccgagctccagatagagtccggcaatggcatccaccgtgccaccctactacgctactcccaggagctcggactcggagggtgggcttcaacgaaggtcaactacccgccaggccgccggtcgtggtgcggcgacggcgtcatcgtccacgccgggatgctctggtgggtggacctctccttcggcctcctcacctgcgacgcgttcgccgcgaagccagacatgcgcttcgtgccgctccctgagggatgcaagctaccgtactccagcgacgcggaccacgccaagcaccggtgcgtgaacgtgagcgacggcgagctggcgttcgtgcagatccacgactacgacaccgccgccggccgcggcgcgccatcgacgatcatgatcagcatgtggacgctgcagcagtctgatgcgggggaggagtcggtttggtcgctccgccaccgggtgcgcgtcgacgagatctgggaccacgtgacataccggaagaccatgatgccgcggcgcgttccggtgctcgcgctcctccaccccaaggagctcggcgtggtgttcttcttccagatcacctcgcggaactcgtggatgttcgccgtcgacctggtcaccagaatcgtgctcgagtgcaagaagtacaagatgccccagctgccgacgatgtaccactcctctcgccacgtccgcgcttgggagctgccacattcgatctgccgcggagaggatgatgagacagatggtacgtacgctgcgctgttcttcacttctttgctctgtctcatcgctgcatgctgatgtgctttgtccatttgtgctattcatgtttgagttattttgatgctgggcatggtctgcacatctcatttggccggttcatgattaatcctgcacaccagagggtgcatctaatctagcagatacagatttgcactgtatagttcttttgacattgtaaattaatgggaatcgatcaaggactatatgtgaatttgcatgtttagtaccttctacattttagtagttacaatgttgtaaatgctgtatgttgatcatgtatctgtatgtcatttaacactacggaatactgatagaatatattccataacagcaacttcgtttgtttgtattaatgaccctgaagtctgaaaatcactgagtataatatagacatatatttactagtgcaagtactgttgcaatttagcttctggaaaaaaaatacataagctaagttcctatcaagttattgaacagaggtttaccattttatgactaactagaattgcttgtgttaatttgcagaatctgacggatgagctcgacttgaacttttcgagagacaaagctgatgaactgctgtcaaccactggaaggctcttcatcaatcctaggttccaggaactgaggaatgccactgcttttcctaagtgagcctctttccatcctctttagatcgccgaccactccaattcacatgcactcgcatacaagagagaattttcttcactgaacctcatgtgtgtgttttcttctttttcattcatcaggtacttgtcatttgtcattgtcaaggctaccgacgcatatgaggcatcgtgtctgatgcgagacttcgtgtcacatgtctccatggacggttcaaacatagttcctagagtttcaggtgaaagtattgtatgaatagttcagtgttgagtttcagatgaaagttttgtttggaaatcttgtttcttctccctgcttcctctgtttgacatatccggggcactaggcagttcagaaaccaaacgccctgactgatgctgcgtagtgtctttaattagatatctggcttaactctctgctatcttggacaaccagtgtttgttaactgatggatggctgacgacattgttcgtgatggtacgctgagttctagttctcgcatatttgatgggtgattgtttagatttcctaactggtatgcggttgagaaattttatgatatgtgaattcatatttttactatatatcactgccatacttccgtacagagttttaatactatgtatcagtgaatgtatgttcaggctaactcgtttagtttgctcctgttcctccgtttgctgaacctgctagaaccatacgaatacgatgacgattagtattgtacagaacaattaggagactattagttactatctcagttacaattacagaacgtctgaaccacggttttgagcagccgcagaataattctagcaaacttttggcccaccgtttcatattataaaccgtttaactttttttcctaatcaaactttgttaagtttgataaagcttatagaaaaaattatcagcatctaaaatataaattagttttattaattctaacgttgaatcaattttgataatatgtttgttttgtgttgaaaatacacaagtgtgaggattattccaacaataagctggtaattagtaatccgtacagattgaaaggctacagcgctgcatgcatgcttgctcctttcatatgatcttgaatattcatactctgattcataaaactgcatgctagacagttatcgctgtctaataagtaataatgcaagtgcaaaagtattcaaagatccatctaaaaaaaaggacgaagtgcgagggacttttagtactatgattgtgtactgatgctagcaccaaggctggtttatttcatcatggaaacatcaactgcatgtagagcatatcctcatttagttggtgttagtggctaccatagttatgaagtctgaaaattagcgaatgtaatatgtactggtgcaaccgtataatagaattaatgtactgttgcaacttgcaactgctgggggtttgaagcttgatttcacgtgacaaatatagcatttacctgatttgggtttttgttaacatttttacagatgactagttcctcgcaaactatcaaatactataaattagcaccctttttttatcaactagcattgcttgtgttagcttgcaggatcaaataagatcgactgtttgaactttctgtatgacaaattgatgaaatattgtcataaaccacgtgtttatgacaaacagttcatcgattaatgtcttgttcacggcattcctcaactgtgtgtgctggctgatgcgtgctaaatctcatataagatggggatttgttcgaggttagagaacctgattagtgataaaccgataacttggggcagccgtccaagcctattgttacagagtactactgctgatggtgagcctgaaaaacacggtagtacagtaccaacgtctctatttggagcggaggcaaatgtagcagccgcacaagacgcttggcctcttccacggcttgcgcgctgccgcggcgcgatgtagcggccggaacgcgcgcacggccacttccgatgattcgttcgcgtgggagtagtactggtactagtgtgccgtgtgcccgtgcggctgtgaatcgcgatcggtgggaagtgcacgcgcggtggcttagcttcactccattttttgccatacacggaccgcaccacatcgtccgtcacaaacggcatctgccaactggcggcctggcgcaccgtgcaatctccggccgcgacaagtcgagcataggaaacaaggcaacaagcgtaacattcttttttcttctctgaaagactgaaactaatccatggtcccaaacaagcgtacaatggactaccacgatacatcggtgcggtttggtttggtgaatcctcctcgatccacagctttgcaatgctctagtttttaataacctttttgtctaaaaaaaacatgagattaacgaaaaattaccgtcagagcttataaccacatggattagtgaaaaaaaatcaccgcactgtaggtggttagatggtgataaccgtaactaaccggcttggtcagcaagccaaagtgccaattgccaaacaccgggatgcgattagaatttagaaccttctcgcccctccgggttctggctccgttaaagcggcaaaccaatcgaggggagcagcccatttccagttcatcccaccccgcccatcgccgccaccgaccactccaacgccgccgccgccgccgccgcttcggaagttcggagcagcaagagacgcatggagcatagcccgcacctgttcgacggcgcggcgcccaagttccggcgggacgagaggatggcggcgccgccgcgggaggccacgtgggtgatcctggcctgcgtcccgagcgtgtcctcttccgacagcgacttcgaggccggcgaccaccttgccttcgactggcgcgacccgccgggcgtctccctcctcaccttgcgccagagcgactctgtccctgtctcccccgcgcctcgggatttctgccccgaccgcgacgaccacccctacgtcgtcgccgtcgactccgccggcggactcctgctccgcggcgccaggaggagcgcccacgatttcggccccggcgtcgcgctcggattcgaccctgcaccgagctgcaccaacgacggcggctacatcctctgccacgctacgctccgcatggcctacctctacccgccctgctccgacgagtaccggctcctctgcgccgggaacgtcggcatgatccgcagaacggcggatcgcgaccacccgatccgcttgttggccgagctccagatagagtccggcaatggcatccaccgcgccaccctactacgctactcccatgagctcggagggtgggcttcaacaaaggtcaactacccgccaggccgccggtcgtggtgcggcgacggcgtcatcgtccacgccgggatgctctggtgggtggacctctccttcggcctcctcacctgcgacgtgttcgccgcgaagccagacatgcgcttcgtgccgctccctgagggatgcaagctaccgtactccagcgacgcggaccacgccaagcaccggtgcgtgaacgtgagcgacggcgagctggcgttcgtgcagatccacgactacgacaccgccgccggccgcggcgcgccatcgacgatcatgatcagcatgtggacgctgcagcagtctgatgcgggggaggagtcggtttggtcgctccgccaccgggtgcgcgtcgacgagatctgggaccacgtgacataccggaagaccatgatgccgcggcgcgttccggtgctcgcgctcctccaccccaaggagctcggcgtggtgttcttcttccagatcacctcgcggaactcgt

SEQ ID NO: 8419 - DNA, 3178 bp, Oryza sativa
ccaatcctccccgtttctcgtccgcgccgttgccgtagccttccgagctctgtctcgcctccgccgttcatcgccaagcgcagggagagccggtgcgttcgtggacgcggaaggggactccgggcgctcgtcttcctcctcttccccggcccgaggccggagagattactcccgcgccgtcggcctctcgtcactgcgccccgcccgcacggtagtgcctccctccgttcttcctcctcgctccatctcccccccttagttttcggtagtagcttgtgtagcctccccgtagctagccggcgccgccccaaccgttgccgccgctcgccatgtgctcgccgccgtcgccgcccgtgctccgtagcacccgctcgtcgccgacctcgctcggcgtagctccgcccaatccgacgctagcaacggattcccgtaaccgcgtagatgctctcaccgccgggaattggcccctcgtgacctcgtcgccgtttcccccttttctctccgccgggtgccgccgccgcaatccgccgccgtcgagcatcccccggcaaatccgagtagttggctcgactcccctcgtcccgcgcaacttcccggtgtgctcgctttcgcctagatcgccgtgtttcgcttcgccgcttgccaccgccgtccgccgtccgttccggccggcgtcttcttcaacctcccgccggcccgcgtggctgccacgtaggcgccacgtcggcgccacctcgaccgtgaccggatcagctgacccggccagccgctccctccgtttcccctccctcgcgcgcgcggtccaccgcgagctgtgaggctgcgcgtgggcccgccgcatccgcgtcctccgcgaaccgcgcgcgtgcaccgcgtccctcccccaaaccctggcgcgcgccgcgtgcgcgttccgcacggtgaaccgtgtcaccgacaagcgggtcccactcgggaccacgcgaggtgagcccagtccaccggctccctctctcctcccctcccgcgcgcgcgctctgggccgccttcttgggccgaccggcccatttagctcggccgagccgccccttttctctcgggccgcgccctagccgcccgagggaagtctacttcccctccctcttccttttctttttccaaaagggtttaaataaatcctttttcctttagaccaaaaatccaataatcttagaaattcaatatcttcccaaccgtaaatccgtttgactccgttcaacttccaaaattcctcaaatctcgagatctatctaatggcacgcttagaggtcattaatagggctttattttcgccggttgttgagttgtcccgttttgcgtgtagtttcggagcccgaagacccgcagtgcgaggatttcgagggtcaagctccagatctcgagcaaggcaagccacctttgaacatcttgagcctatatttgaaatttaattatgttgcttgaaaaatattatgcattgataggatcgcacttaatctgttgtcccgtctgcaaggcagattggcggacctacctaatttattgcatttgatccttcctttgttaattgttatagtcatgtccccttgtaaccatctagttgcgtctcgatattcgtgcaccctgtgcgaatatcgacggacgccttcaaacttaaaatctgaataacaacttgggtaaaacttgggttttacaaaagacttggaaaacccgacacctgggtcggtgcttgcgaactaaataaatttcgaaaaccgcggaccggggaacttaccgggtgtacggtttcccgctctcgcacttaaggaccgtttccttggaatttcatccaaacgtaagacaagtacgaccacatgggtggaatgggacacccctggctgagtaactagcttatcaggggagccttgatgccgagagacatgtggattcgccggggtggtgtcggggaggacccctgggcttcctggcacagtatggtctgggacctaacctgttgttggtctgggacccctctcgtcggcatatggtaaacctgtgtcggctttagaaatgccttgtcatgaaagcttggaggtctcccgacgtggctgatccccacgggctgggtgatccgggttagtaatgtcgtgtgggtaaagtgtacctcctcttcagaggttaacaaactgttcgaacagccgtgcccacggtcatgggcggatgtgaggtgattcctagcacagttttgtttgactactgcttgtgaaattgctgttgtggaaaggggttcgatgtttgaaaaatctgcagctgatgggatcagctaggcccgggtggccgtttgaaagttgttggcccgggtggccgtttgaaaagctgttggccgggtgccaaccttgattcaattctaaagactgatacattgcacaaactccgaccggacgagacgcactgtctcaaccgtgttgtttgagaagcactcacttagttgtttttagaaaagagttcaaataaaatcaattgcaaaaacaacagcctttctttgaagcctgcattaaacacttatttcccatggcttgctgagtactcccgtactcacccttgctctatataaataaccccccccagttgctgaagaagatgaagcggatcctgctgatgagaagttcttccaggagcaagccggctacgatgagttttagggtttcggcctagttcccaagtcgcgcctgtgttgattggtccaagtcctggcttccatttcccttttgtaatgcagttgtgagctcgggatctgtccgcagcccaacatgactgtatctctactctataataaagagacccctgttgctgtgatattctgtctccctgtgataccagcactgtttcctgggactggtatcgattaacaggttaatttggagcgtcacaggctagttccggtcggtactagttcggggcgtgacaacttttaatattcctttttctaatccaaaatttcaatcatttctagattatattctgtatggactcttatacttttatttcaatattcctttttttaatttcatggtatttataaattccggattactgttatttttaaattgtattcctatttggaatctattttttatttttttcctctttttctccaattaatatgagaatttctcgaccgtgagagtgaatgtggaggctc

SEQ ID NO: 8420 - DNA, 1527 bp, Oryza sativa
ctcgctccctctcattctccctcgtcatcccggtgtacgccccgtcgcccctcatcgtcgcaaggcgtcccggagaaaccgccgccgcccgccgtccattcgcggccggcgccttcgtcttcctcccgccagcccgcgtaggcgccacgtaggcgccacgtcggcgccagctcggccgagatcgggtcgggccgaccccggtcagcccctcccgtgcgcgcgttccaccgcgagccgtgaggctgcgcgtgggcccgccgcatccattccaccgcgaaccgcgcgcgtgcaccgcgtcccagccccggccgcgcgcgtgcgccgcgtgctcgctccgcacggtgaaccgagtcaccgacaagcgggtcccacccgggaccacgcgtggtgagcccggtccaccggctctctctctcctcccttcccgcgcgcgcgtgcttgggccgccttgggccggccggcccatttagctcggccgagccgccccttttctctcgggccgcgccctagccgccgaggaaaagtctatattccctccctcttttcttttcttttcttttccaaaaaggatttaattaaatccttttcctttagaccaaaaatccaataatcttagaaattcaatatcttcccaaccgtaaatccgtttgactccgttcaacttccaaaattcctcaaatctcgagatctatctaatggcacgcttagaggtcattaatagagctttattttcgccgtttgttgagttgtcccgttttgcgtgtagtttcggagaccgaagacccgcagtgcgaggatttcgaggatcaagctcaagatctcgagcaaggcaagccacctttgaacatcttgagcctatatttgaaattaattatgttgcttgaaaaatattatgcattgataggatcacacttaatctgcttgtcccgtctgcaaggcagattggcggacctacctatttgttgcatttgatccttcctctgttaattgttataccatgtttccttgtaaccacctagtcgcgcctcggaaatcgtgcactctgcactagtatcaacggtcgccttcaaacttaaaatctgagtaacttcttgggtaaaacttgggttttacaaaagacttggaaaacccgacacctgggttggtgcttgtgaactaaatgaatttccaaaaccgcggaccggggaacgtaccaggtgtacggtttcccgctcttgcacttaaggaccgtttccttggaatttcatccgaacataagacaagtacgaccacatgggtggaatgggacacccctggctgagtaactagcttatcaggggagccttgatgccgagagacatgtggattcaccggggtggtgtcggggaggacccctgggcttcctggcacagtatggtctgggacctaacctgttgttggtctgggacccctctcgtcggcatatggtaaacctgtgtcggctttggaaatgccttgtcatgaaagcttggaggtctcccgacgtggctgatccccacgggctgggtg

SEQ ID NO: 8421 - DNA, 9112 bp, Oryza sativa
ttttcccgtatgtgtcaccttgattttgcgctcagtagtaaggccgcaatagtagattagtagttcatatgatgtgcttgaagtcatggttcaatctacagctgttactccctctgggctgataatacttgtcgttttggataagggtgaggtcaaactttagaatctttgattatgaattatttttaaaatatttgtctttcaaatatggtgactacatgtataaattagtcttaaaaagtactttaataatatcatatatttgttaacacttttatacatattataatagaaaataatggtcaaaattgttttttggagaccgtgcccttgtccaaaacgacaagtattatcaacccggagggagtagttctcaacttttttcaaagattatgttgatttagatcttactcgttttattaaatgtgacctagctacccaaatgatcgcaagagcttttttacaatataagatttagttaatttttacttctttacgcttacaaaatcatgaaacttttatttacttgacatatttgagtagattttacaaatggtggagtaaaacaatctaaaaaaagagtagcattcctatgccaaacaacattaccattagcggctaaattgttgtactataacctcttggactacgatttcagatgcaccattctttcctttttgtatacaatttttatctgacaaatatactgtttacttctaatttttgtttcagctcaattatgcaccaagaatacacactgcaatttctgggcctgcagttaattcaaggtttatggatgaccgctttcatgcatgcaaggaggatgctaaattttcctgggtcagggcacttgattttacacccaattattcttttgggaggtgctctactcttgtccttaaactgggtaaaagtgcattggtgtctgatattctcaaaagtttacctttctcaggaaatttaggggaattgactatgaattcaatggatggtgttggtgcctcctccaatgtggttccccttgttcattgtccgagggactattcagtgccttatgaagttctgtttcgtctgaactctctcatgcatatggggaagatagtcgccaagcatgttaatgccgatctgtttaaagcccttcaagaactaccggttgatgtctcaaggagaatttttgagaaaatgcacaaattagagtctacctgctacgggcctttacaatttatccaacaggaggcttatagcatgaagagaagccataatgttttgctctccaatgaaggtgaaggtgaaggtgaaagaaaattgatgaagtgttatagagttaacataactccctccaaaatattctgctttggacctgaagaagaggttacaaattatgtggttaagcatcattctgcatatgcttctgactttgtgagagttacttttgttgatgaagattggagtaagctttcttctaatgcaatctcagctagaattgaacaaggtttcttttctaagcctttcaaaactggtctatattatcggattctctccattctaaaaaaaggattttccattggtccaaagaactttgaatttttggccttctcagcaagtcaacttcggggaaattctgtttggatgtttgcttctaatgcttccttgaatgctggaggtataagaagatggatgggccactttgagaatatccgttcagtttctaaatgtgcagctagaatgggtcagctgttcagctcctccaggcaaacatttgaagtcttacgatgggatgtggaagtgattccagatattgagatcacaactgatggctccaaatacatattttctgatggtattgggaagatatctttgagatttgccaagcgagttgcacaccacgttggattagatcctactaaccttccttcagcttttcaaataaggtatggtggctacaaaggagtcattgccattgatcctatgtcctctattgatctttctctgcgtcctagtatgaagaaatttgagtctgagagcaggatgttgaacattacaagttggagcaagtctcagccatgctatgtgaatcgtgaaattatttctcttctctcaacattgggtataagggatgaaatttttgttgcaatgcaacaagatgagatgcgtgaaacagaagaaatgctaaccaacaaagaagttgctttgtcagtcctagggaaacttggtggttctgaaacaaagacagcagtgaagatgttgctgcaaggttatgagcctagttcagagccttacctgtcaatgattcttaaggcccatcaggagaataggcttactgacattagaactagatgtaaaatacatgttccaaaaggccgtgttcttattggttgtttggatgaaacaggtgtattagaatatggtcaggtttacattcgaattacaaagaacagcaaagaacaaaaggacagtaatcaatcatatttttataatgatgacgggaaaacagccacagttgttggaaaagttgcaatcacaaaaaatccgtgtctccatcctggtgatatccgagtacttgaagccatctatgaccctgatttggtgggcatggttgattgtcttgtcttccctcaaagaggagaaaggtttgtgatactgaaactgaatttatctcttaccttaatgttttttaaagtttgtattgctttgcccatggcttcaatggaaggaaaggagtccatcacttctctattgaattgaatcaccacgttgtccagcattatcttccttgctaggttccttttttattgtcaaccttatgaatgaatgctgccaatgatttgcttgtatttgatgttgatcaggcctcatccaaacgaatgctcggggggagatttggacggcgacctctattttattacttgggatgacaaacttattccagagaaagttgatacacctatggactacacagcaacaaggccgcgcataatggatcatgttgttacactcgaggtaatgcctgactaattgttccttttcccctttttgctaggctgttgtttctcatttactgaaggatttctttttgttctttactaattcaatcttgatagttgcaaaatgtcaccaattatggactgtagcattatagtcatatatatgggcctgaggcaccttttaaaaatgtatgcttgcggttaagggcatgaataaatgcattaggacaatatgtgcatatgttccatgaaacatgtgatgctaataaggttatgcaaaccagaaagtacaagcttggagtgagtttctaactcaactagtcaactcactcaggatggtttaacaattaacagaaaaactggtggtcattgatctaaaagtaatatatctacgtgaacaccaatcattgaaaagttttgaataatttcaaacaagtatgcactgaccatacacatttaacaatagtatttagaaattttgagagctttattcagaaaagaaaacagcatccccaaaaaaaagaaaaggaaacagcaaatacttgcttctgtgaaaaaagaaaggcctctggaacataaatggcaaatcttattgagtttatgagtatagacttttcaaagttgcctcatgggtgaacaaatgcatatctcctctcaaccatggtgttatactcacctgagtgaaatgttttttaaaaaaatgtctgtaactgcaggaaattcagaagcactttgttgattacatgataaatgactcgcttggtgccatctcaactgcccacttgattcacgcggaccgttcgccactgaaagctcggagtcccgagtgcctccagctggcaactctgcattccatggcagttgacttcgccaagacgggagctccagctgaaatgccgcgaacattgaggccgagggagtaccccgacttcatggaacggtgggagaagccgatgtacatctccaatggtgttcttggcaagctctaccgatcagcgatgggtcacatggagaaatcaggagattcaggagctctctcatcatcctcagcacaaccaagccccacatacgatcctgacctcgaggtccctggctctgacgaattcctgcaagctgcagaggagtactacgagctgtacgaggagaaactgaccacgctgatgaactactaccgtgcggagctcgaggacgagatcctgacgggcaacatccggaacaagatgctgtacctgaagagggacaacaagaggtacttcgagatgaaggaccggatcgtcgccgccgtcgacgccctgcacagggaggcgaggggctggctgctgagctccaggaaggaagaggacgcgtcgcggatggcgtcggcgtggtaccgcgtgacgtaccacccagaccgccgccgcgggaagcggttctggagcttcccgtggatcgcctgcgacaacctgctggcgatcaaggcgtcgagccagctcaggcggcggcggcagaaggacgatgactccaccgcggtggtgcagatggactgcagcgcctgatgtggcagaggattctctgactttgagtgactgacatgtgggcctgctggataagggatccatgggtcagtgacaagttagagggaaataaattagaggttctctgacgcgccgtcctaagtgaactttcaactgcacagttcattgctgtgcgcctgtgcctgtacgctgtacaaatctggttcgactaatcttagctgagctgaacagcagagctccggctcgcaacttggaagaggaaagagtttgatgatgaacacctacgtagagtaaaagttcctcttcctaataaaagagtcttagtgctgatctaccggtaaggtggaggcttccatttcttgttttctgcgaaggaaagaaacttagggtgtgtttagttcacacaaaaattgaaagtttaattgaaagtgaacgatgtaacgaaaaagttggaagttcatgtgtgtaggaaagttttaatgtgatgaaaaggttactccctccgtcccataacataagggattttgagtttttgtttgcactctttgatccctcgtcttattcaaaaaaatttaaaattattatttattttttttgtgacttgctttattatccaaagtactttaaacacaagttttcgttttttatatttgcacaaaatttttgaataagacgagtgtcaaacgttacaagaaaaacttaaaatcccttatattatgaaacggatggagtagtttgaagaaaaagttggaaattaaaccagaccttacagggcaatcagtagtacaaccagcatatagtggaacctggaactttgcactccagatttccaatatgaaatgcagaaatgcaccgagcaggtagcagcgtttagctcagcctctaggtaattggacacccacgggtgacgatccccactgttcgttttgtttaggcaggtggtctgcttacttgcttacatatctttttctcgaaagagcgctgcttgactagctgactgttcttacaagtgacatcagtcgagcgagcttttgagcggatttcatatatcgaaatccttccaaactttcgaatgacttcgaaggtttgtcgtgattatcgacgctgcgaatcagtaaaatttggtagaatttgatactaatactcggagtatcgaaccagattggttttgtactagtcgaaaccgaaaccacctgcacctttggcggtaaaaccgcacgagaaaagcaagcgacgccgaggaggagcaaacaaacggcaacctacctaccatatacgagtcggacacggagcgagcaagtcgccggagttcttggtccaactccccataagagcagccggccggaagttggaccacacgctccactccaatccaactcgtcgtcgtacgtctccctcctctcgcaccgaaccaaatccccatcgcgccgcggcggtggcgaggcgtgcgtacgtacgtgatgccgggaccgggggcgcacctgctgtacgcgctgtcgggcggggcggcgctgtcgcggctggccggggcggcgcggttcgggccgcaccactgcgccgtctacgccgccaacgccttcctcggcccggacctcggctccttcgccgagtggctcgcctcgttcctcccctcctcgtcctcggccgccgccgccgtgggggacctcgccatgggcgtcgtccaccacccgttctactacccgctcctcctcggcttcccgctcgcctgcctctacgcctggctctcccggcggctgctcctcgccggcgtcctcgacgagccctctcgggtgggggcaccgcctcttctcctaatcccctcctggatttgctttcctattaattaaaccatttttttaatcgcttcggtcgccaaattgatatctagtattaattaaaccatttttttaatcgcttcggtcgccaaattgatatctagtattaattaaagagcaatgctacacgtattaaatttttcttactaaacttttactaacaatcatctcaaccgtttgatttaagtaaatggaagttacctagatgcactcatagcatgacacatcagtgttggtaagaatttagtaagaaaaagttagtacgtatagccttttccttaattaaaccatttttttaatcgcttcggtcgccaaattgatatctagaagcagccttgggattgtttgttcgaattaactaaagctggaacatccgctacctatgccagtagtacataccttctgttgtctcatttggatcaattaaacaattagcacggcagcattgctcagtagaatcccaacctgcaatttttgcaaatggaaggaacatatctgctacctgtgccagtagtacattccttatgttgtctcatttggattaattaaacaattagcacggcaacattgctcagtactagaataccaacctgcaattgcaaatggaaggacacagatataagcagcacattgtagatctagctctagtgtccaggcgcctctgctgattatttgggttattcttccatgtttgaatttgtactgatatcgacgttgatgcaggtggcactaagcaggagacaatgcttctaccttatcacggcaggctcgctctcccatttctttttggatcacttgtttgaggtgagaatgtgctccaatgtctctgtgccccatttagtagcactttatccatccaaaaaggcgtcgcatgcttattaggctaatttttttcgtcgtgttttcctctgcaggagaatgggcactctacgatgtatacttggattctgagcactggttggtgggtaggccgtgctcctatcaattcggatgcagtggttattgtaggccttctttgtatttgcctcgtgctggggtttgtgtacattaacaggtgtgaactctgcttcatagatgcactatgtgtttttacattattattaataaacatccctggcctcggcatcatggatgcacacagccaacaagtaggctatgtacatagctgtaaaggagatctagacacttgactagaaaacttggatccttgctgatgctttagaaattaaaagtttcttactagtaccagaattttgaatatcactctttctaccaactagtaagtatactgatcatgttgctaacaacatcttgttctatgttttggcagagtgaagcatgaaaaatcagccactcaaaaatcaaaccaatctttcttcctcatcgtggtgatagctatcttgtactgtatgtggtgtgccactcagatatacctgcgaaatccacctcaaccagccataggtgaagaggctgatcttggagtgataatatttgttgccatttacctttttctcccccatggcttgtgtgccctgtcaatgaaccagaatgattatgctgaactggaagggatccaacttcgataatgtgccatatggtggtgtacttttatcctaatctacaaagaacatcattttttgaagtctgctcgctcctccatgttgtaatcatatttattttctaataataattggctaattgccagggatttatgttttctctagtgcaaaaatacttctagcgaagacttaggagttaggattatggagttcaggatgatactggcactgtattatcagttgtgatagcaataaacttctattggcagtggtgttcaaaacatcccagcaagttctgttttccactttagaatatacatttcaaagttatgatatgatttgaaaaagcttaccctggacattatctttcctaatatgaggcatgatttcttcttattaggtcatactatttgcttagctgcaattattgtggtaaactgtgaatctagatttactgtctctagatctaacatatattaattctttctttttttaatgcaaaatctatttactcttgcatagatgaaaagtatatcagttaattagtatatttcctggtgtgtatctcaaacacagctgaattatgctcacataaatgcacgcaaatgtttaaacatgttagtggaaacactaagttgcagcctgaactcctgaaggattgcacagggtactatgaatgggactcgatgatgctaatgctgttatgcttatcgtcatctctcatggagatctttagggccttctcaagatgtgacacaacttgctccatggacggacgctgcttcttgtgtccagtgcatgaaagggcaagcttcaaactgagatcaaatgcctctgtcgagtactctccgttcagcctaggatcagcaaactccaacacgttgccttctctgatgagcatggaagcctgaggaacgaaggtatggatatcagattcagcacaaccgatcatttaagacgaatacttaatatccggctgactgtttataatcttaccattcgatccaatgacattggtttagcagtgttcatgatattgattgctcgttttcctgacaggagttgtaggagcaccataccaaagctgtagacatcccctgcagcatttaccttgtgattgtggcgatactctggatcgacgtatccaaatgttcctctaacttcggagcttacgtgtgatactcctatgtcaatgactcttgacagtccaaaatccgaca

SEQ ID NO: 8422 - DNA, 3947 bp, Oryza sativa
ctccccgccggcgtcatccgcctctgtcgccgttttggccgcgagcgctgagcgccagctcgcgccttgaccgcccaaggtcggtttccaaaccgacatcgtcgtcctataaaccaaggcgccctccatcgattcctcctcccgtttcgctcgctgccaccgcgccattgccgcccctctgtctcgcctccgccgttcatcgccaagcaccgggagagccggtgtgttcgtggacgcggaaggggactccgggcgcttgccttcttcctcttccccggcccgaggccggagagatcactcctgtgccgtcggcctctcgtcacagcgccccacctcatctcggtagtgcatctccccgttctccctcctcaatccatctcttccccttagttttcggtagtagcatgtgtagcccccccatagctagccggcgccgccccgactactgccgtcgctcgccgtgtgctcgccgccgtcgccgcccgagctcggaagcgcctctcgtcgcgggcctccctcgatgcgattcctcctaatccggcgcaaggggtagattcccgtagccgcttagatgctcccaccgccgggaatcggcccctcgtgacctcgtcgtcgtttcccccttttctctccgccggttgccgccgccgcaatccgccgccgtcgagcatcccccggcgaatccgagccattggctcgtctcccctcgtcctgcgcaacatcccggtgtgctcgccttcgcctgtatcgccatggtttgctccgccgctcgccgctgtcgaccgccgtccgttccggccggcgtcgtcgtctacctcccgccggcccgcgtggcagccacgtaggcgccacgtcggcgccacctcggccgcgaccaggtcaagtagaccccggtccgccgcttccctccgcccctcgcgcgcgcggtccaccgcgagccgtgaggctgcgcgtgggcccgccgcaccgcgtcctccgcgaaccgcgcgcatgcgccgcgcctccctccccaaaccctagcacgccccgcgtgcacctcgctcacggtgagccgagtcgccgacaagcgggtcccacccgggaccacgagggatggacccggcccaccggctctctctctcccctccccgctcgcgcgcgcgccttgggccgccttcataggccagccagcccattaaggtcggccgagccgccccattctctcgggccgtgccctagccgcccgagggaagtctaatttccctccctccttcttttcttttcttttctttttcaaaaaggatttaaataaatccttttcctttagaccaaaaatccaataatcttagaaattcaatatctccccaaccgtaagtccgtttgactccgttcaacttccaaaattcctcaaatctcgagatctatctaatggcacgcttagaggtcaataataaggctttattttcgccgtttgctgagttgtcccgtttcgcgtgtagtttcggagcccgaagacccgtagtacgaggatttcgaggatcaagctcaagatctcgagcgaggcaagccacctttgaacatcttgagcctatatttgaacttaattatattgcttgaaaaatattatgcattgataggatcgcacttaatctgcttgtcccctctgcaaggcagattggcggacctacctattttgttgcatttgacccttccattgtaattgttacaccatgttcccttgtatccacctagttgcgcctcggtaatcgtgcactctgcacgggtatcgacggtcgccttcaaacttaaaatctgagaaacttcttgggtaaaacttgggttttacaaaagacttggaaaacccgacacctgggtcggtgcttgcgaactaaatgaatttccaaaatcgcggaccgaggaacgtaccgggtgtacggtttcccgctcttgcacttaaggaccgtttccttggaatttcattcgaacataagacaagtacgaccacatgggtggaatgggacacccctggctgagtaactagcttatcgggggagccatgatgccaagagacatgtggattcgccggggtggtgtcggggaggacccctgggcttcctggcacagtatggtctgggacataatctggtgttggtctgggatccctctcgttggcatatggtgaacctgtgtcggctttcgaaatgccttgtcatgaaagccttaaggtctctagtcgtggccgttctgcacgggctggatgatccgggttagtaatgtcgtgtgggaaaagtgtaccccctctgcagaggttattaaaacttttcgaacagccgtgcccacggtcatgggcggatgtgaggtgattcctatcgtagtttttgtttgactactgccttgtgaaatttgctgttgtggaatgggtttgatgtttggaaaatctgcggctgatgggatcagccaggcccgggtggccgtttgaaagctgttggccgggtgccaatcttgatcaattcaaaagactgaatcattgcacatactccgaccggacgagacgcactgtctcatccgtgtcgtttgagaagcactcccttagttgtttcagaaaagagtttaaataaaatcaatcgtaaaaacaacagcctttctttgaagcctgcattaaacacttgtttcccatggcttgctgagtactcctgtactcacccttgctctatataaataattccccccagttgctgaagaagatgaagcggatcccgctgacgaggagttcttccaggagcaagccggctacgatgagttttagggtttcggcctagttcccaagtcgcgcctgtgatgtttggtccaagtcttggcttccgcttcccttttgtaatgcagttgtgagctcgggatctgtccgctgcccagcatgactgtactcctactctataataaagagacctctgttgttgtgatattccgtcttcctgtgataccagcactgtttcctgggactggtatcggttaacaggttaatttggagcatcacgggctagttccgctcgggactagttcggggcgtgacactaatgctacactgtatcatatgctttccacacacaaatatttactcgcaagtcgtgcgtatttggaatttagatttttcaaaagaaagttcaaaccatttgcatacttgagatacaaaactcaaaacgaaaattgagatcgagttgtagagtttgacatatatatattataaaattcgacaaagatcaatgatcctctgggcttttcacgtgcaggcgcccccggttccggaatttctgccacgccgctttcgactgacaccgtgacacgaacccacaaaagccgtcagcgtcacaaaccccacttttttcaggtgcatcgccgcaaaaaccccaaccgggctgtgacctcgccggagtccccaaacctcccataccgctatgccgacggcggcggcggcggccacggcgtcgctgcgggtatccaacatcccgccatcggccgtcgccgcggagctgctcgccttcttcgactccgccgtcgccgtcgccggcggcgcgttcgcctgcgagatcgcggcggcccaccgcgggtggctcagccggggccacggcaccgtccagttcggctccgccgcggcggccgctgccgccgcgggcctcgcctcctccggccgcctcccccgcttcctcggcgccctcctctccgtctccccttcccccgtcgacctcctcccgcgcgcgtccgacctctccctccgcgcggccggcgcgggcctcgtggtgggcgaccgcgtcgccgagcgcgtgttcgaggccgccgacgcgtgggacggcgtgcgcgccgaggtcatcccggggaagcggcgggtggacctgtacctggagcacgattcccagaggtacaagctcgaggtgctcttcgaggacatgaaggattgcctcgggtgcaccctg

SEQ ID NO: 8423 - DNA, 9806 bp, Oryza sativa
aggtcaaaggagcaccacccaaggaaaagaaatggaaaaacaatagcgtccaccattgcgacgaactgaattttcttgcagagacctctaacttgattaaaagagatccatataacagaatttcaaatacagtactgtttaaggctccattagtaaaaattctaacttttcgacaatactgtctatcttaccctgttcagcgttcactactccagtagctaacatgccaacaaagcacagaatgaagctgaacgtgtcgtgaaatttcacttttgcacagatttatgtataaaagtaaatttattttaggattgagggtgtaatgatcaagtatgtcccttgcaagcgagcaagtactggcaacataggtgttcctggatacttttatagcttgaaatttaagcaagtctgcacagatctatggcctatggggactggagtcagcactgtgagatctcaatacgctgatagaaatttcacatggattcggtctccaagactgaaaacatctaggtgggtactataaaatagccgttttgattgattcctaagtgatccaaagcttgaattcatcttatattctatctaccacaccatcgaacatggtgtagctcacggtagtcccaataagtgtaggagtatcagtcaactttacaatggtgcaaattttcatacctgggcacctcttgcccccgtttcccttctacaaataggtgatgatgcaaactggtttaccatgatgcagtataagctctactatgctcatggctaagggaaaaaattctccaccaaatctccatggcccaaattacattcgaaatgcaagcgatgtatttccctgcggaagaaaaacactaggaatgatgctgctctcagtgctacttgtgcttgttctctcagcatattctcctgagcagattttcctttaccctccaatgccagcacacaactctcatcagacggccatcaacagtatgctctctcagtcttcatattttttttcggggggggaggggggggttaaaaaactgccattatagttacattttgtgtgccatttttctaccatcagttgattctttggaaagctattgttcatcaacatatggagtatttatgtgtcagattaaattttttttcctacactttccacctgtacatttggaacatgaacgaaagggcagcataataagatactagttcactctacaacatcaacttaaatttcagttctatgggaagttaaatagtactagtgttgtgaatcttgtggtttaaaatgcttaccaagcctagctgtctatgtagtttcgaattctttcttacctttcagataatctacatattatatttcagaagtgtatcagattaataattgggaaaagatgcaagcaccaaaataaatgaacaaaaggaaacataacttctaactctgcaaaatccacccccaaagagttatggcatatttccgatgtcgacaaataagatatgtattgatagcatatcagttcttttttctttttttttttgcggggagcatatcagttctaatataatcaaaagcagcaagcttgcctatccaagaaattcaagtgtgattttgtctttgtttaggtcctcatgacaatgcaaaagcctgcaatctgttcaatggaacatgggttagggattttggaggcccgatttacactaacacaacatgcccaacgataccagaggcaaggaactgtgcaaagtacggaaagcaaatggattatgtaaactggatgtggaaaccgcatggttgtgccatggaaaaattcgaaccccatctattcttgactattgtcagagggaagacattggcttttgctggggattcgattgcacggaaccagatggaatcattgctctgtttactgtctcaggtaaacaccttgtgttttagttcttctaaatgtgtaaccaaaggaagacttgcttttaacttgcgtaaacctatatcaccagtgacacaattacagtaacttgctttttaggttcattttggttctttaccctaccaaattgttggtagtgtaaaaatttaggcaagttttgccactaccaacaaattggtagagtatcacattggtttggcaaaaaaatagcttcaatccgaactctagccaagtactattgggttgccaattaattggtagggcacattttggtagcaatccaaaatggcctataattcttttgagtttttagcacaactatagacaggtattactccatatttgacaagttaagatagaaatggactggaagaagaaaatttgagctcttcccctttccactgaataataaaaaatatatatactggtgtaatataaagaataccttaaacaggcatcacacctgcaggaggccctatagatctttgcatagattcatgtattttctagaaagaaattttttaggttacaattatgaaataattttctccaaagaaatttgtaggtcacaattatgaaatatggaccaagcagctccaggcctggattttatttacattgctaacccggaatcaataatgtttataagttataacagagtgctttcatattttatgccaaaaatggggcataaaatttacactaagttcttccatctgctgatttatcacagcaattctacttcatgtacctttgtttctagaaattttatcagatagctgtgattaaagaccttgacacaactctacaagcttttccaggtagaagcaccaatcagagttagtagtgacaccaaagataaatttgtcacctggaacttcaggtctcataactttactcatggttctttggaccaaattcatagtagaagattctcaaagacaaatcaatggtacagtagttgaagagcatgacatacacttggataaacttgatccaagattagctacaaacttacaccagatcaatattttagtcatatccacctcgcgttggttcttcagaagaaactatctttacgaaggtgaggagctcattggatgcatatactgctcagaggataacatcacaagcttcagtgtccctatggctattcagagggtatttcgaacagcgctaaaaaatttgaaagagagccaggagtgcagattgcaattgacagtggtaagaacagcaacatcagcacattttgaaaatggtttgtggaatactggaggatcttgcaatagaactgaaccactgagagaggaagcaatgattgatcaaactgaatgggcaataagaaatgcacaggttgaagaggctgatagaacaaaaaagaacaacggcaagggaggggtgaaaatagagattatagatataaccaaagctatgtcaatgaggcctgatgcacacccaggtatccattggaataaccagtggatgaggggttacagtgattgttcgcattggtgtctgccaggaccaattgatatgtggaatgagctactgcttgctgtgcttaacaaatataagaacagcttggaagatcaatgacacaaggccctttgccaatccatcacatccacaataagagttactttttaccatgacaacaccaggcacctatttttctcatttgcaggaacttttgttagattcagacaataggacatacgaaatatgatcactgtgatgacctagacataaaactattagagttctctatgtcgaaggcaaaagcaaaggacccatctggggtcagtttttgaacaagcagagttttgcagtttgaaatcacttctgattagcgagagcctatgggctacaacattttagtggtttccataaccattttgtgctgggctgatggccacttgatcagcattagctagttttatcataaagatattcaacagaaaaaatatacacatgaaaatattagtggtgaaatagaaacatagagctatacagaaaattcaatcttatgaatacctgatggttctctaccatgctcagcttgtcaatttgttatcatcaaaatctttggctgtactcctgctgctaacagaagtttgcagtaattccttgctcatcaagtgcttgcgtttttggaggctcagccaaaccaaaatactgtcagtctggacaatgttatatcctgctttcctgtacatattgaatggaacttggtcgattatcctacagtgcagatatacgtgccttttggcatccatcttgataatcagatcctcgcatgccttaagaagttgttttccaattcctctcctaatgggaagaaacaaggcacaataaaaactttataaagcacataatcaaaacattatatagattaacaaattaatcctgatggcataaaaccataggtttcacaacttactcatctatctctgatcgaaaagagaatgagttcaaccattagatgtcacgtgcaagagccatgggccctagaactaggccacatgggtaactctcatgcatttttcctttttcaggaatctggttcataatgaacaatacttccaatcttctccaaacaaatactctctttcaagtaaaattaaatcatggccattgcattttatataagcaaagtatgacaatttgtatagtaaaaacccttctacactggttctcgatttaccatgtccacagaacaactttggttgctacttggagcctcaaattatttagtgcatatgcaataatcagcgaaaatgggaaaatgcttgatccaacgcaaccatatgctgctatgctaaggaagctcaattggcaactcagctctcgcctcaaaatctatcagcatagcatactccattttgatttgcagacaaagtggaaatggccctgatggtgtaatccattacctcctcaacgacgtcttgacagtcatgttgcaaatgtacgggaagtcaagcggcggcgtgggcgtgggcggggcaccgggcgcgcccaccgcgtccagcgacacctccgccgtgcacgccatctccccgtagtcgtcgtcgtcctcgttgccctcgccctcctcctcatccccgtctcccgtggcggcggggcggtagtaccccacgagcacggcggcgtgcggggcgaggccgcggcgctcgaagaggtagcggcggatgacgaacgcgaggagctgctcgtaccgctgcgcgggtgcccacctgacgttctcggcgaaggacgacgcgaggaggcggacgagcgcgtcggactcgtcgtcgtcgcccgccggggtgagcgcccgcacggtgaggcggccgtgcgggaaggagtgcgcgtagcggaaggcggcgagctcgtcgcgctgcgacagcgcgcgcggcgagaggaagacgcctccccctccccccgctggccccgtgacgatgccgccgtcgccctcgccatcggacgacgaccgagaggccgcgaggcgtgcccggtggcgaggccgcgagcggtagggggggcaggagaagaggaggcgcgggtgggtcggggcggctggggagacggccgggaggaggaggaggaaggccgcggacgcggcggccatggccggcgcggcggagcggaagcggaggtgggtgtagagattagaagcgatttctttttctttccttttttttttgaaacgggtccacgtggataaacgccaactgtgcgtcgcttagataccaaccctgaaatctgaatcttctgaaccttctctgtgctccacacaacgttctgaacggaacctctctatctgatcacccgttgccatctccgtcgcttcaaccacctgcaagctgcaaccgagataccaactctgaatattctgaaccttcctgccatgcgtagcacaccattttacatcattgattcaggtcctgtttagttcgtgaaaaagaaaatttcgaagtgccacaccggatgtttgatcaaatgttgtaagagatttttggacacgaatgaaaaaattaatttcataactcgcctggaattatgctcaaaagattcgtctcgcgatttctcttttaagtgtacaattagcttttttaatttatatttaatgctccatacatgtgtccagagatttaatacgatgtttttttagaaaaaagttttaggaactaaactaccctcagccaagcaagctagaaagcttatgccaattcacttggtatacggaagagagatggagaaatgcaaatcatggaattgagttcagctggttagttcagacagttactagaaggagtacttccgatcactgttacccgcatcactgttgccaacggcaaaccgaacaggcattattacccgcattttcagatcaagaatcccagtatcgcaccagcacaatcagtatcactctcactctcacactaccattaacgtactccctcattccaaccaacgttgttttattttgggacaggagtacccgttaacagtaataagtctctggctctctgcaccggccaacacgttcccggtctatcgttacctattcttgtaccacatcaatctgcaccgacgccataaattgtgtgctgcgataggtagctggatctcgccggagtgcatcaatggccagcagcggtagtagctccccacaatcaaagcagctgaccgtggctatataataaggctctaacgccatggccacacaacaaagaactcaagaagcaattaacattcgcattcatcagctggtaggtagtgtgagctagagattaagggagagagagagatcatggcgtccaaggttgagctggtggtggaggtgaagtcgccggcggacaagctgtggacggcgctgcgcgactcgacggagctgttccccaagatcttccccgagcagtacaagagcatcgagaccgtcgagggcgacggcaagtccgccggcaccgtccgcctcctcaagtacaccgaaggtaatatgcacttaaaaaatctcgtgtttaattctcaacacgttcatattgttttttaaaaaaaatgtttagagtgacgtctctccggccaactctcatttttacgaatgatgcctccgatcgatgtatgaactttattgaaggggtgccgatggtgacgttcgcgaaggagaaggtggaggtggcggacgacgagaagaaggtggtgtcgtacagcgtggtggacggcgagctggtcagcttctacaagaacttcagggtgacgctgcaggtgacccccaagggcggcgccgccgcccccgccgccgacggcgcggtggtgagctggaccatggacttcgacaaggccagcgaggaggtgcccgacccggacgtcatcaaggagaccgccgccaagaccttccacgacctcgacgactacctcctcaagaactagccagacagccagatcgagcgccgccgtgcgggtgcgtggcttatgtgttagagtccactatagcgtcctcgccgtcagtcgtcgtcgcacacggtcgcagtatcggggtgttgcatttgctagctctccggctagccactgtctcccacgaattagtgtacgtatcggtgcatgagtgaataataaagtgttcaggttaaaccgtttatcgtctctccggctctccgtttactgtttccttgtattgattttcggtctatccgactctctcactctcctttggttaggcctaaacatgtttaggttgagaaaatttttagatttggttgtcatattggatatacagatacatatttaaagtattaaatatagtctaataacaaaataaattacagattctatcaggaaactgcgagacgaatttattaagcctaattaaactgccattagcaaatgcgagttgaatttattaagcctaattaatccaccattagcaaatgtttattgtaacaccacattgttaaatcatgacgcaattaagcttaaaagattcgtctcacaatttacacgcaatatgtgtaaatggttttttttactatatttaatactccatgcatgtgtcagcgtgaaaatttttgttttgaaaactaaacagagccttattttgattcacagggttggtctttggttgtgactttctgttggaagttcccagatattttttaaaagaaattcactaaaacttatacagatagtatatagtttgttataaacatttttttctgaaaaagttggtagattagttttcgcaattgattggttgtattcaatatgtcttagccatataggagggcagtttttttctcgtatctgtatggaaattcctttaaattcagccttaaatatatgtaaaaccgacctaaactttttttagaaatcgcagtgtgaatttaaaaccaggagtttttaatccaacgcgaaaatcctgagtgcaactctctgtctcgaatatcaaatcggaagttccgttatgagttcatgtttgtccataaattttggacttaatgttcataaattttgggtgctaaattttgatctacgtgatatgaaaaaaaaatatagaaagacaaaaggacttcatctatagaaaaaaacatcatcttattccgataaaaagatggaaaagtttccacaaggaaactttcaactgtaataaaaactttctataataaaacttatttataaagaaactttaataacgacatttttcatcgtagattatatattacgaattattgggcctaactaactataaataaacctacttccaaatggcgcacaatagagaaatggcgcacaatagagaaaaaaataaatatgtcatgcacgtacgtaaaaataccgcgtaaaacaaaaaaaaattaacatatttctttacttacaaggaagatatacacaccacactcacatgtctaacgattatgttcctaacgtacgcttaaatagacgataccattagcctcataaatagagaaatgtatccacgagacatctctaattgtagcgcccgttccgtcgtggcgcctagcgggaaaactatctcttaaaaaccctatttgcaaaatccgtttctttgcttgttgtctagtgtccgtgccatctcagatctcaaatcctcgatctatcgtcgagttcaatcccgaatccaaatccttcccaaatcaaatccctccgcaaaagtctattttgcctccctcgggttcgatgggccgaactcctctcggcccatctccccctccctccccggctctctctctctctccctctcccccgctctgctcgtgcgctgcgcacgcgtgcgcgtgagccgcgccgagccgagcgccctccgccctcgctgccgcttctcgccgcgccgcccgttgcttcccgcgtgcgcgcgcgccatggtggccgaccgcctggtcgccgccgccgtcagcgcctgcccgcgcctgccgcccgtgtcgtcgctccgctccaaaccgccccgccgtcatcgccgtcgtcatcgactcggccttcccctctcctcgcgctagcctccaagggacggaggcagagctcctcctccctctgccgcgtcgcccccatcccctcctccttttcccaaagtggcaaggggcaagccccctttctcccttcctttttccttttcccctccccgccggcgtcatccgcctctgtcgccgttttggccgcgagcgctgagcgccagctcgcgccttgaccgcccaaggtcggtttccaaaccgacatcgtcgtcctataaaccaaggcgccctcccatcgattcctcctcccgtttcgctcgctgccaccgcgccattgccgcccctctgtctcgcctccgccgttcatcgccaagcaccgggagagccggtgtgttcgtggacgcggaaggggactccgggcgcttgccttcttcctcttccccgg

SEQ ID NO: 8424 - DNA, 10227 bp, Oryza sativa
tgttggcatgttagctactggagtagtgaacgctgaacagggtaagatagacagtattgtcgaaaagttagaatttttactaatggagccttaaacagtactgtatttgaaattctgttatatggatctcttttaatcaagttagaggtctctgcaagaaaattcagttcgtcgcaatggtggacgctattgtttttccatttcttttccttgggtggtgctcctttgacctgcaactcttaatgcaagggactggaagctcaagatgataaacttataataaggaaggagaagataacaaacaaaaaatgttgttacagctctagtaccaaaacagagcactccagtcaatgtagcacgaactaacgtgcgttcccattttaatagctactttgtccatcctaaaatacttgttaggtagatataatttagtacataaacttataaaatacttatttcagtgaacaaatttgtctagttcgtgcgagctagaaccaaaatggctttgcaaggttgattttaccaagctgatgttgattggaatgtgatatgtatacgtggaatgagtatgcataagacaatctatatttataaatttatcctctactttatccttcatatatatctaaccacttatcattgcttgggtttatatatgtttttttaactaaatcactatatcacattctatctttttattgaacatatgtatatttaaatagcaacatttctttgatatatgtttacgcagtatcctaattagcacataaatcacatgaataatactttatgcataacttacctttttaaatttttttataattttttcaaaatgttagacactgaaacccacgaattgattttttttttaagaacggacgggagtatgtagccttgtacgacatggcccaggctccagagccgctctcccagagcagttcagcagtgcagtgcatcgcacgctcgcacatgcaacatgctccccagtccccctggcgccttccctctccctctcgcctctcggtggaatgcagctcagcacctgcacccgctgcgcacggatcgcccagccctctcgccccttctcccctctcgtacgctcaccggcgtgccactcaccaaaccccctacccgtacgctgtgtgtctgtcttccccgcgtgtcgcgttgcacggtgcgcgagccaatgacactcaacgcttgcccgtgctcgtgcctgttttttttttcttgtaacggacggttggatggtggagtgatttgtcctctgctctcttgttcaaaagtcaaaactgaaggatactagctttgcacaggagagtgtggtgcccgtgccctacgataccgggtgttttgtttagatgctacaatttgctaaacttatggctaggcattttcatcaagtaaaactagtgtttgatttgttgtcacatttgtaacatgcatcacaccttttcttacgcaaagtacttaaaaacttttaccataacacatcacacctgtggccaacagacgctataaaaacaaagggttaattagatctatgtcattgcaaatatatcgcactagaaaaataacattactattcatgaatcggttgcatgctactgcaatattttaaagttagaaccgtatcactccctcacgatttctctccatccccatccctcaattgccacctccacttcttcgtctttgatagcacgatgccggtcgactcatcatgctagtcgctagtcgtgtctctaatagcacaacgccggtcaactcatcgtgctagtcgctagtcgtgtctctaacaacaacgaggatgcgtagcgtttcctcctcaaccaagaggaggagcagcagcttagaaggctcttgtccacgagcaatgtcactacaacgatggcggtatcttgatcaagttagactagtgtttggtttatcgccatagttataacatgccatattttcttggcaaaatttgctacagaacacgcaaaaaatatgtaattagctgggagacaccaaaaaacgtgacatggttgatggccactacaaaatttgtgtaattggctatagaacactggtcgaattattttattatttccgagttccatcgttttctccttcgtcaggaatgcgcgtggtggggcgaggtcggcgtgagcggggtgagcgcgagctcaacggcagcagtagggcgggtgaggaagcactggctcgcgctgaggagcggggcgaacctattcatgcactcgctgaagctcgatgagccggaaaagtccgtcgtcaagagctggcggaagggcgccaacccactcccgcctcgctgcaccgtggtcgtcatccggttccgtggcaagtcccgagtcctcggcgagggcaacggtgtggtgactcctctgcatgtccctgcctccggttacccgatgatgagcatggacgagcagaccagcctcagcttcgcgctattcaaagacgtggcgttcaacgccagcatccgccgcggcgtcagggcctccgacgtcgcttgcctgcccatctccttcggctagtagggcccagtggaggaaaactggtgactcatcaagagccagtgcttctcaaccgagggcaccgccaacttctacatgcaccccatcgagggcctcaccgtgctggtcgacatggacacggcggaggtcctccatgtctctgaccatgacgccggcatccccatccccaccaccgcaaacaccgactatcggcacggacactcaacgccttcgccctgctcctcagcggacacttagcgtgagctcgacagccgaagcgggggccttccccttcccctcctccttctccttctcgccctgccacccgctgccgccgtcgagctcctgccccgctcgtgccgagctcaccgacacatcccccgcacgcacggccacggtcggcgacccctcccccaggcgcagccagtgaaacctcctgacctcccttaccgcggctgtggtaaagcggtaccaaaattaggtgtactccattatggagtgggcacgttataaatccgccggcgtggtctgtctcggtggctcagtcggctctatagccaagaaaggataagggaaagaggctcagttggctctataaccggtttttttaataggtgttatttttttaataaaattggcacttctaatataaatataggtgtcggttttaaaaaaatcgacctactactctgtaaaaaaaaacacaatggactttttctttttaaccattttaatgcacgaggagttttgtatgtctcagcaagaagagaacaaatctaccatctaaatagccaatacatataacaacataacaaacgatatgcataatctgcacactaatttgtacatctatcgaaaaagcatttatcgataatccataaatgtttgaggcgattttccattcgtgcatgcatccgtgattctcatcgactaggtgtgaacagagaaaacatgtgcaatcaaaatcgataaatataatggcatttataacattactataacatgaaaaattctaatttatatcaatgaaacagacatccatttaggattaatgaatcagattttcatatgtgggctaaaaaagttttttcaattcttaactaatttcagttgttttttcatttacattattagttttagcactatttgatccactaaaaattattgtaacttatatttagctaacttataacttttctaatattgaattatcgttccggacaaagttatttgtagtttcatattgttatttatacgtttttatttccttcatcatttatgtccaactataatatatagtttaggattttaatttatgtcaatgaatattatttagaacccgttgcaacgcacggacattattgctagtcttataatatgtatgagtaccaaaaacaaaatttataataaatagacaaacaatcctttcagatatcatgtctgctactccctccggattgataaaaaaaaaacaatcttcaaggtgcaacaaaacacctgggtgcatgttggcgactgttaaatgccaattttatgccgccaatacttacgtaaatcggaaaagtatgaaacatccaatatggtggtagggtttaattcaaacaatttccacgagtgttggtatatatttgtataccggtgacaaactaccaaagttgagacgaaatacacataaaactggaggagaatttcacccattgagtttgggcccacaaactcatcgaaataccacaaattaggcccaatcaatacaccaatggcccaaggagtcttttgccaaggcccaagaaaaaagccaccgtcaggggagctggccagaggtctcttagttcctattagcatactggaatattgtgcactagaaataatgtttactttagtgtttgatcgacattaggaatattagagtagtatctaaatagtgtagacttggtttctatatattatttaatacatgtatttgcagcgcatcccacagttcgttagaggtagatgtagaggcggtgaccgccctcgagatcacttaagttctccttatccgaatacggagtagagcacgatctggtagcagcgagcaagccagtgcctgaagtattgcaatatgattaaacataagctttctatagaccctatacctcactagaaattatctctaccttttgcctacatttttatattatgttcttggattaacagtattgcaatatgattaaacttaagctttctatagaccctatactcactagaaattatctctaccctttgtctacatttttatattatgtccttggattaacctggagaagagttacatgttccgcgtggaaatcaataacttgaatatgattttatctgtgatcgtaatatcaacagtgcagctcaaaacaaagttatttgttttctgtaaacagggggacccaactctacaactcaactctaagctgaaaattaatgtcggtgcaaaataaatcagttaggccttaatgcaaaagaatattttgtttttataaatgagaaaacaaagttcaaacaaacttaagaaaaacaaaccgtgacaaaaaaaagatatttgaagaattgatacaagaagaatgtaacgccccaggtaaccacgtacctagagtgccacatcaaaatactctcaaaactactaactcccaaaataattagaaattttggtagagtctctcctataaatatagacatccacgtcaggcagttatagattaaactaataatgacatcgttcccatagtgctacccatccatataatccatggaaagaaaccaatagatatttaatagattattacaagacaaaaccaagatatagtttaaatgtcattatggacctaagcagtatagtttgatagtgtgcaaatagatatgtatataagggtgctactttctgcccatgcatgccaatctcaatgtatacctaaaaaacaaataaacataagagtgagtacagaaatactcagcaagtacagtatgtaactagaaagcacatatacacatcatgggcaatagagcacgaatagaaagcttcctttctttgataagaaacacaatttcaaacaccaagtcaaagaaaatagtagttcccattccgggcagacatgaattgaaatagtaatttctatcccggacaattgtgaatacatcctagcatttgactttaaccttgatggtaacctgacgtaacactctccacaaaggatatttactaaaatcgtaacctagaacatataaacttttaccgatttgtattaaacaacctatagcagttccattactattttatacgtaactcgcaaaccgtttaacggaaactagcaaataatacaacttcagatatctagaaaaaattgtctacaactttcatgttggcaaaaaaatcagattaagccaatgtaggtctcagataagaaaaacaaatttctgtccctattttcagaccggcagcagtactgtttttgctgtttctcctaaaccgtttatcggattcgagcaaaactagcggcgttaaaaaaatatcaacgatgactacaaactttatttaggacaactgacctgaataccgatggtttaacaccagatttgaaaatacggtttcagcctagcgttcgaaattcgaactaccggtaacagatcgtcttatatatataaattagaaacaactagggactaaaacggattacctagcagtactaatttgagagaaaaacaatgaatttggagatatccacctaattccccaaatttccctcttctatctaatttccccttctctcctccttcctgtttttctctgcttccctggtcgttgtagaagcaacagcagcaaaccacccaccagcagcagcagctgcaacaaaagttggagcccaacgcacagcagccaaagaatcagcaggccacgcattagcaggagcagcagcaggaaacgcagcagcagggaaagtagcagcagctcaccaagaacagatcaaattggcagcgaaggacgacgagggctgcggcaaccggcgacggctgcaccggcagcggtggcgcagaggcggctggggcgcaggagtggtggcggctggggcgcaggacccttttttttttttctgttggttatatagagagaggttaaagaaaatcgaacagcccacattaattcgatcaccggaaataccttgggactccgattaccacaaacttagtctattttgcactattcagcgagctctatgcatccacggtccctgatcgcctattcaaacaacggtttaaaagttgaacttttgcgcgtttgttttaatatatcccgaaatacactaattcgaaactcggggtattacaaagaacatttcaaaaatcaaggaatccaacttaatgtacaaaatttaaacttatggaataaaagtgaaacgtcaacggagaaaccaagaaaatgttcgtgacaagcaatcttcgatttccgtaaaatcaataagatgcaaccaaatggagacgtctagcccgcaaccaacatatttttttcgataaacaaggagacaaatctctacaacttagttataagtcgaaaatgaatatattgagcacaaaaaagccgcaaggttgaaatgtacacaaatatattttcttttcacaaactagtaagcataagttcaaacaaaattacggaaattggcatttcataagtaaaataaagctttagagtcctaagagaagatcaaaagcagtagtacaagagaatgttagaaacaaagaaatccaacaaaaagtgtaaagtttgaacgaaaggacggaacacgaagtgtcaagagacaaacctaaaaacgttcggtataaagatattgcaattttcgtaaaagttttaaggtgcaccaaaatgcatggaaccagttcataacaaagtgttaatagcggaattttgcatcagattcggagaagaagaagaaagatcgaagcggatttggtgttgaaccaagttaaaattgaagtcggactgcgcattggccagcgtcgtatcggctgaaaacaggatataggcttaacttagccgatatggcaagtagccgatacgatataacttgggctcggtttgggcctaaattttgttggatttggacatagaccaccgtatatggtcttgtttgtattttatttttagaaaggtttgagtcgtgtccataatagacgaagtctgtacttggggtataaatatgaaccacatagcattataatctgagagacaattcaatacaacttctgcacattgccaccatttttgttcttcttttcggtgagttctctcgacaagaggtaacccgtctcgatggcttgtgctattgggggttattatgtcgttttagttgttttagtccttttatgatgaccatatgttatcatatgtcttagttaatctagccttaatatctcaatttagcactatcggttggttctcgctttagggttcctgctggtatcggctaaattgccttactagattagcttagctaagccatctaccatcttgaaaagtgattaattccttgattatttagaccttaggtttctctgattatttagaaccctaagaactaacatggagataacatcaaagtttcagctgatcttacctaatatacatgcttcttaactggttttatctatatttgccacttatatagacaaatcattctatataaccatatcaagttagatcagtattgactgggctatctgaaacactaattgatcatgatttgtttatataagtttgtactagagtattagctagtactttatcattatctatacattctgctctaaatactgctccatcggttattgtcatagtattgtcttgaacttctttatcaaaccaaatagacattattgtaaccgatgaggcattgtttagggtcttttattccttgatctatccagtcaatagccgatttggtctaaccacatcggctgagactactaccgatacgctattggctgactaactctgcttttgactttcttgctaattgtaggatcaaatcagctggcacgcttttaacacactcgaggctagccttagacctgcactggagttaagcagatctcccaggccgtcgtgtttcacatcaacacaaagttatttgttttcaataaatagggagaccaacctctacaactcaactaataagttcaatattaactttagagcaaaataaaacggtcaagcttcaatgcaaaagaatattttgtttttataaaccagaaatcaaagttcaaacaaatttaaggaagacgaactattacgaccaaaaaaaattggaaactccaaaaaaggagtgttggaagaatcaatgcaaggaagaacatttcaaaatcaaggaatccaacaaaaagtatataatataaactcctggatgaaaaataaagcctcaacggtgaaaccaagatatcgtttggtacaaccaaactacaattttcataaaatcaataagatgcgatcaaaaatatagttgtctagcccacaaccaagatacttttttcgataaacagggagacataaccctagaactaaattatatgtccaaaattaaaacgtcagagcacaataaagacgcaaggtttaaatgcaagcaaatatttcttttcacaaactagtaagcataggttcaaacaaaatttaggaaattaacatttcaaaactaaactaaaggtttaaagtccaaagagaaaaaaaaaaggaaactttgtaaagctcaaaagcataaagtttaaacgacaggacaaaaaaagaagggtcaagggagaaaactccaaaaaggatatttgaaggatcgatgcaagaagaacattgcaaaatcaagaaatccaaaaaaaagtacaaaatttatacttttggatgaaaaatgaagtgtcaatggataaaccaataaatccttcggaacaacgaaactatggtttcacaaaatcaataggatgcaaccaaatgtagatgtctagtccgtaaccaagatatttttttcaataaacaaagaaacaaaactctagaacttagttccaaatctactattaaaacgtcagcgggcagaagagctgcaagttttaaatgaaagcaactattttcttttcacaaactagtaagcataagttcacacaaaatttaggaaatatagatttcagaactaaaataaagctttaaagtgcaaagagaatttctaaaaagagaaagtttgttgttgaagaaagagtaaattacgctcacggtacataaacttgtgtggtgggtgcaaatagatacaacaacttgcaaattgctcatttcggtacaataatttggctagtccgtgtgaacctaggccaaaacgatccacacaagcaaaattgatctagcctgatgtataatgatatgtaattattattacacataaaaatttataattcctaaatgtgttgttattatccgcatgatatttttaagatttagattgataaaagaaccaaaacaattaaacatgctcggtaatgaaaataaactttcaataaaatggagcttctgaacataggaattaaaatgaatttcctggtgttatttgcactatggcacgccagaaattgtcttagttataaaggaacgaaaattccagagaaatgaaatgaaataaacttttgcatcactaatttctctttttatttggattgcaaa

SEQ ID NO: 8425 - DNA, 15129 bp, Oryza sativa
gttaggaaaaaacaggaatattatttgtggaaaatgattcaggctctgaataccatggtgtgtgggtaaaagagctacctggaattctactacaatcaattgacaaagccccctcagtaacaaaggtctgctataggttatttatccagtatagagttggaatactcagattgggcattaatgaaaccttttcaataaatagtgtactttatgatcatatgaattatcataggttgttttggagctacttctaagaattggacagtacttccccacaatggagtttggaaatctgcgttccttcattaagttatttggtgttaaatgtaagtataaaattactggttgaagatcttttttatcctctatgatttatcgctttatgtgtaattccatttttcttggactaatgacattttgctaatagcatcatcaggaaccatagagcttggtccattcgttaaccttccacgtgattgccaagaacttgccatttcatgcctttattacttctccaacctgcttcccgacacaatggagctgttggcttcttgttgcttaagtatgcatttttgcttctctgttctgcgtttagtgtcgttatattctttcctttaaggattacaggtggtacataatttatggaatgcaggtgatgtgctggaacccaccatattgtttagaattattgaggttctacagtcaacatacaaggctgggaatttacatataacagagcaactcagtttcttgtcattgctaatggcacgattcagagttcatcctggtgagtacttttttttttggaaggcaaacttttcttagtttaagtggcttactttaggtgaaaatttcatactatgtgttttgctctttaagttttatcctctaatggttattttatctgacatttttttctaacagctttccttttgttttgttaaactagggtctttctctacccaggataattcccagaagggctcaaatatgaatacttttaaatcattgaaccgcctaattttaaattctctatctgaaatgggtgatggctccctggttcttgagttaatgtgggataatttatctaaagagattgtgaggattcaaaccatgctatgtttttatgttttcacccaaaatccattgaactcatatatgtttgttttgtgcaggcacagataccatctttacataacatgaatggattgtttagaattattgtcacacttgatgcaggaacttgtaagctcatgaacgaagatgctataaaaattatagctggctacttgattgatgctgctatggtgtgtactcttctgaattctaaagctctggactctggtatttgcagtcagtaatttggtaaatttgtacgctaattcaggagaacgtagtcgaaaatggcagattagtcgaaaatggcagattggcgtattttgatgttagaaaacctattgcctatagatctgatataatcggatctaacattattttatgcatattctttgaaaactatgagagttcactaacagagcatatttacgtggtagcatagggagagtatcgtgagtaataagctcttcacatcacctggtgaagcgcagagtgtcagattgaatgcattacggcataaacgtttttttcagttacactagcttatggatggtaattatgagtttgacacctgcaaagcttttggcaaacaggtgcattaattcattgtcatataaattagaagcgcatctccttgattagttcataagcattgctttatcgctgtacttttttgggttttgatgagaattgatttcacccaattttattgtgtacatgcaggatttgtctaaaaccattgagcttggctttcaatctgataggacaagactatttcaatactttataaagccttgcataatcatattttgccagaacgagaaggttctttgctgcgcattggagatgcttaaatctttcgcaacaggagatgaccacgtgctttcatctgcatccaagttaaactacccaggagagctttcacatcgaatttgtgttgtcacaactatactcatattcttatgcaatgatggaaaactccataaaaacctttctttgggcaaatgtgttattaaaggtatcctgcaacatacaaggcatctcatggtaagtggtgataacataaatgcctttgtttggtagccatattaactgatgagatttcagtttcctacattttagtcatttttcatattaatcttaaattcagggaggtcagaatatcaagggcaaaattgaacatttgtgcatgtgaatcgtatgtagactagtttgttgaatttgttcctactatgagagaatatttgtcctgtgctgtacctagatcactatcactagcttgctctattatgcctaaatgtcgttgttgtgaaactggccttcctaatgagtttgctctattcaatacttgctgcaggattctaatgttcttgatgtaacatatgaggacaagcagaagttaagatttgcatttgagcaactaaagacgaaagcattgcagttgaactgctgggacagaagtgagctggaagggttttcaagcaccacgtaaatagtaccaaatactaatggtatgtgggctccttcgtcattgtttgctaattatgttgatttattgtttttttttaaaaaaacgaatgaacttacttccatcccatatgataggtactgccgtaatgtgaaaccttactctgcacgggatgaaaattttgacgaactgaaggtgaagatggagagtggacatggtgactggtgaggggcagaaggatatgtgccatccgacctgcgtcagactccagtatacacctctgctgttcagctgttaccaacactttacgaaggtctgtactttacccaaagattaatttcacacttcgattctatcttaatcctatgtttcccaaacggtctacgatttgccataaacacacgagtttctcaggagcactaggtagatttgtcatgtttgacaacaacgtgcctgacagtaatatcttgctattgcaggtggccggaaaatgcattgttcacatgttgggaacgaggtggtccactggtccatgtatcattgtggtacagcgcttggttttgatgcaacagaattgcagtttagactgctcaatagaccataggttatttcaccgaaaggtttacatttcaacctacatgtccatgtaagaatcccgatgtaaatgtagaaattttgttttggaagttcatttcgggcctctcatgtcattgtttccacttcctgcatatatacttgtttcaccgagacagcctcaaagccattttcatttccattcgcctggtcaacgttggcaaaggccataaggcagtttccaacgtgcttacactactgcaacttacaaccatatccatcacgctggtgcaaccacatcccctacacacaagctcacaaatcacaatgtttgtctgcggccttattctatcaactcattcatttggttttgggtaatctatcaattcattcatttggttttgggtaatcaatggtgtatgatcgggtcgccattttgggtagcaaatgatgtagcttatcacgaattcacgatagggcatggctgctatagtgccatctactccctggacatatagtactacgaatctggactagtcccatgtccaaattcataatactatatacgcagtatcatctacgacgggcgtacaggctgctgctgcgtgatgcagtgtatgtttccccctgccagcacgatctctcttgcgccttccaccatcaccacctgaaattcacgggttccgtcagaacacccagcacagttttgagttctgacgtcgtagccattgccgagtaacaaccaacagccactgcttgcttgagctgtggtcgctgacagacagaaatcacagcatcgctggataaagtttcgaagtgaaatgggtcagtgaagatcacctcatgatcaggaaatgccttctgaagaacagcacacgcttcttcgtcccacttgtcgccaaaagctggtgctacaattccgccattggctatgtagaagtttacgtacgaggcagccaatctcgtgcctggttccctcggtatagcatgctcctagaaaaaaaaaggactattcattcttagaaagggatgaacacgctcattttcaatggattgaagttagtaatgaatatgacagaaatactgactgtttttacaacaccctctgactcttcctttgtcatgtacagaggccctgggacgtggattttcacaacttctatctgccgtcctttcgcatcaacggacttggagagagttgagagtgcatcaacggacctttggtactgtgggtcgttctcatcatcggtccatgacaagaggaccaccccaggtttaatgaagcagcatagattgtcaacatgaccatttgtatcatcatcacctagagaaaccattgcaggcctatttatcagtagaatggttgaagaagcagggaacagaactattatggttttacacctttatgtgacagaatgtttttggtggttaccataaagcccatgaggtatccagatgacctttgcgactccaagaaaatccttcagctcattctctatctctagtttggtcatgttggggtttctgttaggattcaacaagcattcttctgttgtgatgcatgtacctgttggaatatggcaattcattagcaagataccaacaaatatactgaaactatatgcttgtcagcaaagattcaacacatgaacaaccttctccatctacatgaatgcttccaccttcaagaaccatcgtgtgtggaaatctagggatcctctcaatctcaactatctgaaatcaatgtccaaaacagaactagttctcagaccagatggagactagcaaaagatctttttgaccttgaaagatgtcaaattttctttaagaaggttattctcttcttactttcttggcaacatagctgtcaaggctccaatcaacatagcaaccatcagtggctcctgcaggcattagcagcacaattcactgaatcttcatacggagcaggtgcaaagaaactagcatgtcttgataatgtacgcttttcacactgttaataacagacacaagcacaaagatttaatttgtgaagaaaaatgtttcatcacacaaacaatctaattgaaataaatagcatgagaaagaactgaataaacatattactcaatataagaacaacatacctccccaggcgttaaattcccaatcaattcctgctatatttttttctgtgattcctaaccctggtgcacctttacgaacaataaactaaaaaacagggatactgttagcaacccaaacactggagagcaaatttggaataagaaggcttgaagtagcatacagtgggaccaatatcacggaaccagcaatcattcatgctcatctcgaccaccctgatgtttggttgatgtagcattagctcatggacatagggatactgcatgaaacaaaagtatgaattggtaccactgtgcaatcagacatgatcgtgcaacaattcacaacacagatcataggaggcaatgtggagaaaatctgttacctgcttggcacttgcacatatagtaacagactcaaactttgaaatggcaatagcagttcttgcaaatacttttcgagctggaccagcaagctctcgccaattgtctcgacgctcctgggattcaaagtaaaaagaacaatgctcactgttaaccaaatgctcactgtagtatagaacaaggattggggaagaagatagatgaaatggatacagtctgcttttcatattcaagaccacagtccaaaatgacaattattgatattgtcaagtggatattccacctaaccactccctttcggagttacatatactaaacagcgattagacaagacaaaatagggcatgtacagggtagagtagtccacagatgtcactgcaatgatcaaacgatcattcatgattataaaatacatatatgtagaaaatgtcaatgtgccagtgtttaagcaatgtgccacagcaacgtgaaccaagacaagacaggtaaatatctctagaatcgtacatcagaaaaatcagacagcaaagaaaatgatggtcatgacttatagattgagtcaatcagggatagggaacagtagagctttaatagcgtgatggtcccaaaattacaactttatttatgcgtgaggggaaatgattcattcatttgtactaaaaaaatgaaaaaaaaaatcattcttgaatagttttaagacaaaaatgatactgtcgtttggacaaccaatgtagccgcctacttaaaaagtaatccatgtgcttacaaatcaagagtaataaagttgtggatgttccggtgaggcggtgatagaatccagcctaaaatatgctcgtaagctagtaccgattcagagattccaacttgacgagaaataaacaataccccaaattgctctgtgcactttagatgggatggattgatcccgagaccgcggcgcgcggccatccatcaaatccattcacttgggaggaaaccaaattctacacgacgcggtaggatttacttgtttcttctttctttttttttttggttggcgataaaaatcgcgaggatggatccatcggaattcagaatccaaacggagaagcgaagaacaattaaacagaaaaaaaaaagatgaggaaccagagggagagagatgagggagaagtacgtacaggccagcccatccagcactgctcgtgcggctcccactccgccggcatccggaaccccatcttcgccgggcgcccctccatcgtcgtcgccttcgccatcctccttctcctcttctacctgatgaaccacctctcctcttcctcctccctaaacctaaatatccaaaatacccgcctgattagcgcccaattggcgaaggatctgcgctcagcaaaagcaaaagcgatgggaaaaatggggcgtcccacgactcccacccgcatcagttgctttatatacgtaggcggcggggctaggcgccacgtggctggaggagagaggggagtggggacccttcccaacagcttcgcgtgaccaagtttggccacacgaacctcagcaacttttgtcagaaaaaaaaaaaagcaactccacgagaaacaagaaagcgagaagccgtcagggagctcgccgtcgctgcgtggggctcgccggagtagggggcgctcggggagcctcccgagatccgccgctcggcgccgccgccgtcctccgggcggagctcccgaagctcgcccccctcgcgcgccggtggcgttggcggggcccgcggccgggcagctccggtgctgcgcctccaccgtcgacgacggcgtcgtcgccgcagccgtcttccgccgcgccgctggacgccgccggatctgccgctcgtcgccgcgtgggcccctccacccggttggaggaggacggagagaccgacgaggaagaaggaaggtcgcgatgcgctgccgcgggggccacatgtcattggtggggcctacctcctcagatgcgctttggtgctgtgcaaatgtaaccactagatatttttttacactttggtctctataaaactttattttgtaaataaactcctacttaaacttaggttatgttcggatacgatggttacttaaaacaggacgagctattagcatatgattaaataagtaattaaaataaaattgaaaaatgggttatatgattttttttaaacaacttactagcactttggtaagcgtgtgtttgaaaaaacgagaaagtataagttaggaattggtatatctgagcacaaccttactaagtgggcatttttctcgatgctaccggggtgaaacatttcatcgttaatgatactagcgcagacaccctcgcttccttagcaaccaagcgttcgagatgtagagccgtagagggatcagtgttagcctctttagcaccgatcctctccatgtcaatgaaatggctaccacggaggataaaggggtgtcggtgccagtgttattagtgacccaataatgttggcactgaggaaaatagtctattttaaaattagtttatccacagatctactctctctatttctatttcatgttataagtcatttcatttttttctagtcaaaattctttagatttgattaaattatataaaaatttagtaacaaccacaacaccaaattatttacattatatataacattgaatatattttgacaatatatttattttgtgttaacaatattattatactatcttttataaatctgatcaaatttaaataagtttgactaaaaaaatcaaaataacctactatttgtaataagttttcaagcagagctaaaatgtaaaaaaaaaacccacacaggaaactggggattggggaaagacggcgttgctggtttgatggtttctgttgcactgacctcccacccttggggtgggggcggggaggttgtcagtatcggtgtgtggggtggttgggggggggggggggggcggtgatgggtgtggcgagcgaagatgcagccagccacgaagacatcgatacgtgaggacggaaggaaggaaaatgaattgtgatcgagaccgtgtcgttgagaaaactggatgtgtcgccacgtgacgcggaccaaatcattggcttgaaagaaacagggcgctataattcctccaagtcatctacacaatgtacagcaacatatatacttgcaacgtaatactctctctctctccgtttcaaaatgtttgacaccactttttttaagtacgtgtttgaccatttgtcttatttaaaaaaaactaagtaattatttatttttttatattatttgattcattgttaaatatactttcatgtacacatatagttttatatatttcacaatttttttaataagacgaacggtcaaacatatgctaaaaagtcaacggtgtcaaatattttgaaacggagggagtatgtgtaatggaggagggttgctcttacttaatttactttactttagatcaagtttaagttgatgcgtgtgcgtaagtttgtattgaggggatatacacatggtgaaaatcgatgagttataactaaaaaattttcttgaccgggttcctgggtacccctcccatactctacctccacgctctgctaaggaatgggatatactacatgtatggcattaagcatatctattacggagtagtaatcaaccaatattattattctctctcctctgtctcttactagttatttcatccgttcaacaaagaatcaactagtattggatgtgccacatctagattcattttttatgggagagggagtaccacttcatcattaaaaattccgtgtggcactttttaatagattatgatgttacatcatttttttattgtcagatatatagagagaaaagtataatactatttagtactacgcactccctccgtagaaaatatgcacgggacccattcatcattcacacgaaaataatgtgggacccacatgtctatcctctttccttcttccttctccctttctctcacttctctctctctttctctcctctttctccttgtctgcacgccgaggcagttggctgagggccagagcgacggcagcgagcaggagggcgggcgccgccttgagacggagcggcgacaacgcggcatcgaggcggagctacctctcgtcgtcctcaaggcggagccacaacacgtcttgcccttgagacggtggcgcgaagcgaggagtggtctccagcgacgccttccactgacgaagtggagcgataacgacgagcttcagcgtggagcgttatccccatcttacttgacgcccgacgccttccaccaagccatcatagacgagggggacctgctcatcccgctggtctatgtctggaacaacaccaccttcgatgattccatgtcttctagatcatcttggctgccccaataccccgtcgtcacagctgtccgcaagggcgacaaggagcatctccgtcccaaggttgatgtagccatcggctgcgacatcgatgtcgagattggccacattgaggtggatgtcttgcgcctcacctcctagctccaccaccgcgccctcacccttccatccccaccgctagggtggagctcgccactaacgccgctggggaggaacccgctaccaccgccgttggggaggagaccgccgccaccgctgctgggctaagaaacgaggtgagaggaataaagggagtggtaggtgaaggacctgtggacccacatggcagtggattccatattttttttgtgtgaatgacaaatgggtctcgtacatatttttttaattctaatacacataagcgtcacgtcaacttcacgtggaacggagaccgattcaacattgccacataggcgccacatcagcgaaaccgttacccacaactgctgatggagtcaaattgcgctggttttaatagttgggggttgaaatatcggtattgcggtttagggatacgaagaagattcgttcactagtaaagaaagtcaaagtgaactaatcctcccatccggcatccccaaggccccgaaggagcttgggccaaggccacaagcacaaggctaaaccgagcctgtagccgcaatagggcccagcacagcaccgcagcccatccagtaacatcaggaaggcccccataacctccaactcgtggataaaaatgaaaaacaaaacaaaaaaaatattttcccctctaatcttcctcaccattcgcgcatcacccagcagacgtcgcggtcgctcaagcctcaagtgcgcaatccaatcaccgcagccgctgcaatcctcctctcttctccgtaggtaattccttcgaacacctcgcgcgcgcgcgtcctctccgatcgaatggcgtagcggctgggttttcccgaagagagcttgattgattggcatggctgccgtggtggcggcggcggcggcttgcttgtcccccgtgtgcgctgccgctgcctccgtcccgcgcgctcgggtttgcttcgtgagcccccccggttcttggagctgcctcgccgcgagcaatggccgcgggttgcttcgcggtgggaatgggatgcggttgcggtggagggcaccggtgcgcgccaaggtggacgaggacaaggaggccgggctggggttccgcgagccggaacggaggaggatgcggctgcggctccggccgcggctgcgcctgctgtggtggcggctccggcggctgtcgccgcgggacctccccggggacgccgcggccgcgctgcggcgcgccgctcgacgcgtgccgcccgccgcggccgcgcccatcgtcctcgcggtcctcctcctcgccgcccgcctcgcgctgcccaagaacgcggccaaggaggtggcctactcggacctcctggctggcctccgcgcgggcgccgtcaccgccgtcgcgttcgaggaggactcccgccgcatctacttccgcagggccgcggacgacgggggcggcagcgacgacgccggcgcgggcgcgggcgaggcccgcagaggcgccgcggcggcggcgaggtggccgtgctacgcgaggagggtgccgcacgacgaggggttcttgctggggctgatgcgggacggcggggtggactaccggtcggcgccgcggccggcggggaggctgctggtggacatgctgagcacgctgctcacgctgtgggtgtcgctgctgccgatgatgtggttcatacagcggcagatgtccgccggtggcggcgcagagaagcggcgccggccgaggaagcagcgagtggggttcgacgatgtccagggcgtcgatgaggccaaggaggaactcgtcgaggtgaatctggattctctggctactgatttactcatgattttgatgagtgtgcatagataacaatcagtagacatgatacaatgtgggggatgaatgggaatgcaaattatttatacccaaatgttgggactgcttatctttgcttgacttattgaatggcttgctattgataatgcagatatctaggttgataatcgaggtagctatggtttgctcatgattcattattatacatgctaatgctactgtatctacctcagtagtgccatctgaactagcttctctcttgtggggtggatgggaaatagaaaaatgggtttgggatccatgtcatgttgttctactgatgagaggaagttgtggagtgtaggacataggaatgtgtcaacaaggtgttttgaaagcttaaatgtagattcaagaatcattttgttgattgtgctgcaaattttacattgtttttgttgtaggaaccatatatctgctccattccattatctgaaaatatatctgctccatatttgttttgtggatcctcagttgaaaacaaaaatactgggactgggaggatatctgaaatataaatacatatatatgatagaaagtggaagtataaaacagtaatatacagttggatagataactagtacttccattttttaactctcaactctgaagttcgtgatgattgcgggaatgttaataactaatgcatcagtttcaattaatatccatgttcttaattttcctcgctagaaataattgagtatgtattaaatgtgacagattgcaattttctaacgcaggtagtgagttgcttgcatggttcactgaactacaagaagctcggagctaaattacccaggggtgttctgcttgttgggcctccaggaactgggaaaactcttctggcaagggcagttgcaggagaggctggaattccctttttctctgtttctgctagtgaatttgttgaagttttcgttggaagaggagcagcccgtgtaagggatttattcaaggaggccaaagaagctgccccatctataattttcattgatgaacttgatgctgtgggtggaagtcgaggtagaagttttaatgatgagagggaccaaactttaaaccaggtaggattctagcaccttgattttatctatcctctgattcaaatgatactactgaatgaagaactgcttgctttctctatcaacagctgcttactgagatggatggttttgactcggacatgaaagttattgtcatggctgctactaataggcctaaagcactggaccctgctctgtgtcgccctggtcggttctcaagaaaagttttggttggtgtgcctgatttggaggggcgaaggaatattttggctgttcatttaagggacgttcctttggaagaggatcctgaaataatttgtgatctggttgctagtttaacaccaggattggttggtgcggatctagcaaacattgtgaatgaggctgcgttactagctgctcgaaggggtaggttaaaatttatgttgtacatttgtacttcacttatcaccttaatgcaagtaatattattgctacattgaacagctctttgagttacaaggtttagaaagctagaccatatatgccttctttattcttctcagagactacaactgaaatgttttccctttaggtgccttgacttaattcaccatattttgatattttactggagaaatcataataaacatgctattgacttttatctactttcttgttgttttaaggatggttaattcattctgatggaaaaatctgctattgaatatactgatcttggatttttacaggtggcaatactgtggctcgggaggatattatggatgcaattgagagggagaaatatggggtcaatggtagacaagagaatgctgattctgaaaggcaaggcctcactaaattgtttccatggttacctaaacctggaaatagaccaacaaacccagatgatattggaggagttatgggatatcatacattaagctaactggaggctttgcaaggtatcatttgagatgttcatcaaacttatatttagtaggctttgcttaatcccccatcagttgaatctactccgaattctttaattgaacatgaaatatgtcttgttagtttctttagcaagtccttactccttagtagagaccagcataggtttgcaaacattacatttgatggatcacaaacaggtgtaaagtgcactcatctttagcttgtgaaattagagatagaatagatgggagttgaaaaccttacgttctggtcatttggctactatatagccaatctagtttcaaagtttaagttcaggatttatcttgcacatttgttgcagttgtaaggtccagtaatgaggcttggaggtttccagttgtaactcgttaccactaaccaaggactggccagttcccagtccactctgtagctttcaggaggatattttcaaatatgagcatgccctcactaccctccagcaacttaagattatgcatgggtgagttggtgctcaccatcaaactatctgagtctcccaagtagctgagaaatttaagagcaattaggaagctgctggagaacctcctgtttctttgtagtatgcgtccttaacatactctgctgtgtttcatactttcattaatatgtagatttctgtttatgattgtataatgtggagtattaaatatcaattcatgccattattaatatattctgtggcattgcatagtactatccttttcccttagacaaggtattagcaagtgaaaaattcagcacattaaatgtttgctgtgaaatcttctcagtaagtattaggctacaagctttgaattccttttgacatgctcctccttttgtccctgcaatcttatttaaactgcaacatccttatgtggccttttgtttctgttgggcaggaagaaagaagttaagctgcaatcaaaatggtgtttgaattgccaacgtacatgggaacatgtcggttatagtcgtgtaggagcaaatatgcgtctctactgtacatgtgaaggatactgcactcttctgagttttggggctgcaaatttaggtgcttggaggagaaaactgccaccaaatcagaagaaatcaagcttctgaatgtgaaacacg

SEQ ID NO: 8426 - DNA, 9398 bp, Oryza sativa
tatttaaactgcaacatccttatgtggccttttgtttctgttgggcaggaagaaagaagttaagctgcaatcaaaatggtgtttgaattgccaacgtacatgggaacatgtcggttatagtctgtaggagcaaatatgcgtctctactgtacatgtgaaggatactgcactcttctgagttttggggctgcaaatttaggtgcttggaggagaaaactgccaccaaatcagaagaaatcaagcttctgaatgtgaaacacggaggtccaaggatttcacttgacaacaatcttgcgctctgtagtctttgctagaagcactacatctggttttgttccatagacaaattgttaatagaacaattagaattagattacaggataaggtcgctccagtgttctgctgtatacataccatcagccattcagctcattcgtgcaaaccagaagttatgctgctgctgggtccgcgacaatatgtaagtttgcaaatcacaattagagacgagcactccttaccatttcaaattgtgcatcgctttgctttacctaagcactagtctcttcacgttgttcatcatttttcttcaactgaactttctcctactgctacaattctataaatctgcaggtatcaaagtatgaatagattatacacctttcaactttcaaatttgaacttctctgtagtactcattgtcctgtgttatctatgtgccattttcttctgcatttgcttggtaaactctgatgtgtctgcatgacttcagcattactgctaaacctgatcacaaacaggggattactggtggattgccaagtgggttccatgacagttagtcggagaacgacccggcggcttgacccagaaaaaaggccatctgctgtcagagacacacatcccgtcctgaagacgacatgaccttaataattgggaagccatgcaatggctgcagaatcaggacatatacccttgagacaaagatgaagcttctcccagcaagaaaaaatgttgtgtaaagggcagagctttggcatgtagacctcgacctgtcatacaccggaatgaagggtgtggtttggctttttgtgttctttcttctgggctgcttaaccaaccatgcttatctctgcaggatcaggtcacagggatcaaaggggggaataaaatggaaactgatgggaataaaatggaaactgatttgtagctttcaatgtttcgttctcagctttgctattagctttctcctgatgatttagaggccatggtggtctcagttcatgcatctatgacctgaatgaatgaagcttgtcctgcacttcagatcgatcggagtttctgtgtgcatatctaaactgctgagttttgggcttttggcctgacactgttctgcctaaatttttcagaaatgccttcctagctactagctaggtcatgagctatagccatcagactgttcgagtagtttagttagcaaaaaacaagactacagaatgcctactgacaagttgccacaaaatataatcatctggtatatataatcagcttcatgttaatatttgagaacgcatgcttaattatttagacgatgatgacaacggcgtgtaaactagacagctaccagtttcagaagtacgtatatatacaggaatcacaaatcgatcgatgacatttgtaaaggtgattcatgccctgtccgtcttgcaccatgtacgtttgtattgctcgtgctttggaattaggactaaagggataatacgatgaggacaagacacgcatatgctgagacgagagataagcagactacattttctgcaactttctcaaggaattggaacaatctaggggaagctaccaaattgatgagaagggcccttacctaacatatctcatggatatacagtactgaagatattttgtatgtgtacttcctccatccaagaataatataaacacatctggagtataatggccgaatacccgtgtgcagaaacaaaaaaggaaaagcccaccatatactttgaagcctagataaaaatatgaaaaacacaacgagaattaaaaacagaagcccaccgtacactatacagcctaaaaatttaaataaaattattttcattgtaaaaatcttcagataataatttttataattttttatcttatttgatagcttatggtgccttactatttggaagattcacatgtgaatgatggtggtgatggtagattcacttctcaccataatcattggggtctttaaaagagtatatgttgaggttgaagtgagtgtgaaagtagatgcgaaaattacatagaagttagttggggtaagaaagtaagccgggatgtgtttatattattggataaatttcaggcttcatatgtgctattcttgggcagagggagtaggtgtgttaaggatagaaaattcagggtatatgtaggtgttaaggatagaaaattccagacagcaatttttgcctaaccttacaatatatgcaactgttatcccattgtttctcataacaaaaagatacttgtcaatatcagaaggaagatttatatcagatgctaactgatatcggaattattgatgtacagtgtgcgtataaattcaagtacgtactgaaccatggatgcgcatatgtacggtatcagagatgagattgatgagaacaggagagagaagacaagtgatatatgatgatggagaataatcttgtagtagacaagaagagaaaagcaagaacaaagcagcactgatgagtgactttcagttgctaaagacctagagctctgagccgaatagttcttctaggcttccagttgagttgctttcccaacaaaaagctcattcctctgtagaagccatttcaagtgcagtgcaaagcttttcttcgtcacatcctgttggttgcatgcaattacaagtaagctcatgcatatgtactttacgttttaactgtgtgcttaagcatgaagcatgcatcgcacactgtaaaaaaaaaaaaacgtcctcggtattcggttaattaattactgtggcgttaatatctcctgaccgtcgaaagaacagcgtaatgccagcactactgccgacgtatatatgagaaaaattagctgggtatataatgttctcaactaaacaaaaacagtctagtgcatcgatcatcagccaaattatattactattacttgtttgttgtagtagtggtagaattaatttaaatctaactatagatcgattttcatgagtacaggaatattttattcaaaactttggtaaggtatccttaccaattcatccattttaatgtgccatatatataacatgtgaattgatcacagtgttatatatttgatttttagttttaaccttacaaaatttctactacacatattatcggatatagtataataaaataatattcattgcatctaattaaagaaaatggatgactcacaatcattcgagagtacctaaaaaaacctattgatcaatatgtaatcatacctcatactacggagaaatttaatatcatggtcgtataaattttaaatcttgaaaatgcttatattcttaaatggaggaagtagctacagtactttatattctagaaacttccacatctatccacatgctatccacaacattaagaaatatcctaagggtaaaatggtcatatctagaaaatataataatggatatatagcctaattttgcgtgtatagttgaaagtatcaattaaaagaaaatggagagagtagtattcttttaaatgtatgatagttgattttttacatcatatttgaacgtttgtcatattaaagttactatgtacttttattctattgtggttatatcactaaagttattttaagcatgacttatattttttttccatatttacactaaaacttaaatgaaatgaataatcaaattttatgtccgaaattcaactgtgtcatacatttaaaaattgggggggggggtatttgactactcatggttaattttacgttggattaatccagatgcacatctgcttaattaaacatgcatgtgtggttgtatcatgtaatatcagttataattaaggtgtgcctatcaatctagctaatatactactccctccattttaaaatataaatatttctagaattcaaaatttataccataatatatggggcaccggttccaatgcatagaaagctatacattttcatatagttggaaagggaatctaagcaattcaaaatttaaaatttgatatcaccgaagtgactaaaagatgatattttctctctaagttaggttttgctaaagagctagaaatgcttagattttggaataaggaagtagctagcttttgttatggaattttcagaaaataattaaattgaataagtatgtgattatatggagtagctttaaattagcatatatatctttgatgacgataatttcttatggtacaattgtttatactaattatatttatcttaaagccccgtgtgtttttcttgtatatgtatacgttgagataataaaggaggtaactactcaaattatttctttgtaaaatgtagaatgactagttgtgtgagtagacaaacattgacaggctagcatcttgttattgaaacggtgcaaactttattcatgaataggctagttcagaacgtttgagtactgatcagcaaataggcatatcctgtttcagaagctgatcgagatatttgatccttcctgacgtaactcagatattttgaatgttttaataatgttttagagataaacttctgatttgtaatttggtctttctctggcacacatgtgcaaactataagatgtaagggctaaacaaacccggcgtttaataattaacttcaatctgcgtttagtttaattaattgccaccaaataccgtgacatgcatgcatggttacaatctatatgtccatatacatgcatggagatcgagagatcagagaggggtgaccacaactccacaaggccatgcatgcatgggagacatactataaacaatatcatacatatttattcattattattattattattatatatcatcagcagtgctaattaaacaattaaaactatatttgtacattcatacatagcagttccggccctcatctcatgtcatgcatgccctagctagctagccagctgcatatatatatatatatatatatatatattgcacacacacattacaacatatatactatacatgtaataatatatataataatactacatctagctagctagctgcggtcctgtatcgcgagttagctagctatatcgatggagtagttcagacgacgaggctggtctggtggtggtggaacctggcgatgaagtcggaggccttctggtcgacgtcgcgctcgccgatccaccacccgttgtcctcgtcgctcgaccggaccttccgcagcctcgtcgccgccggccgctcccagtcgctcaccgccgccgcctcgtcgtcggcgtagtaccgcctcgacctcctcgagaagctgaagatgcacaggaacgacctccctcccatatactagctttctccccttcccttttcttctaactaactaactaattaagctacttaataaaagttgtcactgattgagattagttgaaattagctatgttaatctagggcaataagcttatagctagtggttggtgagttgctgtctctagctcttggtgtttaggaaggtgaggagaggcctcacctcaatttatagaggaagctagctcagctgtgctccaggctccctcttgcatggctgcttgcagctgcagcttagctcttgcattgtgtactatccagtagtgaacacacacacacacacacacagtagagctatgctttaggccggtagttgcgagctaccttagccagacagctagggttcttccggtccagatacaagagctaaaggcgcccgatcggggagatcggcatcggacggcgccgatcgcgcgatcgggataaaagccgagatcgaacggcccggatctaccgatgggataagatgctaaagccgacgtggggtagcgtgtagatgttccatcatctggagcgcacgaccacgatggttttggtgatcgaaacgatcgaccgtgttcgtgtggggaaaaagggtttgcggcagcagcagcagcagcaaagcgctcgcggttttgggtggctttttcgcgtttttttgacgatcgaccggggtttggggggtttggtcctgcaggctatgtagatagctatagtgttgtgtatctctcaacacagcactgtcaatgcgagtcccccacgagacgtactacctttggtggtcacactaacatgcatagctggtcatattgcaattgcaaacgacgacgactcatcctcatcatgtgagatgtgtccacaccgggtgtggtcatatgcgtgaaaatatcgtgaaatatcttggggtggtacggtgcaccgtgcatctagataagatgcatgaacttaattaagtgttctgctatcggtagggcgcgcggtaggccttcagctattataagccacggctaaatttaagtattttaatattattaaggtagagggtttattcgccgcttctttgttagtgattttactccctatgacttaaaaaagggcagcctacgagaggatgtgacatctcctatatttagattcgttgtactaggaggcctcgatcctatgtcgactctttttttttaaggacagatcgaggaacaaagaagcggctaaaagtagaagtataaaagtttgacgttaaaaagaacattttttactactgctttcgtttataaatagtagctcaaccaatttgatattttttactgtataaaaatttggacattaatagcaacatggatgcatgcatcagagctgtttagcgctggcggcttagtagccggaatttatggccaacatacatcgagaaaaggagtctacactctaaccctgctagtttcctgggaagtttgaaacgaacgaaacaaaaaaaaaatcatttcaacacaaagagctctcgacgaaaataggtctcctagctatatgatcaaagaggaaggaaagctttggctcttgctggggcaaagcacctttctaagttaattaaccttcttacatatgtatagtttttttttctagtttcaccctagcataggggatataaaactcttctatattatattcaatgaaattggtatagtctcgcgccggttcgtttaaaaaaattgacactcttttacttggaaattcatgttgttcatttgcctcactacacatttattcatcattagaatatgtatgcataattcttgaagacaacgatttgttcgtggtgagcttgtattatatatgtggagtgattttatggtctttaaggagctattataatttgtagtattaatctgtggtgccacctcttagtaccttgttattagataagtttaaaaactatacacttcttcttcttcttcttcttcttcttcttcttaaaatatgatatcttctttatcacggtaaaaacactctgttaattgtgtataacgggtaagacctcttttagaaaattgttttcctgttataaagtagttaattaaaatatattacgatttaggaagggaaaatcattttacaacttagtggcatgtatgtgtcctccttaattttatgcatacatccaaatggttagaaaatgttagaggtgcatgcctgcagaaaagtatgtaatggtgtaactctacaaacatgcatgtaaggccaaattcatctaaccaagttaatttttggttgcgtatattggagaattctaaaaagctggatttgatttatctttcccttgcatgtgtcgattgagtttagccattcatttttgcagtgataaattaaagaataatctgtattgtcaaaataaattatatttttttcacaattatgtagatcgtattaattatatgcacataactaagtcacccctctcatttggcttacatcgaaggaattaatcatgtatgtatatacactgacattatgtttggtactttggtgcactatatatgctgccccacatatgagccatgcaaggttagcttgctccactttcaataagagcagtcaattaaaggtgtggattagtggatacctttcatcagctagcatttctcattgtttacccagtataaattaaacatttctggcttatcatcacattggtatcaaaagcaggatatctcaagcatgaactgctccatgccctgatcccgttactatgttcaaaaattttaattggttcttagaaaaaaattataatcggaacgacgaacttcggtgtaggttcctgtgtacaaggtaaccgtgctttgaggaacaacaaatatttggtcaaaatttgtatatggcacaagccgataataacttcacaaaatctgtagccaatagcccaatagaaggaggctattgatgaatctaactcggtacgtaggagtagataccagctgaacagctgaaggtaatagcgaaaaaaaaaatcaaggctagtatgctgtactattctcttgtttcaggttttcctttttctgcccccaaagtagttggcaagtagtgaccaactgtgggcaagagttttgaaaaggaaaagaaaagggcagctttgttttcttgggctttacaaacgaagtgactatacgaagctgtgcaaataatactactactacttttagcatgcacaagaatcgatcgttttgttaaattaaaataaattaacaagcccaattgcagaacaggttttgccaataatcatcgatctgaaattagacatatgtatatcctcacctttacttacgctgttttagtagtccgtacgtacatgcttagtccctaagcatgatgctgctatccatctcccgttgaaggtgagattgttcatacccataattggcagatgtgctgttgcatcacaaaaggcgaagggagaaaacctttggggcgtattgtctttgtcgagtctgcatcccaggctgcgcagtgaacacttgccgctcatttcaaccgaggcttgtaacgcaatctgaatttgcatcttgctagttgatatgatcatcaggcgactgtcagctagctgtttcctggaggttccatccatgctatcctgtgctcgagatttatctgaaagaaaatgtcagcatgacatgagatgtgtatgatatgtagcatgcatgggtcaggagagaactatggcttatggaaaaccgcatgagaagctgggcacaaaatattgcaagaagttcttagaggcaagggcttttaaattttccagctatttgctagtgataattttaacag

SEQ ID NO: 8427 - DNA, 6908 bp, Oryza sativa
agcttgcgttgaatcgaacttgtacgcagcactgatgtaatgcatactcaggatgatgagattaaaccatgctattgctaaggaggatgtttttgtatgtgtagctaaagaggatttcgtttaagtttgacactgtgttgtgtgtgcgtttagaggcatcaatagcacaagaaatctgatcacaaggaaaagagatggattgatttgattcaaagaaaagtgaaatacatttttgaaaaaaaaaatatattcggttgccttcgctatactacaagaaggaaaaaagaaaagtaaaatacctgaacatattagctagtagcccacaagtatcacaatgcacacaccaaaaatgatcaaggatataatcactaaccaaaaaaaaaaagagaactgaaatacacctgtctctatctctatgttcagagcaggtaaagacggggcagcaagaggtgtgttcatcggtaatttttccttcaaaaattggttgtgtgatgttgacaattccctcggattctggtggaatgattttagcatgccaaacataattaggttgctagaggatagcaatagggaatgataacctgagataaaaaattaccttgtagtcatacaatgaggcactccaaaccactatctcaggagggtttcccgataggtatgatgcattagagagagatgattcaacactggccagaacattgcgcactctgtactcaacttcctcttctgtgaaaatgaggcccgcttgtacctgttatgctccatcaatgcatgcaatcaggagatctggatatgttagatggctagcagtgaaggtttgcataaactcttaagctcaattctcaacataaaccttgcatagtgacctcatttacaagcttgagaacaacatcttcagcatttcccaagcctatgagaagatcagactcctgagacttcaaaaccatcttaagatcttccaaagcaaaaagtagcagttccagcatcgtgtctgagtaacctgcaaaggataaaaaggctaatgttaaagccaactgccagtgtgattacttgcgattcttgcactacataatacagattacagtataatttcgcacgatgttacttgtatatgaatgttaacaccagattctaatacccatttccacagcataacttgataaaacacacctcgatctcatcccttccaattaaaaccttcatgatctgacacataccacataagtaaaggtgcaggtctcctcaagaagttgggactgaaaggcagttgttctttccatttactagcgtctattttaaggcaaaccatatgtttcacttttctgaatcagcagaaccagaaagtaccatcccgcactacaaccaatccacagcttacgctttgattcggcagccgaaaaaaccacgacttcggtttttactgcacatttctacaaaaccacgaatcctggcatcaaagctttgggctttggcagattataagatctgcgaatgcagaatctgggtgctgccgttgcagctacaggaaagcacaattgaagaggcataagaaaaagtaaatgatctactcgattcagagtaaatgtatttgaaaattactactagaacagagtatggttttaactaacaagcatcagaaattcagaatctacatacaaaatgtactaccaaaacagtgctagaactcaatatcaatagcgctacatgcttaattaagggcaatagcttttttttttcttgaaacaggatagtgtaccttagttgaagtcaaacaatatctcctaacctgcatataaacaaataaactcaaatatcaaattagctgcatacgatgagaaaaatggttgcggtccacattttgcacatcatctactgttttctttcaaaactgattgttacaacacaccagaaaataggtgttccttgcatccatgccacatgatatcatgtccaggtactccttgaatttatgtttgagcggtgctttattcctttcatcacttgcaacaaaaccacctcgacattatcctcatcactacaaacactcctgatcactgaactccaggtctcagcatgtggaaccatcccaagatcaagcattcgagtcatcatccctgcagcctcattaaccttcccaactgcacagcatcccttaatcactgaatgtaacacagagaaatgtggtagtaaccctttgcccaacatatcatcaaggtatgcctctgccttgtcatataatccactcacacacaacctattgaccaccgcagtatatgccaccgcatttggcgcgcacccactctccctcatatctctgaacaccttgcaggcatccagtggccgtccctcacggcacattccgacgatgaccgtgttgtaatgtacaatgtcaggtgagacctcacggcctcgcatgaggcacagcaagcggtaagcctctcgaagctgcttcttacggcagagcgcgttcagcacggtggtgtatgccagtgggtcagcagggatgcccctgtggagcatttcgtcgagcaggttggctgcagtgcggacctggcccctgcggcatagtgactgggtcaggatgcggtatgtctcggcgttgggagacacatggagggagcggaggcgatggaagagggagattgacacggcgaggtggccggagcgggcggcggcttcgatgagcaggttgtgcgaggcgaggacgagcggctcggggaggggaaggcgggtggagacgtcgcggaggaggtgcagcgcgcacgggaagtaggaagcggtggaagagagaacggagaggaggcggaggagaagctcggggtggagcggcaacgggctggggccggagacgaagagggagttgaaggtggagaggaagaggtgaggctgccggcggaggcggagcgcggagaggagcagcgggaggaggatccgcggggagggcggcgacgggaggcggcgcaggagcgcgagcgcgtgggggaggtgttcgcggcggcgggagaggcggagcgcgagcgcgtggagcgtcgacgggtggggcgcggtggtcggcgcggtgacggtgactagctcgagcgcgaggagcgggtccgactgggaggtcacgagcttgtgcagccgcgccggcgagatcggcggcggcgccggtggcgacgggagcatcggcgaggccgtgatggcgtgggctcgaactgggagacggggaccgaacgatgaagatgatcgtgtactggcgtaggctttggcccaacaaaacatgggcttggccccaaagtggagccttatagttaggagggctacttgttctctcgggccattcatatgggctctggaccatgtcttgaattctttgcggcctcgcacttcaacccaactacccaattagagcaagtacaatagcagactatcagtcacctataaatatattttaaagagataaaagataagagagaagaacagcgagctatatatctgtagccagttgcagcacaacctccaagacataatgtgtgtatgataggtgggatcatgcattaattgtatagtaagcaactattacataatgtgtgtatgataggtgggatcatgcattaattgtatagtaagcaactattacataatgtgtgtatgataggtgggatcatgcattaattctatagtaagcaactattgtataaattagctattaaattggctatagatgatttggagctagcagttggctatactattaaacttgctcatggagagtaggaagagagaacatggagtgaatagtgatgctggcttcaaatagtttcaactttcaaaacacccattttacacagaatttatgtttgttcgggagatagcgtacaggtgagagttcgtaatatctttttcaagacatcatatggtatctgaatttgattgatcacataagaaaatcagctagagcggcacatattttctattattatatagttgtaattcactcaatattaattattaaaaatgagctttcatatataagtggtgtacacacgtaaaacgataaaaccattaacgcatgattacttgagttttaattattaactagtaaaaatatcaagttttaattattatatacttaaaaattattttatattttataacttttatatagaaagtttccgtacaaagcacattgtttagtagttaaaaaaaatgtggtaacaaaatctaaggtataatttacatattaggcttagttcggcagcctgtattaacacatcttcctcatgttccgcgtgcacgatttttaaattgttatttcaaaatctatatgaaagttatttaaaatatcatattaatcgattaatcaaactgacagggccgtttcatggcctttccaaaggctctggtgattggcagcttgcgttgaatcgaacttgtacgcagcactgatgtaatgcatactcaggatgatgagattaaaccatgctattgctaaggaggatgtttttgtatgtgtagctaaacaggatttcgtttaagtttgacacggtgtgttgtgtgtgcatttagaggcttcaatagcacaagaaatctgatcacaaggaaaagagatggattgatttgattcaaagaaaagtgaaatacatttttgaaaaaaagattcggttgcattcgctatactataagagggaaaataaaagtaaaatacccgaacatattagctagtagcccacgagttttaaactgttcctacaattccacagcacattacgagtccaaacaggcagtacagtgaaaactatggagtttgttatggtatacaaattgggaaaagaaagaagctcaaaggaactcggcaatatctcaaaccacacatcatttttagccagaaaatttgacatgactaccctcaaaaaaaaaactgaagaacatacaccagaatgcatgcactccagttcagcgtttattgaacccctactacacccaaaaatttaacccaagcgaggcactcaggattccatggcctcaccatcaagaatacatctaaagaaattccttcgatggaaagttatattaattcattttgctggagaatagtttagtagggtgttagccactggcttgaaaaacaatttggaacagatgaaagaatgcacccaattggcatgaaatattagttcattttgtacttctatctatgtcgagccatataaaacaagactacaagagagtacaaatgtggcacgattagacattacttgcacgatggggtcaaaagtttgtatgattagatttagacaactcttgtaatgtagggttcaaggttgattttgagctaggtccataaacaaaaacagctttaagaaccaccagaaagttcatcaggagtgcgaattgcatctcatcttcttgtgccgacttgctatcaaacctgctcgatgctgtttttcctttcattcaacatatattgcatttcattttgaaattccagaaaatgatatgaagattaagagtaaataagtaatctacacatacaattctgtacagtgttcaatattcatctcctttttgccacctaagacatgaagcaaaaaaagtacagaagtgtcaacgggcacattgggatcaagttcttagaaaaaaatgcttccaacgatcaagttagtataatcgagaagtcagttaatggataaggttaccagacatctaagtaggatggaactccattgctggctaagcgccagtctctttgatccattcgcacagcaaggagttcacttcatcaggaacttcatcatgtggagcatgacctgacacatttcagtatgagaagaaaaaaactaacatcagtaacccctaacccctgaagacgttcatgaatgagaacttgcgcacaggagagagagagagattcacctgcatctagctctctaatatggaccttgctgcaatgctccctaagcatggaaacaaatgacttggattttgtaagtggatctttcattcccttgtttccccaaaaaaagcacatgaaggtagtattagctatccgcatgttgcagtaactaaattaggtaccggtatgaatccacaccatttttttatatcagaaaatacctgaacaattaagatttttccaccaaaagaatcaaataaaaagttgagaggaatggaaagattgaaactgaatatgctctcaataacggttgctgcgccaggatcatatgactgaatttgtctgtcaaggaaaaagaattgcaggctatactgcatatatcaacggttaagtctatgataaatatactttgtgatctgaggatacagctcttattatctcatccacaagtggcttgtcaacccgttcagttctctgcacaggaatttttcggtattgcttagtaaccatgtattatttaaatatttgaggaagcaataaccacatcatacacgtactgtaggatagtattccttaagaatgcctcctgctcttgacctcaagaagagcagaaggaggcgtgcctgcaaactggaaagccatgaagtccgtccttcctgtttgtatttttcattcagtagcattgagttaatttgtagcggaagtaatatagttccagtgctaaaaattcgatcctaaatagtacgatttatttttgctgctgtcagattatcattcccaaacactggttgatataagcacaaaagatatgtatctgaaacattaaattgttagccttatctatgctactattcagagttttaaatgctttaataattccaacaaactagaaataacatgcacattgcatttgaatgatacaacagtttctacaagagaggagcttgcgctaggttagccaaaaagaactgctgagattttagtgtgcatattttcaatcgtcctaagtctaaagtaacacgaaaatgtatga

SEQ ID NO: 8428 - DNA, 44413 bp, Oryza sativa
attcctgcagcccagatttgtctaagtaggatcgtaatcataaaatcgtatacataaaaatgataacatcattgattctacctactatatcgtagaatcagactccttaattacaaccataaagtcgtatgatatattttgacaaccatatatactcacgggtacccaagcgagctcgtgagtgttgaagcctgagcatgcacggtcaacataatcctaatcctaatcaccagggtgcaacttttttttttcgggaaaaacagggcattccattactcaggaataaaatcatcctttacaatttgtgatacagggtgcaccttttgatctagtgcctaatcctaatcacgacgatatgatggttttcgtcaaatttcggtcaaattaatttgttgttaaaaatttgaatccttgaaaacattccaaaattttactcggaatctgccttcgttctacgtcaaaacctaaaaattttacggttttcaatcagttacagatttttttttataaaaaaagaacctgaaccctgactgttactcgatcgtattggataaaggaggtggcagcgatataatgcatgcataaatgtgagttttttcactgaaaactacgggtactttgcagctcacccaccgtggaatcggggtaggcatacacaccacatacgacatccgtaatacgagcgagcgaggcttgcaactgcatgcaaatctcaaatccgcaacaacacaacacaacacaacacacgcgccgtgaccgtgaccgcgttgagcgcgcatgttaaccggaagcggccacgcggccggtgaatcaatcaatcgcgcgcccgtggccgtgggagctgaacctgatcgagcacgtataccgcacgcgaaacgtggatcggatcgcgacatgcccccggccggcggccgcgggcagcgtgcgggccaggcaggcgatcgcgagagagggcaaaccgtgccttctaagcatcacggaaatgaagcccacacgccggtgcatccacgtcgcctagctaaatttggcccggtgtcctctccagtttcctgacgacgactgcatcctggaactggaagtagtagtagtaaataaaatactcaaaattcaccggaattcacctccggattactactaaaatgcatctcaacccaagaaatcatctctatgtattaaaaaggaaaaaaaatacgaattacccttttaaactatagcggtcgatcgaattatccccctaaactcgaaaaccagacatcgttccccctaaactatgtataccggacgaataaccccccctgagcactgttttggatggtttttgacttgtgtctgcatacgtggccgccaacgtgacatccagtcagcaaaataaaaataaaaaaaatcttaggacccatatgtcatctctttcctccaccaatccctctcaaatcccatccccctggcccctgcctccctgcttgctctctctctctgcgtctatggctggaggaggagacggtggccgacggcggagacggatcgacgcgcagacatcggtgcacaaaccatcaccgaaggtggctgccgtgcttgtccaccacccccatcggcgacgttggcgagcctccgcgggagcatgaggcagagatgggggacaagcacgatgtccggtggaagcaaaggtggggcgcgtcgtacggtcacccgagctcgatggtaatgggggactcgcgccttgccagccggccaccaccacagcaagggtagagaggagagagatggcgcgtcgccgtgcgccggccggctgccgccgctcgctgcagcaggtgagggaggaggaggaagagaggggatggggattgagagagtagagagagattgagacgttagaggtgaaagagagagcggagagtcttacaggtggggcccacactgttttttaaaaaaaaaatgctgatcggactgccacgtagtactgaaaccaccccggattgagccgggggttatttacccggtttgtatagttaagggtgtaaaatatctgatattcgagtttagggggtaattcgatcgtccataatagtttaggggtaattcgtaaccgtggattatttaccggacggaattcacctctagattatttacggccgggctgcaaattctcgctcggagttgcatgaacgtctccgcctctgacgaatctgcactttctgcagccttccgccggcagctagcccgcctggcgtatcggagcagaatttttacagattttttgagacattgtggcgttttgaaacagttataactgcagtatatgtgattcacgttgggcctcaagattttcaattttcctttttaataagattgggtccccagattgaaggtatatatgatcatttcatatgggggttcttaagctgacccatcgatatacgattttgtctagcttatgtagattcttaaaagctcgttaccagctagctgtttctcatagcgttaaccttcacaaacatggcatacatatcgaaaacagaagcaaagaaacggatcgatgaagctttggcgctctcgttcatcctgtttggtcacgtgggctgtgggaacgggtgaggctagaacatgataaccacgagccaagtctcccattttcgtcttccaactatatgtcgcatggccgtatttgccaaacgtgacgaatgctccttcttcagttagaccgagaaaaattaagctagattccataactagcatcgatcgcttatgtgagtgtgtcagctgccttgcacgagctgatcagctcgcacgcatcgcggaggattcagtcaaaaatatgatcactcgcgcatatatacatgcatttcagaaagcacggatgcgcctagctcgcaagcaacagcgccgtgcagtagccttacaccatgtaattacacttggaatctagttctaccatgtaattacacttggaatctagttctataaaaaaaagaagttggaatcgtgtttggaacgatcactctgaagtttgatccactcagatcccccggaaaaaaaaatatctccatcatttgctttgtcaacgagttacttgaaatgttgagtacactgcgcggtgcaacgtacgtaacgcaaaattacaatcccaattaagcagacgcagtccccatatattgcatggtcaaaaccaaatgaagtccaagtctccactagattaattcgggccaatattaagtatcctgctgtatgtctttcggtagaaactctgcaaattacgatcaatatttagcccgtttcaagaggaaaatagttacagataagtaggtgtgtggtacgtatacgtatatatgtgtttagttcacatcgaaattggaagtttggttaaaattgaaacgacgtgacaaaaaaagttaaaagtttatatacgtaggaaagttttgatatgatgaaaaagttgaaagtttgaagaaaaaatatttggaactaacaaggccgtaaccgaatgtcaaatttgcatcaaaccacgctcctgtagcagagacgccacgtgcagcacggccaagcgttccattcctcccgtttccacccacgcgcgaacgccacaatttcccccgttttcctgggcgtttttccaccaccaccaccaccgccgcgagacgacacgagaggagggcgcggcgacgacgcgagcttccccgcgcgcgcacacaaccgcgacgtttcccgacccctcactccaccccccaccgcaccacgcgtgcacaccaacactaatacaacactcttcttctcacttaacccgctctctcttataatcaccaacctgcagcgagctgaactgactgagaagccaatccgcgaagctaccaaaccgagccaaaattttgatcgatcgatcggccggccggtgtctttgttgaggcgtgcaaggctcgtgctttcgccgagagggattaattagccgcgcctccagcatctccggcctccatagagatcccagcttataattaaagctgtcaagagtcgttttggttgttaggcttaaagttaactactgctggctagctaggactaagagatccgagggagcagacatggctgctgctacttcgaccatgtccctgcttcctcccatcacccagcagcagcggtggcacgccgccgactccctcgtcgtcctcgcctcccgctgccacaactctcgccgccgccgccgctgccgctacgtcgtgccggtacgtacatgcaccatcctctttcttctccggtgaatcaatggttggagaagaagaatccgaatgaaatgtaaattaaatatgtatgtggatgtggtggtgcagagggcgaggctgttcgggccggcgatcttcgaggcgtcgaagctgaaggtgctgttcctgggggtggacgaggagaagcaccagcacccggggaagctgccgcggacgtacacgctgacgcacagcgacgtgacggcgaggctgacgctggcggtgtcgcacaccatcaaccgggcgcagctgcaggggtggtacaacaagctgcagcgggacgaggtggtggcggagtggaagaaggtgcagggccacatgtcgctgcacgtccactgccacatctccggcggccacgtcctcctcgacctcatcgccggcctccgctactacatcttccgcaaggagctccccgtggtacgtacgtggcccctttcctcgtcgctcgctttactgatgctctcttcttctttcagacttggagaccacaagcttttttccttttttttttcccctttgctcttttcatttttgcaatcaagacgtactctgtgtcaatgtccctgagataattgatgggatccaataattcttgtctgctaaagcaggcaaatcccttgactttctagatctgattttagacactgttattagtggcaccaaaaactgatctccaacaagtaggggaaacaattttaatctctcagattggcatccatccatctgttacatatcaattaaatcgttataaaaaaaattaaaatatttgataatatagattcacatataatatgtaagtttaaattcgacttttataagttgtaataaatataaccaatcaaactctaattagtttactatgttcactgttaaatttgttacttttattataacttgtataagtcaaatgtcaaatttaaacttatatgtttgtggtgcaatatattatatgttaatctattttatcaactttttaagaatattatatactagtgaaattaatcaactgtgttcaaagttgcatgcccacttgacacgtgccaaacacgacttggaagttcagatgtgagaataaaaatcgaaatttttgaacagcttcctgaaattgattaattcgagcctaatcgcttgctttggttgaccgttgactcggcgcgtgttcggccaggttctgaaggcgttcgtccacggcgacggcaacctgttcagccggcacccggagctggaggaggccacggtgtgggtctacttccactccaacctcccacgcttcaaccgcgtcgagtgctggggcccgctccgcgacgccggagcgccgcccgaggaagacgacgccgtcgccgccgcggcggccgaggaggcggcggcggagcagatgcccgcggccggcgagtggccgcggcggtgcccggggcagtgcgactgctgcttcccgccatacagcctcatcccctggccgcaccagcacgacgtcgccgccgccgacggccagccgcagcagtgacggcggcgccgccgcgattcgtagattagcgaattcgtttggttgccatggtacacctacacgcatgcaatgtcgccaaatgacgctgcgtgctttgcgttaaattctttaattattcgtagtggcatttagctcagctcagctcagctctgcaattagcacatatttgattagctttagggaatgagtgtggtgagcttgtaaatagaagaacactagtagatggcaagcaaatggaaacgatcgatgatgcagtagatgttactgcaaaaatggcaattattagatgaagtcgacacacaaagacagatctcgtttcatttgtacattctacagtctacgtcgatgaggacatgactggatttgtatagcaaattagtactagcagctaataagtgtggattaattatgaaacacgattgtttaattatgcgcttggcgagtcatgcgattctttttcctgaaaaaaccgaacgaaccatggtgttcatgtcgcgatcagaattcagaacatgtcaagatagctctcgaatcttgccagactctgcaggagacgtacatgaggagaactgaactgaagaagtcgttgcaaggttggtaatctggcatgggtaaaaaatacgtgtgctctgaagcaaatacgtcaacggtagctttcaggcttgcgtgccggcttaattttgatgaagctgatcgatcgatcaccgcatgagttgatggattgaggtggtgtttgtatcagaaacttaactttagtctttttatttagacactaatttaaagtattaaatatagactacttacaaaactaattcaataaatgaaagctaatttatgagacaaattttttaaacctaattaatctataattagagaatgtttactgtagcatcacataggctaatcatggattaattatgctcaatagattcgtctcgtgaattagtccaagattatggatgggttttattaatagtctacatttaatatttataattagtgtccaaacatccgatgtgatatggaattaaaagtttaagttccatctaaatagggcctgaatgaaatggtttgagagataactttcggttttaattgcgtcattgctggaatctgcaactttgtctgcaaccgtgatgtggtgtatgatttctatggtgtgcttgatgatgcgtgtaactcttgcggtcttgcctctttctagtactgctataaaatgactcttatgctctctgtttttttccatcttttttctgaaagtaacctatggtggctctgtggtttcacatttaactagctttgttatacaccaaaaatatcgattgaccgagatagatatgcttggtacttctttataaagtgtttttgaatttaaattagtttcatgcttaagaatcattttaggtgaatttttacttgtcctcttaggaatcactaaaaaagaacccgggcaataacaaataactaagaacaactctaaaaactaactcgaaaattagaacctaaaatccaaagtggattataacactatatggagtcctcaagtttgatgcttatcacatacagctgattatcattaaactcctaacttctttttaaccaaaagtttatgatttgatcaactacgcggatgcatgatccaaacgaaaggtatgctcatcacggtccagataggcctcaaaattgcagcccacccagaataagtcactttctatcgagtttaaatcacatccctataccgcaatacaagaaatctcatcctcaacatgcaaaaccggtttaaattatgtatttgggctatatggatgatcggttttgctgacgtgacaagttgacctaatacattcatgctgactagcgtttacgtggcaaaaaagaaagaaacaaaacaaaagtggaacccacgtatcatcctccctcttctctcttcctcgtccatcatctccattttgttctctgtctcttccccttggtcctgtcgagcccgacccatcatccacacgcgccattgtttgttgccgaaaattgaaaaggaaaagaaggagaaaaaaagccgatatattgacagcaattaagagtattcatagtgtcacacactaaaaatatgctactcctgtacactgtggtagtgccacacagtcgctgaactccgatcagttcacgcaaagtcgccatgggttcgcacggcgacagcaccggcggcgtgtgtgaatgtgtcacggctgcgacgcaggcggcttcggcgagtgcgacggcggcgtgacggcctacctcgcccacaaatgggccgaaattcgcggcctattccaaacgaggccgtagacaatgcaggcccaaatagcccagcaccgactgcttcggctgctttcccctccttcccgttccaggcttcccctcctcccctctcaccacgccactcccctcctaccccactctcgtctcggagaaggcaacgtcgccctcgccgccgcggcggccggatccggcggatggcgaactcgaagcggctcccgtactccacggccggcggcggcgggggaggaggaggaggaggggggaggcgcggcggcgcctccggctccggcgtggtggcgccgctggtggtcctcgtgttcctcttcgtgctcgcgccgtcgatcttcttcgtcgcgcgcaatgggggccacgtccacgtcgcctcaggttccggtttgcaccccccctctcccccccccctgatgtagcatctagattttattattatttttttggtggggtggggactgggagtgatgtcttcaggtttggtaaatttcccagcgttggtctcatggatattgccggaatggaatccgagtagattttagtggtactgttgttaaatgcaattgatgagttgtatttacagggtatggtatgattttggatgagaactctgtatatagataattggatcatgatgctttgttttggaaacgcaaataatcaatctcactttggagaaatcatgagtttacagcagacaattgaagttgtgcttcaagtgattttggaaatcattttcccctctcttgtagtgtcacttgtgccattgcgaggttagaatgttagatgtgtgacattgtgcggaaagccccagctattaagaagctagggcgcacaagtgaattgtgggtgtaattctagtgccaaaagcccataaacaagaaaactgcatttataagaactgtaggaacattgtcaatgttttgtagtatttgaatactgctatactgatttgaaatatgtaagtgatgttgtattctgtttacctgcagatcccaaggatagggaaggtaatcaggtatttatcttttctgggagctagtcaattggtttactagcctaaattttgaggatccatctcactttaaagcttgcttgcaggaaacagattggcaaaaacaactggcaacaaacaacctgaaatctattttgtccaaggaggtcagaattgtcttgcgacttagtaatataatttcttatctttattttttggtttcatggaaatgtacaagggtacataacaacatgctcatctttgctatgctactaatttcgaaatgtcatgatctctgatttgtccttgcaactgattgccctttctctaaataccatgctactctctattgttccaagtagatttgcatgctgtgtcctctatctgctctgtaattctgttgcgaacattttgatttttcaattaccatctactgttatttgcataggaaactgtcatcttgttcagaagtatcctcgatttttctgtgcttttagtcttatgcataccttttggtctccagatgatcgatgctttagcttctagtcaacaagaagcaggcactttgagtgttgattttttcagaaaacgtgcatctccctcttggaaaactgatgatctagtcaatgacctgagcaatgctagtttggatgttgatgacaaggttaaatctgaaaacagttctgcagaacatgagttatcactgacagataaaacacccaaggatgatactggtataaaaataaccatgactttttttgaaaagcacatttcacacaatccgattaggtactcaagaaaatatacttcttttctgtgcagctgaacatcaagtcgatgcacctgcaaaaaatgctcgaagggtaagcatgctggtcttcttgtatgtacattgatacattgttgtttgtttctatcgatatccatttcttatgacctaatacttcccttgatatgttttggtcgctaaagaaactaagggagaaaaggcgtgaaaagagggcaatggatttggtaaggaaagatgatgaagcacgtgttaagctggagaatgctgctattgaacgatcaaaggctgtagattctgctgtccttgggaaatacagcatttggagaaaagagaatgagaatgagaactcagattcaacagttagattgatgagagaccagattatcatggcacgtgtttattctgtgcttgctaaatcaaagaacaagaatgatctttatcaagagctgcaaaccaggatcaaggaaagccagagggctgttggagaggctactgctgattctgaccttcatcataggtgttatatctgtgatctgatatcttatctattttcacttcatatctgatatcttatcttgttctccatcgtgacaaataatgtactttgcagtgcacctgagaaagtcagagtaatgggtcaacttctatccaaggctagagaagatgtgtatgattgcaaggcggttactcagagacttagagctatgcttcagtcagcagatgaacaagtcaggagcttgaagaagcagagtacatttcttagccagttggctgcgaagacaattccaaacagcattcattgtttgtcgatgcgcttaacaatagattactatctcctcccgttggagaaaaggaagttcccgaggagcgagaacttggaaaatccagagctctaccactatgcacttttctcagacaatgtcttggcagcatctgttgttgtgaactcaaccataatgaatgctaaggtagtttctgtcttcctctttaatcaaatgcaaactgtgataagtgataagtgttctgacaactatgtatggcataaccttttcaggagcctgagaagcatgttttccatcttgtgactgataagttgaactttggagccatgaacatgtggtttttgctgaacccacctgggaaggccaccatccatgttgagaacgtagatgaatttaagtggttgaactcatcgtactgtcctgttttacgacaacttgagtctgcagccatgaaagagtattatttcaaggctgaccgccccaccactctctctgcgggttcttcaaacctaaagtatcgtaaccccaagtacctctccatgctgaaccacttgagattttatctcccacaggtctatccaaagttggataagatacttttccttgatgatgacatagtcgtgcagaaagatttgacaggattatgggacgttgatcttaatgggaaggtcaatggtgcagtggagacctgtggggagagtttccatcgttttgacaagtaccttaacttttccaatccacatattgctcggaactttgatccaaatgcatgtggctgggcttatggaatgaacatctttgatctgaaggagtggaagaagaaagatatcactgggatctaccacaagtggcaaagcatggtgagactactactttcattattggatcacattgatttagagaagaaactgtaatgcaacatgatttagtctaacattattcttgctatttttcttctaacagaatgaagaccgggttctttggaagcttgggacgcttccacctggcctcttaaccttctacaagttgacgcatccccttgacaagtcgtggcatgtccttggattaggatacaacccaagcattgatcgctcagagatagataatgctgctgttgttcattacaacggtaacatgaagccatggctggagttagcaatgaccaagtacagaccatattggacaaggtatataaagtatgatcacccttacatccgtggatgcaacttggcggagtagatatgatgtaaaaagctgacggagaagatcacccagcctgatcagaggtgcttctattaagtggagtaaatacacggccggtgtcagttgttctgaaaaaaataaaatgcgttaacggtagctttcaggcttgcctgccggcttaattttgatgaacctgtcactggaactttctctccagctgatcgatcgatcaccgcatgagttgatggatcgaatggatggttgagagataattttcggttttaattgcgtcattgctggaatctgcaactttgtctgcaaccgtgatgtggggcgtcttttttctatggtgtgcttgggccctgtttttaagtccctatcacattggatgtttggacactaattataaatattaaacgtagactattaataaaaactcatcaataattttggactaattcacgagacgaatatattgagcctaattaatccatgattagcttatgtgatgctacagtaaacattctctaattatcaattaattaggtttaaaaaatttgtctcgcgaattagctttcatttattgaattagttttgtaagtagtctatattttatactctaaattagtgtctaaatataggactaaagtccctgatccaaacaccaccttgatgcgtgtaactcttgcttctttctactgctataaaacgactcttatgctctctgttttttccccttttgttttttctgaaagtaacctatgctatctctctagttgaaacttaactggcttgatatggaccaacatattgagtggccgagatggatctgcttggtactcctttagatttaaagcgttttttgaattcaaagtttgatttttgtaatttggggtagatttttttgattgcctgaaaatcattaaaagagatccaggcaataaaagtaatgaaaaccagccctaaaactaatcggagaaccactcactacatgtactcatctcgtccgatccattactccctatatttttaaatatgtaataatgctattaatttttagacatgatgttgagcaattcattttatttaaagatttattgcaataattgttaaagtacctttaatgataaaacatatcaaatacaaaataaatgttacctcctttgtttcatgctataagacgttttggcctctcgaccccacatctagattaactaacatctatatgaatttagacacgtatatgatgcacatatatggatccatgcataaatctattcgaaacccaaaatgtcttataatatgaaacaaaagaagtacttgcatagtattctaaataagacaaattgtgaaacattatatccaaaaattaaaaggtcaaggcgtcatatatttcaaaatggaggtcctatactattaaattcctaaactctaaggttaccaaagattttatgaactggttgacaaaataaaggatttatttggcagaactctagctcccaattttacgttggatttgaagtatgtatgttaaattgtattggtttcaaatattatatttagtctaaactaagaacaaaatgactaatctagatatttttgatgtaaccttagatttcgattcatgcatttgtggagctaaaaatacataactaaaaaaaaggaaatcttaaatccggagttgtgctaaatagggccaaataagttaattaaagtagagttcatttaacattggactaattatttttaccctagtttcaccacgaacccttaaccaatattttcacttttagaccacctcttttttttttaacctttgtttcatactagcccatacacataggtgggccttaatttggcccatctaaacggggccgtagacaaggcagaagcctagatggttttcaaaaaggcccaaatagcccaccatcggttgcctcacatcttcgggtgctttccccttcctttccaggcttcccctcaccacgccactccccccaccccactctcggcggaggaggcggagagggaagcgcgccgcgcgcgacgtacgtgcactctccggcgaggtggacccccgcggatcctacccttcgctggagatggcgaactcgaagcggctcccgtactccacggccggcggcggcggaggagggaggcgcggcgtggtggcgccgctggtggtcgtcgtgttcctcttcgttctcgcgccgtcgatcttcttcgtcgcgtgcaatgggggccacgtcggctcaggttccggtttgcatccccctcccccctcctgatgcgcggcgctgtcggttgttaatcgcatcctccgtcgcgaatgtagcatctagattgtttttttttttttaaggtgggggtggggactggggagtgatgtgttcaggtttggttagtttcccagcgttggtctgagggatattactcggaatggaatccgagtagatgtcagtggtttaggtactattgttaaattcaattgatgagttgtattagtaggcttggttatgattttggatagaaaacgtagataattggatcatgatgctctgttttggaaacaaaaaattaatccatcgcactttggaggaatcatgagtttacagcagacagttgaagttgtgattcaagtgattttggaaaccattttcctatctattgtagtgtcacttgtgcctttgctaggttagatgtgtgacattgtggggaaagccctagctattaagaatctagggtgcacaagtgaattgtggatgtaattgtagtgccaaaagcctataaacaagaaaactacatttattagaactgtaggaacattgtcaatgttttgtagtatttgaatactgttatactgatttgaaatagataagtgatgttgtagtttgtttacctgcagatcccatggatatggaaggtactcaggtatttttccattctgggagctagttaattgcttagcctaaattttgaggatccatctcacattaaagctttcttgcaggaaacagaatggcaaaaacagctgccaacgaacaacctgaaatctattttgtccaaggaggtcagaattgtctcgcgacttagtaatataatttcttatctttcttttttggtttcatggaaatgtacaagggtacataacaacgtgctcatctttgctatgctactaatttcgcaacgtcatcctctctgatttgtccttgcaactgattgccttttctctaaataccatgctactctctgttgttccaagtagatttgcatgctgtgtcccctatctgctctgtaattctgttgcggacattttgatttttcaattaccatctactgttatttgcataagaaactgtcttcttgttcagaagtatcctcaatttttctgttcttttagtcttatacatgccttctggtctccagatgtttgatgctttagcttctagtcaacaagaagcaggtgctttgagtgttgattttttcataaaacgtgcatctccctcttggaaaactgatgatctagtcaatgacctgagcaatgcgagtttggatattgatgacaaggttaaatctgcaaacagctctacagataaaacactcaaggatgatactggtacaaaaataaccatgcttttttttaaaaaaaagcacattttaaatttttacatcgtctgattaggtatgcaagaaaataaacttcttgtctgtgcagatgaacatcaagtcgacacggctgcaaaaaatgttcgaagggtaagaatgctgatcttcttgtatgtacattgatgcattgttatttgtttctatcgtatgcattatgacatcattcatcccttgatactgtttggtcactaaagaaactaagggagaaaaggcgtgaaaagagggcaatggatttgtaaggaaagatgatgaagcacgtgttaagctggagaatgctgctattgatcgatcaaagattctgctgtccttgggaaatacagcatttggagaaaggagaatgagaatgagaactcagatttgacagttagattgatgagagaccagattattatggcacgtgtttattctgtgcttgctaaatcaaagaacaagaatgatctttatcaagagctgcaaaccaggatcaaggaaagccagcgggctgttggagaggctactgctgattctgaccttcatcataggtttgtgcctattttcacgtcatatttttatatctcatcttgttctctatcatgacaaataatgtactttgcagtgcacctgagaaagtcagagtaatgggtcaacttctatccaaggctagagaagatgtgtatgattgcaaggcggttactcagagacttagagctatgcttcagtcagcagatgaacaagtcaggagcttgaagaagcagagtacatttcttagccagttggctgcgaagacaattccaaacagcattcattgtttgtcgatgcgcttaacaatagattactatctcctcccgttggagaaaaggaagttcccgaggagcgagaacttggaaaatccagagctctaccattatgcacttttctcagacaatgtcttggcagcatctgttgtgaactcaaccatcatgaatgctaaggtagtttcgtcttcctttttaatcaagtgcaaagtgtgataattgttctaacagctatctatggcataatcttttcaggagcctgagaagcatgttttccatcttgtgactgataagttgaactttggagccatgaacatgtggtttttgctgaaccctcctgggaaggccaccatccatgttgagaacgtagatgaatttaagtggttgaactcatcatactgtcctgttttacggcaacttgagtctgcagccatgaaagagtattatttcaaagctgaccgccccaccactctctctgcgggttcttcaaacctaaagtatcgtaaccccaagtacctctccatgctgaaccacttgagattttatctcccacaggtctatccaaagttggataagatatttttccttgatgatgacatagtcgtgcagaaagatttgacgggattatgggatgttgatcttaatgggaaggtcaccggtgcagtggagacctgtggggagagttttcatcgttttgacaagtatcttaacttttcaaatccacatatcgctcggaacttcgatccaaatgcatgtggctgggcatatggaatgaacatctttgatctgaacgagtggaagaagaaagatatcactgggatctaccacaggtggcaaaacatggtgagattactacttccatgattggatctcattgatttagagatgtcatgcaaaacgatttactctaacatcaatgttgctttttttttttttcttctaacagaacgaagaccgggttctttggaagcttgggacacttccacacggcctcttgaccttcttcaagttgacgcatccccttgacaagtcgtggcatgtcctcggattaggatacaacccaagcattgaccgctcagagatagataatgcagccgttgttgattacaacggtaacatgaagccatggctggagttggcaatgaccaagtatgaccaagtacagaccatattggacaaggtatataaagtatgatcacccttacatccgtggatgcaacttggccaagtagatgtgatgtaaagctgacggatatcacccagcctgatcagaagtgccccttctccctgcgaaacatgcttcgctcgatcaaagtatagtagctagagctggagctattgattgcccttctccctgtcttttttttttaaaaaaaaagctagatgttctcacgaacgtgtgttttaggcttacagtagttctttcgttcaattgatgatgtgctgttttgtttgaccatcgatattataaggagaaacctgttgattgtgtgtttagggtgggtgttgccatcgaaattgtcaggagtattgttggcaactgacattgccatatgtgtaagtgtggaactgtggatcaatgaaattctatcacgggatggatgggatgggattagatgatatctgacgacacgaagcaatgtactgctccctccgttgacgttataactttggtcaaagtttaagtttaaccaagttaagtactccctccgtcctataatatagggattttaagtttttacttgcactgtttaaccattcgtcttattcaaaaaaatttagaattattatttattttctttgtgacttactttattatccaaaatactttaagcacaacttttcgttttttatatttgcacaaattttttgaataagacaagtggtcaaatattataagtaaaaacttaaaatcccttatattatgggacagagggtgtagtactttctccacctactttcgatagtcatatttcatcttggcacacagatcaaggataagtaattttacttatcatccatttaaacatgctactagtcattccttgtaaacatgcgattcattaatatttacatttctcgattctcatgtagccaatcttacgtggaagaatagagtcatgcattaaatccgagaaagtcgttaaaatgataatttgttagattgaaatatgcctatcgaaaataaattttacagatttgaaaatatgactatcaaaagtagatggagggagtaatattttcaaccaagacaaatttattataaaaagatatttaattattgatttgatgaaactaatttagtattataaatattactatatttgatatataaacttagtcaaacttaaaatagtttgattttgactaaagttaaaacgtcaaataacgtgaaaaagagggagtattctactgttcggtgatcgtatttgcacacgaagcggcaagtatgtaaaatgcagaatctgaatttaactatcggcaacacgtgacactacggggatcaccgccgtcgaaattggggcgaggagtccaggaggaggtagtggcggcgagatcgccggatcaactgatcacgagatggagatggtgagcacactggtcatgattcgattcctcatgcttgattgataatgataccttaaacctagctttgatctttaccagttcgttggcctgacggtttgcatcattcttatttttggacaattaacagaaaaggtaacccaaaaacagtactaaattgcccattcgctcaaggtttctgggaggcaataggtttaagccctcgaattcaacatgtcagtgatatggccaatctgaaacctgatgggaatctgccccaatttcattacaaggtgttctatcttctatgtttctggtgcttgtggaatcatcggcatgatgttgttttcaggaacatgtccccgtctctgcagtcggtccttcgcgaatgtatggaggagagtggtctttggctagaacgcctcaaatttgagcatcgctctgtaatcaattcttggaagcttatcttttcggctccccttcaaattctgactaatgtgtaacaaactttgtagctctcctttataatggtaaattcaggtggggaatctcccccccccccccccccccggggtgacttatctaaaaaaaacagtactatcttcctgattaaggataaggaggtaattatgcacattttgtctctttttgttgtgttgttctctctggcctgcattagattatgacgggcaagctgactgacttcacaagtgcatatgcatataaatgcaggttgcaccataagaaaacctgaacctctgtttctttctctgcaggtgaggggaacaacatcgtcaacttgaagcaatttgttgcttgtctgtacgactgtaattatcacaagccttccatgaggctaattgaccattggatgtcacatctttgtgctattaacaaatggaagcggcacacgtcataagctgattaggtaatgttcttccctttgtttactgggtgagcctgcatttcatcatttcacttcatgagttgacgagctcagaaaaaaaaaataatcggccgactttctcaagatcttttgttggacaatcgaattaagccatttgatagaacaacaaaatataagaatgcagtttgaattgatcctctcatactgcagggctgctgccctgttccaaaaaaataataaaaaaaaagcttaagtctatctctgacctggtcgctacggttgtgcaatgtaagtctagtatgctgatgagcaagaatgtgattacctcaccttatgttgtaaaggctggtgcctggagtcctcaaaaatagctactttctgaggaaaattaggtaattttctaaataatctctatgaacatataagaaatgtcaattggaacttgtagggtgcctctggaaataccttttgtagttttgtgacaggtttggttctatgttggactagtggctagcactgtgatttactgattttgctcttggtgaggtaaaagtttaaaactggtataccctactatgcagaaatcgtcttcatacttttcaataggaaagggatacatctctttgccttttagagatgaacacagaagaaatccaaacaatatactgaatctgtcttcctattggaatgctgaattggtccctttactttatctatcattcttttttgaaaagacgcataagaatttgtgatctgcagttgtcttgtctagttcaaaatctctctgaatccattgtcatggaccacctcctgtctattagttcttccatagctacagtgtattccgtataacctttatatatcttttcaagtcagagactgaccgtatacgtatcctttgaaatcttcagtcttcaatctgtgtatagaatatacatttgtatgaaattaaattccattccgtgcacagctgccgttggtttttttaatttgtccttaataaaatggcccttctagataccacatcacatttgcacagcagggagggagtgaaatctccaaagtgagccaagcacgaggaggacaattttgtacgcgagcgaagcagacaagaactcaaacaagcaatcaaaggtagcatttcttctcaagcttccttcacctttggttcgtcttccaaatccacatcctgatcgatcgatcgaatttatcttcttccatcgtacttatttcagattattcttcatccgcatactgtcagcttggcccgcaggatccatcgattgctgtgaagaaatgatcaaccggtgcttctgctgcgtcaccggcggcgactctgatccggagccggctgccaccagtagtcgtcggaggtacgtattactgcagtaccatgcatgtagaagccatcagaattagttcttgatactttgatagcatcgatcggttgaggtgatcattcggtgtgatgtgttgtttgccatcggagagagagttcttgatagcaccgatcgatcggctgaggtgatcatttggtgtgacttgttaattaatttgggatggtaggacgaatccggcgagggcgtccaagaaccggacgagcgtggattacccatgggaaacgtacacgctcaaggagctcctgcaagcgaccggcaacttcagcgagagcaacaagctcggcgagggcggcttcggcaccgtctactggggacgcacctccaaaggcgtcgaggtgggttggatcatcgccgccgacgcgggcaggttgatggccgcggtgttcttttctttttttaacgactcgcactaggtgtgtgacggccgaggtgtgtgttcatggattgaggcgaattgatcgatagttctatcttgttcagattgcggtgaagcggctgaaggcgatgacggccaaggcggagatggagttcgccgtggaggtggagatcctcggccgcgtccgccacaggaacctgctgagcctccgcggcttctacgccggcggcgacgagcgcctcatcgtctatgactacatgcccaaccacagcctcctcacccacctgcaccctcaccgcggcaccccctcctcccaccaccacgtccccctcgagtggccccgccgcgtcgccatcgccgtcggcgccgccgaaggcctctcgtgagtcgtccacggccggcgcgccatgatcgagcatcaccgaggttgattgattaacctactatccattggcattgcaggtacttgcaccatgaggcgagcccgcacatcatccaccgcgacatcaaggcgagcaacgtgctgctcgacgcggagttcgtgcccaaggtggccgacttcgggttcgcgaagctgatcccggacggcgtgtcgcacctgacgacgcgggtgaaggggacgctcgggtacctggcgccggagtacgccatgtgggggaaggtctccgagagctgcgacgtctacagcttcggcgtcctcctgctggagctcgtcagcgcgcgccgcccgctggagaagctccccggcggcgtcaagcgcgagatcgtgcagtgggcggcgccgctggtggagcgccgcaggtgggagcgcctcgccgacccaaggctcgccgggcgcttcgacgccgcgcagctccgcgccgtggtggagacggccatgctgtgcacgcagagcagcgccgagagccgcccggcgatggccgaggtggtcgacatgctcaggttcagcggcggcgagaggcgcaccaaggagatcgtccccgtggcggcgacggtggccggcagcagcgacgagatcacgatgacgaccgaccaggacgacgtcaccgccggcagcagcgagccgctggacaggaggaactggaaattgacgaggttgaggtgatctgattgattgatcgaggtaacaccaactgggactaaagatcatttagggccgatagagttttaaaccgagaaaaaaatcatctatagtcccggtttctattcaaaccggaaatattgtggtttttagccaaccaagcaaagatggtttctccaataatgcataagcaaacatattattgcatgcgattaagacatacaaattgttggtatagctagcattttgtttgtgttaatttatacttgattagtgtagtaagcaattgattaatggtggagtcgggagggagaaatcaagtgagttttaattaatgttctaggcctgcaaagttttgtttgattgcaagatatgtttttcggtatttctcttgactttcattgttcgaaagatgcctgggctagcgttgttgtcactcctctattccgaatacctaggccgagtttattttcaaaatatttcttcaaacttctaacttttttatcacattaaaacttttctacacacaaacttccaacttttccgtcatatcgttctaattttaaacaaacttttaattttagcgtgaactaaacacacccttatttccggttttaaacgggctagatgaactttgaccgttactttttcccaccaacgtcaaattgaatatgttgaaatgtatggtgttatattaaagcacattcggtttattaaatccgattgtatacaactctattatctaataatattttaaaatattattggtcaaattcttaacaactcaaagttaaaactgataattattttaaaattgaaggagtattaatttgttatgtaattgttcagctaagatgtttattaatcgtctgtcccgtttaagttacaagaatttttagagaaaataaaccatttacttgaaaatgttcgattctgttaaattaaaattacaaagtgacaattgaatattacaagcgaaataaacgttaaacaattacaaggaggtaattaatccttgagctaaaaaaatacaatgggaaacgggcttctacggttacatcctcacacacaactcaactaggatataaatcttagttctctgaacacaccattttctcctttgaaatcatttttcttcaaaggagttgttggtagtaaggttgagtttaaatcaacttcctggttgggctattaccttgttttccataaccatgcttctcgatctactaaagatacttcattcgttgtgcaattacctttttttttatgtttcataatatagggtaagcatgcaactagcacctcctcatctaaattcgttttttagtccttcttcctcaagatttctaatatcattgggtgcatgcattatatgatccaaatatgaagatgataaaattattttttggtatttgtgttagtggtaattgtgccttatattttagaatagattttttaaaaaaaatattacagaaatttcttttaaaaaatcaaataaatctattttaaattttgtaatagttacttcattcatccaaatatatagcactatatgactagatggaatatatccttgtaataggatgtgtcctatccagtcataggttgctatatattgggacggcgtgagtaatactcaattaaccgtgcgttaattgttgttcccgttttgcctgttgcgaaaaaatattgtaattcagctatatcgaacaaaggccttaaggatgagtacatagaataataagatagtaaagccccatagggctccatttttgtctttcttttttgctccttggtagttgtgccatgtagtttgcaggtgcggaacctcctcgattgggtgacatgatttttttttgtctggtttcccacactggttgtgtcggtctcgccttgcatgtgcgccatgcacaccctgatcattttgtttctcgagtaaatgacgcatggtggtgtttatgaaaaaaaaactcattgtgtttgaacggaatagcggtgcacgtcctcccaccgactgacacccgttgcgtcttatacggaaaacccctcatctttctcagaaatacaacactgagaagggaaaattctgcttctagaggttgctctataaacataaaaaacacaagggtttttccgaaaaacaaccgcatttatcccctcttcttctccccacggcacgagagcgccgccatccgtcccctacggcatgggcgccgcgtgcattggagccaacgtcggcgctctccctacccccccccccccccctctccgccttccggcaattgggcctacggcagcggcggacctggcggcgagcgccagccgaacacaggcacccccgccgcacaggcaccggcaccatggcaacctttaccccacgccgcacggagtcggcggcagcagtgtggtttcggcgcgaaggagctagtagtactcaaaaagccacgcacggatatggaaaagagcataagagctcgtgtagtgtttatactgcaattttggacctatcactgaatgttattagcccgtgggctttttcacatccgacatactacggcccattagcagtttagcactcgtttatatcattttgcacttactgactgttgcaaaagcccacaaagatctaatcatttttcacttaaccaacggaacaggtgataagctttcttatttatatcatcatatatactactcctactcctatactggtactactatatcgatcgactgcatgctactacacatacgcaagcgtgttaaagatagagctcgtcagcaacaatacagtgatacactgcacatgtaccggttctcagtacttaattagtccaaaaaggcttgaaaaagagcacactaaaccttttgtagctaggataattaaaactggctgggtggcccgcgcaattatgcggctagcaccgatataaaattatctattttttaatatagttttacttagaattttgttaatagatatctcgttgtactttgaaaaaccaaaccttatcatccctgtgtttctaattttatatttttttaaagttatgtcagttgctactcctaaatattttgtcacccctcatttatttgcttcctcgatctaccactacttctatttgttctccctaaaacctctaaaaattagaccttatagtttttagagtttattgtctcgtttgggttttgtttttataatttttagaagtctcgtcaaatgcagccaccatactactctacggtcaatccactacctcttctctttattttcattgggatttaaaaatcaaacgtaattaccatttaggtttttttttactttctagaagttccaccaaactgtcagggactttaccactgtactcatgtacagctcacccgctgccccctctttattgtctccgagattttaaaattcaaacatgattatcattggggtttgtttttatttttactttttagaaatcccgccaaccgtcgtaaccatgctgcttaatgacacgtccatcgtccctccttttaatcatcattgggattctatttggggttttgtttatagtttttagatattccatcaaccgccaccactttaatcctttacatacatgttgattatcctatatttgttgtcatttgtcatctttttataatttttagaagttatgtcaaaccctgtcaccatacttctcttcggtctgtccactacctcttctctttattgtcattaggattttaaaaatcgaacatatttattattttggttcatattttagtttctataagtcccgccaaccgccatgactgggctgcttaacggcccatccgtcgtctctccttttaatcgtcattgggattctatttgaggttttgttattagtttttagatgtcctatcaaccgccaccattctacttctttataaacctgttgcttctcctctttattgttatttgtcatcatttgtgttctagatggagtttttttagaagtccatatttttcattccgatatttttatttataaattatatttctacttgaactcttataattatttttatatttacagaatttattattttgttattacaaattttagttaatctcgtcatatgttctagatggtctcttatttcaatagtttttactttttatgtcgaatttaagttatttataaactgtattcctagttgaactattatttttctttttctatttttggaatttattttaatttttatttagaattttagttaatatcgtattatgtcttatatgaattatttttttaatgtttttttattttcaattttatagttgtttcatcctactcgaactatcttttttatttatccaatttcagattttattttatttttattccgaattttagttaatctcgtattggattcttatatggactcttcatttaatattccttatttttaattccgaattccagttatttctagattttattcctatatggactcttctttttccaatttctgattttattttatttttattctgaattttaattaatcgcgtattggattcttatacgaactcttctttcaatattgcttatttgtaattccgaatttcagctatttttaaattatatttctacttggactcttattttctttttctccgattaatgtgggaatttctagcccccacagcgaacgtggtgctcgtcagcaacaatacagtgatacactgcacatgtaccggttctcagtacttaattagtccaaaaaggcttgaaaaagagcacactaaaccttttgtagctaggataattaagatgctatactatacccaaacaacaataataggaggcaggcagcgagagatcgatcgatcgagacgacgtcacggcaaatgtgtgcgacaggttcccgtcgtgatcaccgaattgggacccacatcgcaagttataataattaagatatgagactaaaccggccggccgactcactcgatcaaccgataatatgatcatctctctcgatcgctttttacgtgctatactttcggtgtcaacgattggagatatcgattcctccgtcgcgtctctgtcaatcgtagtactactgtgtactagtagtagctcttatagcaactagccgtaattgattttttttggccctgtttagtttaaaaaactttttaaaaaacatcacatcgaatctttagatatatgtatgaagtattaaatatagataaaaagaaaaactaattatacagtttacatgtaaatcgcgagacgaatcttttgaatctaattagtccatgattagccataagtactacagtaacccacatatactaatgattgcttaattaggttcaaaagattcgtctcgcggtttccagacgagttatgaaattagtttttttttattcgtgtgcgaaaactccttcagacattcagtcaaacgtttgacgtgacacctataaattttcatttcaccaactaataaacaggccttgttgatggtgtgcaaatactactatctgtctcgtctcgatcttgatttgtttctgctgtctctgtggcttgacttgctttctcggaagtaggcaggatacggccggctgctggagtggccacgatcgattcgttaatgcactcgttcttttctactgtagctactaccttcatcataaaatataatacctccatttcaaaatataaaaaactacgaatggtatatttccatattcgtaatattagaaattatctgattttatattcttatatttttgagacgaagtgagtagttaagatatagtagtagattttatctcgatttcgttagcgcgtttttaagctagcaagcagcattttttataaaaaaaattctatgcagtactatattaaataaatttatttttaagtttataataattaaatcttaattaatggtttttagttttacatgccttgattttatattcatcttaatttatcttaaacaccacctaaatggccaaaacgcggagctctaggttaattagcctgatgactgagttataatggatgagagcaagagaaatctctctgccgattgacgcaactgctgtggaccaagtagagtttgttgcctgcatctgcgtgttccttgtgcaggatatgtgttgtcttgtaaagtttctgtcatgcatgaagcgtcatgtcagggatggattgtgtctcccaggccggccccggcccagctcagctaacaagggtttcgcaacagacgagtactaattaatctgatccacgcatgagcacggtaaacgtggcaagctatataccacagatacttcgtctaattggtttctcgaccaactagcggattttctccccgctttgtttttaaaacttcaaaattatgttgatattcagctctaattagcttatgttttcacaaatatcaaaatcgtctagtgcaagtatatgtttatctcttcttaattctccagttaatttggttaatgttttcgccccctcttattttctacctctcttgtagcacataaatagagagatttcttttcttcaaaacaagattgattgtattgaatatgattaaaaacaacctaatattacattatagacaaaagtatatatagtatgcatgcactatattctcggagagtactcgtgaactatgctagctatatgcacacacagcaagaggaacactcgaataactaatgatcattcataccacttcagtggaaacaagaaagtgcatacggaaaagggctaacaaattaaagtagagagacgcacgtaaccaacaaacagtgttatttcttgtacaagcaaaaataacggtacgagaagtagtatatttcttgtacatggcatgcaggcgtacgtgtgcacgtacgtcctcccaatctcagttcgttgttcgagcagctggtagctttttccttcccagctttccgatgaatggaatggaatgggaatggaattgtgtgtggcgacaacgttgttgtttgatgcagagagatcccctcctcctccgtggagacatggccatgttattgttatggaaccctacccatgtactactagcagcattagtactgtttccgctttataaaaaggacacacgctgctagggccaaaaaatcaattccctctctacactatacgcgcagtgcacctacgctaaaaccactgttcacgtgcaatgcaaagcgtctcgcatcggcatcgcatcgctttttcccgcgcgcggcgccgcacgtacggcacgtgaaaaacagcggcacgcagcagcagcagtcgtcgtcgttacagttgcaggaggagtagtagtacgtgtccgcgtcgcggtggcgtgtcgtggtggacgtcgcgcgggacggcggcgtccgttgctttcaccgtaaatccgggcacacgtcccgacggctgctggtggtggtgttgctgcactgcagccgcggccgcgcacgccgcacgtacgtacgcactgtgcgcgcgacgacgcacgtatgttgggcccgtgagagcgagcgaagccgagaggccgagaggccgagaggagatcagccgcgacgagggcgacggcgcgcgctgcgtctccgtgtccgcggggcgcgcgcatcccggcatggccgcggacgacgggacgtggggggcgagggagaggagggcccacagacaggaagagaccggggggacgtggcacagcgggggaggcaagggaagcgggtcaactcggctcgcgcgggtacgtggagtacaggggcaggcgcagcagcgggcgcacggctcgaggagcacacacagcagcagcagcaggcagaggcagcggcaggcaggcttcgcttcattattggggcccggactttctcggcaggcaggcactgcagcggcgcccttcggatcctgttcccaactttttctgcgtcgatctcttccccctcctccccctccttcaatgcactgccgctgcatgcctttgcctttgcccttgctggtcctggaaaagaacaactctctcttctctctgtaaaaaaaaaaaacccacacactcttgttgccttgcaccaccacgtccctcccactacgtacatgacgctctccacagtgcttgcctcccgttacggtaacacggtactagtaacacgctgccttgccacaattcaccgaacaaaccggaacttcattgtggtaacattttttttgtgtgtgtgtatggagtagtatgggtgtaaaagccctgagcagtctgggggctctgcatgcactgcaccggccttcgcctactccggtctctgactcgagaatgaagtttggtctggttctggttcagatcggagacgatagagtaggaaataaataatggagttcccctctctgacgacggacgtaacgtactacgtgcatgctcaggccggcgaaaccttcaatgccaccatcgatcaaacgatcaacgcttgtcgtttcgatgagtgtgtgcgcagtgtacgtcgtgccgatcctgttctcgatcgggatccccattaaacgatcccatgggcgatcggtgctacagtgatccggggtccagcacagtgttcagaaaaccggtcaggatcggcacgcgcagtgaatggctcagtggcccccctctttatacgctactgctactccaagcattttgctaaaatggcaggggggcttgaatctcctcccatctccctccatcctgctgctgcatgccaacatccgggccaatctcggatctctacagaaacaaccgcagctttggtggggaatgagggtgaaattcgaccatcctgcatgtgtgctagatctcacaaggttagctgccaagtgttctcaaactgcggttgtcaaatgtcaaactacaagaaactaaattagccctgacaactaattgattagtactatatgagatattttcagttgctaatcgtgagtgtcaagtggttgattagttgatgaggttctttcggttgcttttcatgattggtttgattgtagattttcaactactgtattcgtcccaaaataaagatttttccctcttatactattgcatggataaataactcttatatttgatatacgtgtaatataatcaaattcatattatcgatttaatgggattaagttagaaatgcattcgtaaatcgaatgacttagcaagatggctcactatgaaaaagccaaagtggttttattcataattagcttattgagttgatatcattatacaagtgagtgaacgtactaacaaatctagctataggaaaaaaacattatgttaagcagaaaaacatatcttactaccgatataaaaatagaagttgatattagtattagatttgaaaaattaaataataaataaataccccatgaaaagtgtgcgaagggatacatgatgaagctccgggcctgtttagcacagctccagcaccaactccacctcttttagagctggagctcagccaaacagtttcagtttcaccaaaaatgggagcgaaactgggtgcagctctatcacaaaatgaactagagaggtggtgctgggtttaggcagatccacaactatatccactgtagatccaactccttgagctaaatttggagttggagctctaccaaaaagacctttcataagggcaagtacaataacaataaatcaccgtctaatactcccccttcccaaattgatcatcatatatatttatgcaccaagaccaaggataatttaaattgtatcaatcgagacaccatgcacacattctcccacaaggcatgcatcaattaaaaacaccatgccaattacaccttagcatgcacactttctccaatgttgcattagttgtattctgatgaaatctgtgtccatgtggttatatgatgatcaatttgaaaaattttgaattccattatatcatgatcaatttaagaaggagggagcagtaagcttacattggattttatacctagctggcggagagagagtactatgagagagatacgtcattggtccaatgctcctatcgttggcttagcgccttcatatatatcgacggttccgtcgactgaaaaagaaattagtgtgaatgggtttggctgattggcttggatgaaagagaaaagcgggaaagtggtgagagaaaaaataattaagcgatgatgatataaatgttgcgctagatgtgaagagacaagcattgtacttatcatatgttaagttgtttctaaatgacgtgtacatggattatagtaagcagtcggctcctctattgcccttgccctaagatatgtattcatggtgcaccggtggaaggttttattgttttgtatactgaagatcaccattggtgataggtcataaccccaaatgatgacttgaatctatctttctaggcattcaaccaaacagtgagacataaagataacccatttgtttaataaacaagcaaccaactagcgtgaaaataatcctaacatatacttaaatttagattttatggagcgtaacaaatcgatgttgataaaaattagtggcaccgatttaaaaataacgatcagtaataaaactacattttgacttatgatatatattactgcgtggtaagaattctatgattatatatctatataatatttcactccaatgtctcacggtggttttttcaccgtagagtagccccaacgaggatggtcctgtagtgtgtacccagcgtatgtgcccccatgggaaaatgacagagtgccactccggcgtgtagtttgcggtcaccactcaccaactgctgtcactcgcacgtccagtacagtacactgctagctagttgcccttaattatctccctgtcacgggggcatgcaatcaatcagctgcttaattaaaggcagatgatcgaaacacagctgagagaccctttaattgggccccccctttccgttaaagaaaataaaaagcagcagaaaactgccttgtcaacgatccacagacagacagacacacacacagagcacagaacctgtcttaacagtatctatatatgctaaataatccggttgatttgtcccactgaaacgtgcatatatacgatagatacgatacctcccggtctattccttctcccctgcaaaccggggtttggactggaccactcgatcgccactgcactgtcaatcgatccatcacaccactgtttcctgctaattaatccaatcgaccccaacacgacatggatttcagctacgtcacgcgtaatatatccccactcctgcattggcttggtatctcactatatatatctcctttaattcgcacgattaaccgagacgtgatgtgatgaccgagtacaataagtgggtgttttgcacggtggatgacggtgaaatcgagcgttttgggtgggggaaacatcagaaaacccgcgcgaaacagggggagatggggggagccgcgcgcggatgaccgtggagtaaagaaaagagcaagctcccgtgttctccggtgtttgactgctactcaggccggcgcgcgccgctccgtgccgcgtcgtcgcacacgaacgatccggcggtgtcggtgacaacgattcgagatgaattgacatgttgagactgaaccagacacactgtcaactaaacaaatcttcttcttcctttccaggatcttttctgcgatcgaagacgcgtatacgtatgggcgtggctagcttggctggctttgaatattactacgcactgactatggcgttggaagggaggcatggaataactgaattctggagcacgccaacatatgctctctcgctgcatgcatacggcgcgggcaattaactccaccccggggtcgcatgctgcatgcagctagtagcagtgcagtacagtacagtacagtacattccaaccagctaactgtattcagaacgagagagagagagagagagaggggtgaggcagccggcaactgtaccctgccttttcccctcgactctctttctctctctcgcagcagcagcagcagccgcgttgccgtgtgcgcgtgttggtggctggctacctctccaactcacgcgcacacacacacatctcttttcctctcggtgcgatacgaagcgagagcgagagagagagagagaggaggcaaaggcaataaatggaagcttaggtgagcgcaggctccatggcggcgtggcagggcctctctgtcgcctcaccgtcttaactcgcggcagcgcagcgagctgagctgagctgatccggccgccgcggattaactcctcctggccgcgcgtgctagctactagctagtggtctacacgatcgagagagaggtttcggtttcttgatcggttcttgatctgctgctgctgcttcgtggtcgtcgtcttcttcttcttcttcttcttcttcttcttcttccctagccgggggtacgtacggccgcctatggatttgggcgcatggcggggttccctctaggcggaggaagccacagccgagacaacccggcgccgcccgtcccgccggtgcaccccgccgacgccgcctcgttcctgtacgccacgaggggcgggagcttccagctatggcagcagcaggagcagcagccgttctacgcctccaacatcatccgcttcgccgatgacgcgcccccggcgccgtcgttggcgggggcgtcgtcctcgtcctcgtcgcgcgggatgcggtcgagcggcggcgggggcggtggcggcggcggcggcatcagctgccaggactgcggcaaccaggccaagaaggactgcacccacatgcgctgccgcacctgctgcaagagccggggcttcgcctgcgccacccacgtcaagtccacctgggtccccgccgccaagcgccgcgagcgccagcagcagctcgccgcgctcgccgcctccgccgccgccaccgccggcggcgccggcccatctcgcgaccccaccaaacgcccccgcgcgcgtccctccgccaccaccccgacgacctcctcaggtatatactagagcttagcttagccatggcgcgcgcgctgtatctaaccgcgttgatcgatctgctgggtgtgcaggagatcagcagatggtgacggtggcggagaggttcccgcgggaggtgagctcggaggcggtgttccggtgcgtgcggctggggccggtcgaccaggccgaggcggaggtcgcgtaccagacggccgtcagcatcggcggccacgtgttcaagggcatcctgcacgacgtcggccccgaagccctggcggtcgccggcggcggcggcgccagcgagtaccacttccgcctcaccggcgacgggtcctcgccgagcaccgccgcggccggcgaggcaggctccggcggcggcggcaacatcatcgtgtcatcggctgtggtgatggacccgtacccgacgcccgggccctacggcgcgttccccgccggcacgccattcttccacggccacccgcggccgtgaccggcgcccactccggtcgccggccggccgtccggccaacgtcgccgccatgctgtaacgccactacaatctctcactcgctgcaactgtcaattgctttggtcgatctcgatctcttgagaattcttagcttctgatctccctttgatatctcgttgcataaattgatgtgtcttcttctagagcctagcttagcttaaattaggcaggcgaaccctttagactcttgtttgcttctcttcttgggagccatttgatatgagcaattaatacactcgtttcctagcaagaatgattggaagcttcccaacagttaggagcttgggggaaagcaccctctctctttagcttaagcttagcttgatgatttccaccgtgcactgttcatcttcttccatcattcctgctgcttgattgaattgatactagtaattcttggtattggtgtactatactccatgtagaataaggctaataaggtttctttgcttttactactccatgttgtactccatgtagtatgtgagtactaacaccatgaagtatatgtgagatgtgagtactactagcttccataaggttgacaccttcgctttactatagcatgcacctttgctctcttgaaaagctgagccctagaaacctagttggctttaattggtagctcgtggatcctagatatcgcatcgtcttaagttaattggggtgtttgcgtttgtttatgcctgtgattatattactactagctagttgtagatgagagagagagagagagagagagagattcagtcatcgtatgctcatgggagagagagacaaagtgagtgagtgagagaggagacaaacgaaaggagcaaatgatcatctatctggtcgggagccgtgaccgatcgagccatgcgccgatcccttgcttgatttcgtgatgggttttttattgtttccgagttttacaattgcaaggggggtgagatgatgactcgcacattctcgtgttcttcatccgatcgatctctgacatatgaacattgtctcgttgatcccatcacatcaggcagcgaatatatatttgtttggccttttgtccatcatcctaggttgctagcgtacattgcctgggtttggtaactattgttgcacagggaattaacctattcaggcatgactttttttacactactttagcaaggaatgtactgctcttctgtttttaacaagaaataatattcaatttcatgcttcatctcacaatgccgataattaatgtctactttcaaaaaacaatatatatagttgaggtggtaaaatactacccggttattctattgtttgtggtcaaataaatcacataatataacttgtataaatttttaatgggcttccagcttgtttgtttttgtacatgtgatgttattggtttttcctgaagtatatgtaggaatccataacaaagctttgcaaaattttagaaatatcacatggtaaatatatatgacatgtttaggtaatatatgtaaacttttcttctactgcctattaatcatcttcatttatgttttctttttgcaatcagtggtggtgacatgatatttaatagtaatgtgtttgattctgtattgttagctagtactgaatggttatttatagcttgtcatactgaatatatatcatcacttcgcaaagcacattgtacatgtatttatgtggcaaagatacacaagtagttaagctcattcactgaaacactagtaaaaataaaaacttactactagttttttttgaaaccgtaaaacttactactagtggtgctcgtctagattcatagtcagattttttatttttttggacggagagtgtaaggtgtagacttcatttcggctcacattaagtctcctgtacgttattagactaatctggttagtagtgtatatatatacatatatatgttcgattcatgtgtagtatgtctaaaaaacacatgatcagagtaatctgattagtagtagtagttctcctttgcgtttatgctgtaattcatccaaaaattaatggcccatatatctagaatatataatacctatttgccagctatatatatatatatgcaattttaaagctcatttgtcaaatacaatatgctgaactatattgattttttatgtcttcgacagttgccggttgcttacaccagtactagtatatgttcccattgcatcattttacggcggtgtatctgttagtccatttgagattcttgcgtgctccacaaagaaagcaacctgggctgtcattctaatccgcttctagctttatgctactgtgtcaatgagaagattctgccaaacagaaatgattgcatgcattttcatatatagtatattattcgttctcgacgcttataaattaaattaaggttgttaatcaatatctctatttgtcgttgaatgcatgtgcatcctggtaagtgcctcttcgaacactgggaattttatgctataatttacacattgctagttttatataggactatttgagttcagtgtgagggatactctttagacaagattatgggcggaaattacaattaattaattaattcttagacaattataaattcttgctttggcattgacaactggttctgctttcaccttgcaaactttttacccctagacaattaaaagtaattactgccacacgtttgtacgtgctaatgtctaaaattgttactccattccaaaatatagtaatttaattagaatgaaattagacctatcctattgctactactatgaatcaggatatagtattatgattggtttaatcgatcacatcctagattactatattttttattactatattttttaaacggaattatttggaccttggtagattactatagttgtgtgctggtcgcataatttcctgctcctacgttgtttgttcatttcaacttattttttcacgggcgcatatagtgtgcttggagggcttcttttatgcggttaataagctcaagacgtgtgaccgatgtagcgtgagactgaatttcttttcttagttccattcttttcaactagtttgtcggatctttgccatggaatatccgctcaactcatctaaaaatacattttttttaaaaaaataacttttctaccacattatattgttcataccacatgttctaagctactagatttatctaagtagatcatccgtggcaataatccaataagcagtatgtctgttttgaaattaagttgtaaatttcaaaattagttgcaacttaaacaatctaccaccaccaccaataaccaggatcctgatctctcttatgaacgtgaaagtgggcaaggagcatctcgtactccctagctagctatagctatcgtaagacaaatctttgctttgggcaaatatatcctcggttatgattaataactaaaaatatgctctggatgatctcttggcaccagagaccggctgcatcttgatctcacaattaactcctcagtctctttcggaacaaattcgcgtctcagttcatttaacactcaccgatcacggctcgctcccgatcccaatggaccactgcttgcggccggctgcagagattagattgatcgtaacatgcaaaacttgtgagaaggcaccaaccacaatgtgtgtgtgcccataattagggcatgccaagtctaccactgtacaatgtgtacaccaactctagctagctgcctctaggttgatctcttgaccggccagtcgaatatgaatggataggagaggatacactcagcgttcaccaaactatggttccctatggttatcacggttaccacgagttatactatggtttttaaaaattgagaaagttaccgtacatgataaccacgataaccgcatggttttgtataccctggatactctatgcctaaaaagtgttactgatagagtaattctcagttcataatggttgatcccactcagtttttctctttttcgcaattgttttttactcttggaaatatttacacgtggttgactattatgcaagagtagctcgatagtctgctagcttatgagaatctagactatctggaagagttggagatttagaatatagctgacagaagctccccgaacaaggtttaaactgcagctgccactcatttaattcatacttctctagtcgtttgttgtgtgccactataagatgagctaggattattttgaataggaacttcgaatgattagaacttctacaaattcgaaaggtgtcctaaggcctgcccataaaacatgggtttgtttcaatattcttgaggaaattgaattgtccctataaattccatgtgattaggacattgcattccatgttaattaatcctatatgttggactacctaggacaaaaggttttcttccctatttgagaggcatatagctcctcgtcgcttgggaaatatctctctttaaagagaagtaccaaaactaattccagaagtaactaggattaaaatttcaccacgcagtatctatacctgagttttcatgatccaagaggcgtagttttttttattgttaattaggagatactctctttattccataaaaaaacaaatctagtattagatgtgacacataacctatgtccagattcattacactagaatatgtcacatccagtactagattcatttttattgtgacagagggagtttagcctacgagatatctaacttttcaagggtcagaaaaaatttgtttaagttatttcaatcaatttattttttttacctctaaagctgtggtgagatatagaacagttgggaacttggaatccttggtattcctggatgagaagttagccgcgagccaatgaatctgaagcgaaagaaaacaaggaaatgtgacgattgcgtggtgatggatgcaagcacctgcagctatcttggtgactgaaagtggggcctgggacaaagtggtcagtgtgagaggacaaaagaacagtatctgcttgtcacctttttatttgctctagtggtctctcaatggaaggatgggatgaaaactctttgcaaatgattacactcatggttgatacactgctgagggaataggaaaaatatgagacatgacagattctaaagcaaatgtgcatggtagtcctgcttgccctctcttcagtcatcaccttcttttccttggccatagaagcagctgatagctacaagtggtgcctccttttgttttctttctcctcacatggactagtaacaacaccgcgttactctctccgtctcgaaataagttcacttctatacatgaatatgaacatagccgagacagtaataagcttaatagtcatacacacactcacacaccagtagtacccttgttccaagatagaaaatcattgtcaacacatggaggatagcacatgaaaaagcagtgtactaccctccttttctgccctagccatagtgttcactactgttccccacccatctctctctctcccctctgtgccgttaatgttcttgctctcatgataactgtgaaatgaaaatcacaaggaaaaaagggaggagagagagagagagagagagaaagaaaaaacttgtctcatggatggatggtgcaggctaagagttgtagggctcttcatggggaatccttagagtggggaagacgagagagaggaggcaatggtcccatgaagtacgtgcatcgagttgttggcgttggcgcgcgcgcgcgaggtagagatgagcgggtcacgtgctgctcatccactgcaaaaaatgccaaattcttcagaaccgttagccctgatcttgatccagcttgtgggaatcactgtgcatgagctatctcacttgcccaagataatcacagtctcacacagcttctaaaacagcatggactctgacacaaagaaagttagtattaactgaaggcgaaatagacgcaacgcaatagattcgattacccaaggcacggaaccaattgtacctaacttaaaccgacttatagaatcagtatcgggagtgggtatataaagaatcgagaatacagaaaacattgtagtctaacattaacgaccttggtcgagctaagccgagccatgtacgtagtgtattgtacttggagtttaggagcttaacagttgacactgcatgtctgaacttttctgaactgttgcaaatagtacttgcgccacacagtttcaaaacaatgttcatgtttcaactcgatcctaccagatctctttgcaagcagtagtacagaagtttggtgagagtccacatggctaacaccgtctagccctagctaactacggacgtatagattcagagacatggggaaaaaaattcagacagcttgctgctatacctagcctggtccagcgacggcaaacggcccaattaagctctgcaagaagcgagattgatggatgaacaataattaatggctgcttcttgtgcctgccatgcctcacacgtcacggatcagacgaacatcaacatggacactactagctggtggtaattcctttggatggaaggaaaagatgctaatgatcagatgaactctcatgatcctccaatgcagaaagggcccagccaatgcatgcacacatgatgaattcttgcagcatttagaatgtctgatcatggcataaaccacagcaattgcacatttgtactgcaatccagcagaactgttcatcctgctagatacaaaaaaaaaagagtggcaattggggggccaatcatctttatgcagcagcaggagcaattccttttctctgtgtatgagctagatagagcatctatccactttctgaacactcttttcccctggctgtgcatgagaggaagaaagaaaagagagaaatcaaaaggttggtttggcttagctaggtcttagggatcctttaatttgttctttgcttccacacaaaaagctccattggttagcttggtctctctcaccctgtgcaaacttttcttcccatttatatgcgacccagagattgctagcccactttgctccatggctcgcccaagatcgcccgtatctttagggctcgagggctccattgctagccacttcatccagtgtagcaaaagccatggctaagcttagcttcttctctctcgatctttacccacgtctcgctgttgcctttgttttgacagaaaggagagcaaagctgatgtctccctgatgatttgatccgaagaagaagctctgaatgatacggatttactatatacacgtaccaaacgcctagtacgcgatatcatgcatgcatgatgcaaacaccaactaggtagctttccccatgcaactcagctcagttagctcgagctcgccttcccgggaatccatggccgcttttgcatgctaccggagacaagccctcgtttttaagtccacgtcacctttgcttttgcttctgcaggttgttgccttgtgaactccaaagaagaagaagggaaaaaaaaagttgatctgtccatgaagagaccttacctgttgttggactagcacagtaacacatctgaaactctgaattctgaatcatgtgaactctgaatttcacttgtcgatattatctcacagaacaaaatttgcgaggattatttagctgttctgttcaggcataggggagtatacatgtacagttaaagagttgacctgaattaagggggggaaatgactaggtgatggacctgtcctggctattgtttctgtcagttgttagctaggatggagccggcaagctcctgcattgagttaactttcgatcacatcgatccctttcctcaggccaaatcgtacaagaagaatttattcgatgggccttttgctctgtacatatagctggaatataatcctccttaccctttaatcccatgcaactactctttctacgttgccacttcttccatctgaatcaaacctatatctgatagcaatagcatgttctttctttcttcctatcttcagagttcaggctgttgtacttaatttgtgggttaattcagctcttggataattacaggattacgaaatgatccacacattgaccatgttctccaagctagataggaaagaatcatggcaccatgttctgatggcctgagttgtgacatcagggatgatcatgatgtggagcagatacgcctggagagtaagtgccaaacagccttggtacaaaagcttggagctaaaggaaagcgaagagaaggggataaatatactactcatggtgtcgccctatgatcgattattccaagcttttgcctctccctccccttgcatatgat

SEQ ID NO: 8429 - DNA, 1088 bp, Oryza sativa
cctttaggaaacgtcttcctgtcacgtctctcttcactcttccagcgacatctaggtagacgtttgaaaccagatttcttggcgagccttcggctaaaacgattcctgtagcgtgcagttaacttatgtatgacagctgtcaccagaagatcattgtcgtcaaacttgcatttatgccgcgatgatgccttttgccgtttgacatcttttttggtagttttttctggcacaatcttttctgctgacccaatgcgtactctggcttgatcattgtcactattttttatgggaacttgctgattcatgtcattgctatttccaggcaacaagtttaatgaaacctgctcagtgcttgctgaacctatctgttctttatcattgctaattaaacagccagcaggattctcagttgtatggtccatatattgaccaattgcgcagtaacttacaggaacatcatttaccttctgtttcttttgactgcctttgtcttcaatatttgcagctttcttggaccttttccgattgtttttgctcgagtctaattttgacgtttgcttcggtccagaagttaacatcccacactccatgttcatttcaccatgaagttcagatgcctttgagattggttcagaacagatcaactgcctaggaggttctgggtttaggaccgtccaacaaattggagaaccctcattgtcaaggtataggaatccccgaatcaaacttgcttcatatactgaggattggatgcctagctgcacgttagtccccatggtgccatttgaagcattgaggcaactccgcatctcttggctgcacatactatcattcatgaaagaaagggttccatcatgaggggacacaaacaataactgtggctccgatatcaccatcgcattgttggtgccttcacatgataactgccctccttttgtcatctcttctgagctcatctcattaccttccaaaactgtatccatcgttggtagaaatgacagtgcaccagcaggtctatccatcacatctgtatttgccaattgggactcagcgacaactccatcatcatgctgttcgggctgcaggaa

SEQ ID NO: 8430 - DNA, 2184 bp, Oryza sativa
ccacaactccactccaaactcaacttctgaagttatatttagtagttgaagctgtaccaaacatgcccttaatttagaaaaggggccttactctatactcctacttcaggattagcatccaaccaattgggtattcggaatctgtccatgagtacatgtacatccatatatcgatcatggatgagacttgatgagatgagatcatacgggatgacgatattaatggcgttatcgctgggtagtagtaataggtcaggaagatggatgcatagagtttagcattgtacagtaccggggcagcgaaaaatctgtacgtgtcacggatatcctcctctctttattactcctctgccattaagcactgtagcaacatgcaccatcgatccatcgccctttgcttgcccccacggcgacggtgccctccctcccctgattgattgcacgggtaagcatcgtgtgatcagcttcaatggcggaacgtgacagcgcgcgcggctcattagcactctctgtagtagtaccaaacaccacattgcatgcaaaaaaatttccaacaaatgaagttaaaattgggtatattgggcttatttcgtttggagccaatttttaccctaccaaactggtagtgccaaaacattggtaaattttggcactatcaaattgagtagtattcaatttgaactattgtgggtagaatttggtagcaaaccaaacattcacttgctactattgaagttaccaaaattttggtaaggtaataaattggaaccaaaccaaacaggcccattatcgtctgaacgttaacttatcagatactccctctgtctcataatatagcaactttggaccaaatgtcccgtccaaattcgtatgtactataaaatatcacatttggtattagattattatattataggacgaaagaagtatgacccaaacataaattacactcgttaaaagggtcctcatcgtttgttcgttagcttatatgcctagaataacgaaattttaaagtttattacgagggattttcattatccatttattagcgttagctttttaaaccagttagtattatttttatcgtaaaatttaaatcgagagcgctctcgatttagtcataatgagcgaccctatcatccaatcaaccgttgtccagatatgtcttgaagaatcttactttactatagtactaattgatcaagcaagtagaacaaatattcctatcatctatgcttcaaataaaattttctcttaaattactcatccgatttacaatccgatttgacggagcgtggggcccctcaccggaagaccgcgcaggcccccctttgccggttcggccggggactcagggtgagattctaagctctctgtatgtggaaggttcgcgagacaggaaacacacaagacacgggcgatgtatacaggttcgggccgctgagaagcgtaataccctactcctgtgtttttgggagatctgtgtatgaaggagctacaaagtatgagccagcctctcccttgttctgggttcctaatctggaaaagttcagtcttctttatctaagtgggcaaggtcctccttttatatcttaaggggataccacatgcaccatttctctcttttttgtggggacttcccccaccttttcataaatggacggagatttgtatagttgccgtccgagtcaccttctgatgagacggcccacaactacctccactttcgccgggagcagatgcgacgtggaatcgtggctgtctgctgacgacatgaccggtgtcagaccagtcacgtcggtcattcttgtccaccacgtgtcagcttagcaatctacatgttcgcccttcttcacacaacatcttgcctgtaatggttaggatgaagcctggcatatatctgaccaggactaacgtgccatctctgggaggtaacacgctagctccagctggggacgagcgcctagaagccctcgtcctgacgggatggggcgaggcgtgcgtcagatcgcctgtcgccacctaacccgcgatctgaccggtctgtgactggtcacagaccggataaatgagtgcactgcactgcgttacatgcggcgtgacacgctcagccgaaacgcaataaatgtggttaggtgagccccgccgtcttacctaacccatacacgctgagcaaaataccca

SEQ ID NO: 8431 - DNA, 39799 bp, Oryza sativa
ccgacccctcggggagacaaagagaagggcggccgtatcaccctcgggcccgacccccccgagggggttaggccacgtgggtgatcgcgtctgcctcaagtctctaagtcatgatactcccggtcccatgtcaccgacacgattacaccattgtgtttgtaacaattaaatctttacaacaagatctcacatgattatattttgataaaaaatcacaaattacttttataatatatctaaattacttttagatttcactaagttacttcttaaatatataaaagtaaattcaataaagttttaaagtaattaacataaattatagaagttattttctttttttataagttacttctataatatatgtaaattacttttaggttatattgaattacttttatatgtctaagaagtaacttagtgaaatctaaaagtaatttagatatattacaaatgtgatatatattttttcatcaaaatataatcatgtgagatcttgttataatgatttaattgtatgaacacaacggtgtaatctgattgtagatcggatgactagtttaagagaaaattgtatttgaattataggtggatagtgtttatcatagatggagtggtagataaaccagctaccattagatgtctagcaatgtcctatttttattgctttgttcatttatctatattacatgggctcgaaccgcagaagatcaggaggctaggaaaaatctccaccgtcgggccatccgatcgcgtcatctgggccatccgtgcgaggcgcacctgatcggatcagacacgccgcacggcgactacacggccacgtggcggggcccagcaattagaaagtacagtgagtttttctttttctttctaccggggggcccaatgcggggtcgacacgtgaacactgcttaccgcctccctcccccgtctggtcccgtcaagcgtggccgaaacccgagctcacgtggcatttgggcactgcattttgagagagtggcaaatagtaaattctcccagctcacgtggcggcgtggcgtggcgcgtcgcgtctgcaggggaccgggagccgtcgcctcccgaccggcacgtggcgcctactctgctgcctcaggcaagacaacccagcgatttaactaccgcatcatatcatcagcaaagttaatcacagtacagtaattagtactacaaggtgtgctccctccctccacaaatataattagaagtatcgtttaggttttctttaagggccctttgaataaaggaattacgaaggaactattgaaatcctataggaaatcttcatatatagctcttttgattcaaagattgaagttttctaaatcctacagaatttctatagaatattttgttgcatataggttttggaggaaacttagtaagaggttgtccaacctcttagtaaaaatcctctgagtctatctctcttatccgattcctgtgttttttctgtggtctaatctaacgatcattcatgtgttttgcaatcctctgttttaaacttacattcttgtcataattctatgtttttactattcctccgtttttttatacctacgattcaaaagggccctaaattaagaaagaaagagaagatctcatacagtactccctccctcccttgatataaagggattttgatattttgtttgcactatttgaccattcgtaatctttaaaaaaaattagaattattatttattttatttgtgacttattttattatctaaaatactttaaacatagtttttttgtttttatatttgcataatttttaaataagatgagtggttaaacagtgtaagtaaaatattaaaatgggagagaggttgtactagttaccccataaaacatgtgctagtgctacgtagtactagtatcaactatcaagttcggattaaccgaaccaatacaaccactcaaaagtagtgtagtggagtacagtaactatagaggagtattacttactaaatgagtggtggttggtccgtgataatagtactaaatgtgtataattaatacatacaaataaaaatgcatatactgggtcagttctctttgacagttcactgctgtctctagctcgtaccggctcagttcattagggtgaaactgttttgccgctttgtccaaactggggtcacattaactaaccgactataactgatcactgtattaattataatcagtcacacacacacccctcacaccagccgtgtccacgcgcgcgcataaaagctccccctcctctctgctcgtcccggtcgctgccgctatcaacaccaacaaacaccgcgcctcgcctcgtctcctccgatagcgacgccgccgccgccgccgccaccgacgccgggagtgacagcgagtgagatcgtcatgatggatcacctgagcctggtgccctacgagggcggcagcgccggcgggggaggaggtggagggaagtacaaggagtgcatgcggaaccacgcggcggcgatgggcgggcaggcgttcgacgggtgcggggagtacatgccggcgtcgcccgactcgctcaagtgcgccgcgtgcggctgccaccgcagcttccaccgccgcgccgccgcgggcatcggcggcgggccggtgttcttccgcccgccgccaccgccgcagccgcactcgcaccacgccgcgctgcagggcttcctcccgtcgtccgtgccggcgccggcgccgccgccgcagctcgcgctgccgtaccacgccgtgcccgccgcggcgtggcaccacgcggcggcggcggcggcaggccgcgccggctcggagacgcccccgcggatggacgacttcggccccggcagcgccggcgggagcgggagcggcggcggcggcatcttcgggcggaagcggttccggaccaagttcacgccggagcagaaggagcggatgcgggagttcgccgagaagcaagggtggcgcatcaaccgcaacgacgacggcgccctggaccgcttctgcgtcgagatcggcgtcaagcgccacgtcctcaaggtctggatgcacaaccacaagaaccagctcgcctcctccccgacctccgccgccgccgccgccgccggcgtcatgaaccccggcgccggcatcggcctcggcaccggcctcggcaccggcatcagcggcgacggcgacggcgacgacgacgacaccgacgactccccgccccgcgccgccgtgtcctccccctccccttcaccgatcagcgtctagctagacagccagacacactgtcactggcacacactagcttagccttagcctagcttagcttagctagctaatgagttcacttaatcactagggtttaattagctctaattcaactagcaatatcccatggattaattagccgctagtcgctcagttccgcgttaattaattaatgacccacttccctcctgccccccgcaccgcggccgtggtaagctaatggaggtcatatctgtaatttctccccccactagtactactctgctgtagtagtagtagctgctgctgcactgtctcatctcattttcagtcgtagtaccactgattgcattgcagtgactaatcatcgtatcctagctcattaaacagcatcggccacggcagtgagagtgagtgagagtgcatcggtcgcgcgttggggttggtgcgtgtgcctccactactgcaggaagcttccatttgcttcggcctgggcgcgagatttttttcttccccgagatttggctctcaccaacgtcgtgtcggtacagtagtgctgaggtttttgttggcatttggcggaggataatgcgacggccaaggcggaggcgacagcgcggcggcggcggtggagccagctgggggatcgaacggctcgctcgggtgcacggctccccacgtcgcgtcgcgtccgctagcgtgagcagcgtctcgtctcgttctcgtggggctcgtggcgggttcttgtcgcgcttctaatgacaaggttgggtttacaaacccgatggaaaccgtctggttactgtgtttaccgttgggaacgagaaagtttaaaccgctgtaactccattaaatttaaaaacaatttgaattttcgacaaattttatatggtttgtcattgttacggtgattattgcgtgtgtaatcatattcagcaccccgggtgctgtaacccccactcctatggtaagggaaaccctagctaatgcttgatctgctctttttgttttctacggtgatgatggcggtccagggaatgaaaatgatcacgaaaattcctaatcgaacgagcttcgtttttatatagggaaggattaccgtttctgactagtatcgttttgttgtatactataaaatttataatttctttgtgttttgtattaatgttaacactgaataatttaaatgaggaaaaaaatacaaattactagttgatcaaacctagcggtgctatctattccgaccgtttttcaccccgtgtggctgagaaatgggccggctgcgtctggtcgcgtcgcgagttgtcttttcggcgcgtcctcctgccggtgtcgcggtggaacggcacgagccggggtttttaggaggtaaggtgatgatggcaattaggccggcacgattgggggctttcggtgcgggagggatctgacacgatcccacgaggatttgtgtcgcgtactagtagtacgctccgtttgctttttgagagcacctggggctggggggtcgatcggtcagtcatccgatcgaatgtgtgacagtggcgggtgtttgtgtggtaggaggcaggggtttttgtgtgtgtgtgttcgtgagtgatttgattttgtttggtttggtgggctgttttggctgtctgatccatggattgggatcacctgcagtagctatagctacttaagcagtcctatagtcaccattggatcagaaattaacgttctagatcttttctaaataaaaaccgtacaaagcatattcctgtagtatgtaattaaagctactgtagcatatgtttagaccgttgattgccttaatccaacgatgaaaaacagtctcaactgccaaacttgcagtctctactagaggacagcttttttgcattgcagtcttgcagaagacaaagcaaacacagggccgtcatcacgagttgacgacccgcgccaccacgccacctgtggtgcgcggctgcaaaccggaaggcacacgcgttgtggcggaattctcaacaccgtcgctccgatccacgccgctagcaatgcaccgcacgagatggcacaacattggtcgttccttccaagcctcatgagtagcctcgtacggagtattatggtaaatcccgatcagcgatagaggcttccagtcagcggaggcaggccgcgatcggttcttctcagattacggtaaatcccgattagcctcgcccggctgatctggtccctgacgtcggtgattcggcgaaaggaaaatacccactttacgtatatcaactagttgaggacttggagggtttgactttcatcgacgttcctcgaccacagaaccgattatattatatttgtcaaccttttaaaaacggtgaaaatagtagtggccacctcttgagcaggtcgggtgaccatccgagctccgccactgccgtcttcactattagagtgtgtttagttcacgcgaaaattgaaagtttggttgaaattaaaatgatgtgatgaaaaagttgaaagttcgaagaaaaagtttgaaactaaacaaggccttagtagctcgggtttgatagtgtcactggcttcaccattgagtgtaaatcgagtcacttaacgttgcattagctaaaacagctctcatcacgtcactaaacaaaactatgtttcaattcgcatcggtttcactaaacaaagtagactcgattcgcatgggttttagaaattaagggaaactctagcgacacgaatgaatactaaacctctagtagatagagggatcctgagtagacttattcgttcggtgaaatgctcgggctcgtttcattgcgtcaaccgaaatagcccgggattgggaacgttcaaggtcacggcctagttaccccgacttcagcagaattgcacaggacaacccatgggcctaactaacagttgctacttgtctgccacggccgacgggcctggcctatattcccccatcactaagacccaaacagatcgcgtattgcctaacatttcaacacgccggctcaacgcatgaaaaattcgtgtcttttgccccaatttgagagttgagacgatcagcaatgggatgtgcaatgccgctcatatgctcgcagcgcaaatccgagaagaactcaagaacctgagcacccatcgtcgatgaacggtcgatgcaacgatcgatcgcgcgtgataaaacagattaggggtttccagttacattcatcccagctaaaacaagccaacaacggacgtcgtgtccgaaatgcagcagttttgagctacatcccaacctgcaagaacactgcaggaaactacaaacaacagcagatcgacatgctactgtttttacgtcgacgaaatatacctaagcaagtacattgatacatacgaacagatcagacgccatgacaactgcctgaactaaaacggtaaaaactacaagaagctacagcatgtcagattcacagcaaacgacacggacgacgaagagttttgagcctagcagacgctggctatctggaggcgacgtgccaggtgcacgaggtgccacgtcagcgccatcaggcacagcacgttgcacagagacgagtagccgttcagcttcttgagccgctggttcagcgtcgccacccggctcttggacgtctgctcgtccaccggcgccgccgccgccgccgacttcgccgccatattgttgttgcctgccggcttgcgcgccgccgccgtgggaacggtggtggtggtggccgtgttgcccgccgcgacggtgaccgttggcgggtcgacgatgtcggccatgtccctccccctgccttcctccttctccaccttcatcctctcgaacatcacctgtgcaagaacgcaaggaatcgatcataaaactatgaaaagaattgggtgatcgatgaagtgaggtgagcttacgtactttggtggcttttggctccaggagcagcatgttggcgaggaccagggcgagcgcggcgaggaggttgacgctctgggcgcgcgcggcgagggagctgcgctcgcggccgagcaggtgcgccgcgagcgcgaggccgacgccgtacgccacggcgcggaagtacatcgggaacagcttgctctgcaccatggcgagctgctgccggggcagcgccgcggcgaggacgtagctggacacgaacgtcacccacagggacgcgccgtacgccgcggcgaaccccagcaggtgcatcaccgccgtcgcggtgcgcgccgcctccctgggcccgccgccgaggaggtgcgcggcggcgtcggacgccacgtcgcgcgccctccgcgcgatgtcggagaggttgctggccgcctcgccggccttcgccttcacggcctcctcggcccgcgccgccttctgcgccgcgcgccccgcggcgtcctccgtgcactgctcggctctctcggcgacgtcggagaccctgtccttggcgtccatggcgcgctccctagcgctctcccgggcatgtctcgcggcgtgagagaccttgtccttggcattcctcacggtctctgctgctccgtgctggacgtgagacgccctctccttggctttgcccgccgcttcggagaccttgtccttggctcccacggcggtctccttcactttggacgcagcgtcgaacaccttgtcctcagctatctccttagcatgcgagagcgcctcctctgcacctctcgccgcctcctccgcgccgtgctcgcctgccgacgccttgtccttcgcgccctcctccgcctccctggccgcgccgcagagcctgtccttgcaccgcttcaccgcgccgaacaccttccccgtcgcgctctccttggcgtcggacatcttctccttgccgccctccgccgcgtcggccaccctgtcggccgcgtcggagactgcgcccctggccttgtccgtgagcctgccctcgccgccgtcgagggagtcagggggcaggacgtgcgtctccttcacggcgtcgccggggtacagcgggtgctcccgctcgtactcgacgatgaccacgcggcgtccctcccggacgacgtgctcgccggccgtggacggcggtggcgtcggcgccggcgaccacacgccggccgcggccagggtggagagcacgagcccgatggccaccacgttcatcatggcgagagcggcacgccgtggcattggacgaacactcgtaagcttccagttccagtgagtggagtggagggagctcagtgcgaagaagcataagctaccgcggtaaaagtgcattgctggttcgaccacgccgcctaatgacgggcttaaattcgcgcgctcgctgagccgccgatggttgtagaagcgcccggcggccgcggcggccgaggccgtggcgcgctgccgcggcgtacgcgtggacgcgccgcagtggatgcggtggcgagctcggcgtcgccgcgaggcgacacgcgtgggcgggacgtggccgcgcgtcgcgcggtttcggttctcgcgcgcgtgcgggcgcggccggtggaaaggtggggcggcccaaaaaatcgaattgggtgggcttcgtctcggcctgcaaaggatagcccacaaagcgggcccaaaccgagaagcccactttcactcgcgtcgtcgcgacgcaagcgagaaaccctactcggtcggggaagccaccagcccacgacgactcgcctggacgcgccgccgccgtcgccgccgccgccgcagcagcagcagccgccggagatggagatggaggacatcgaggacgtgctggggccggccgggatcgccggcggcggggcggctccggggctccgtctcccgctcgccgccgtcgccgtgaagcccaagcgtccgagatcgtccagggtcgcgcagacccggccgcagcccgaggcccggatccccgggacgcaggtgaaaccgccgccgtagctcgagctccaatgagcgtgttgctgcgtttccacgtttaatctgatgcgcttgatggtttcgttttgttgcagacgatatatgtgaagacgttcgggtgctcgcataaccaggcaagcttcgtccacatttatttctgcagaattttggcacgctagcttacagaatactgatatgaattatgaagtgctatatgattcgttaaatgctgttacttccactagcaaatgaagaaattctggttgaagtgctgaaacaagtagtgatccactgatagtgtgtggttctagcgggcttattcattgtgctgatgctaggaagccaatggttctgctgttgttagctatgtaaaataaccagttgatcattcctgctctgcagagtgacagtgagtacatgtcagggcagctgtcagcgtttggatatgcgatcactgaagagcccgaaggagcggatttgtggctaattaacacgtatggttttagtttctttcttctcttatttgtttctttccatctattacctcctgacgttcattaaaagtacacatgagttgaatttaacctgtgatggtttcaaactggtgctgctctggatttgtgttgtggaaaactagctacgctattttttgcactagaatatgccatgagctgtgtaaacttgggataataagcataaatccaacttgcagtgccgaagagtgagatatatattgacacgtaggggcaaaccttcaaattaacttcagaggtgaagaatatattgtgaccgacacctattttgccatttcagatgcactgtgaaaaacccaagtcagtctgccatgacaactctcatatcgaagtgcaagagtgcaaacaagcctttggttgtggctggatgtgtaccacaaggaagccgggatctgaaagagcttgaaggtattagcgttattggagtgcaacagattgaccgcgttgttgaagttgttgaagaaaccttaaaaggccatgaggttcggttgttgagtcggaaaacactgccctcacttgatttacctaaggtacaactcatatttctgtacatgatgttatatgtatcaatcttttatggctagtatagtgccaatgttatgtgctattacctttttaccactgacagatgtaatatactaatatcattcctgatgactgaccacagctacaatttccaggtaaggaagaacaaatttatcgagattcttcctattaatgttgggtgtttgggtgcttgcacatactgcaagacaaagcatgctcgtggtcatcttggaagctatactatagaaagtttggtacgttcatagatgttttgtttcctgtaggaagttttgcttatttatttaaatctcaagcatgaaaattggtttgctactctaggtagatcgtgtgaaaattgttgtctctgaaggtgtccgagaaatatggttgagtagtgaggatactggtgcttatggtaataccattgtccagatctttttggattccttctgagagataagccatagaattattatggcaatttgctcctctgactttgcgaggttttcaggcagggatatcggtacaaatcttccaaatctattaaatggaattgctgctgagcttcctgcggacagaagcacgatgcttcgcattggcatgaccaatcctcctttcatattggagcatttgaaggagattgctagtgttttgtgccatccctgtgtttattctttcctccacgttcctgtacaatcaggaagtgatgcagttttaacggtatgcttgaacttacagcaacatatggatataaaacccaaatataattgggtaattatttgcttgtaacctatctgtagtgtttgcgcctggccctgacttattccacaactatacatctcaggcaatgaatcgtgaatacactgtgagtgaattcaggagggtagttgacactctttgtgagcttgtccctggaatgcaaattgctacagatattatttgtggattccccggtaaaataaatatcttggtttagctattcaaccttacttaaagtgatcatttatgaataaccttcatctttgtttattaaatcattcaaagatgtcgatagtagtttaagctaaagtataatcttgccatttttcaggtgagactgatgaggatttctctcaaactgttaaccttgtaaaacaatatctattccctcaggttcacatatcacaattctaccccagaccaggtatctttttctaacttttgttttctagaaatattcttcatcagttttcccccatgtctttgtctataatgttgtttctttgtgttctgtaggaacacctgctgctaggatgaaaaaggttccaagcgttgaagtgaagaaaaggagccgtgaattgacctcagttttcgagtcattttcaccctaccaaggaatggaaggcaaagtagagaggatatggatcactgaaatagctactgatggtgttcatttggtaagcgtgtcattattgctggcaatcttatcatcgatggtgtttgtgcgagttgccacatttatagtcacataaactttttcctgaaattatcttttgctgcacaggttggacataccaaaggatatatccaggtgcttgtcattgctcctgatagcatgttaggaacatcagcagatgtgaagatcacatctgttgggagatggtctgtgtttggtgaagtgatagaaggatccgttgtagcaaaggaaacacagaagcataatcacagtgaactgcaagaagaatacaggccaagtcaggttgaggaagccacttgctgcggcacggactcttgtggtgcctgcacatgctctgatgcagcacagcaatgcaatcccggtccagagcgatccgaaaattcgacgccccaatcctgtggtgatgctactcatcaggaagctgttcagtctaaacttgtgagaagaaatgttgaaggagcggtgaaaagtagcgaaagtgatacagcgaaacaggtaggggagattcagcgactaaatgtagcagctaggaggttcccagatgttgatacgattctgtggggtggtttggccgtgagctttgccacgacagtaaccctcattgcactgctagcttacaagatttcttccacgccctcctactagtaagtctggtgcatgtgtaactgtagttgagctgtgtgttactgctcagttttgaccatttttctgtatccatcctcgatccttctgtttgccgcaaagatatgcaatggaactgtaattcattatctcaacaagttctctaataacctttccccccgacctttctaaataactagaagatacaattagtatttttaagattaatgatgaacaaggagagttggtgatctaactcgtaattgcgtttatctgagctcgaagaaaagccttatcttttcgcttatgcttatgcttatcaactaaaatttgaattttcaaccttaaatttagagcaaattttaaggtttttcatcgaagtttattttttaacctttgcttttagatcgctaagaacatgtatataaaagttttatttacaaaatactttcgtttgcaaatatgctatttcgcttattccgtaaataagtgaaacgatggctctgttctggcttcctgcatttaaaaagcaatggaagtagtcatggtgttcttggcttgcaccatgaaggatttgaacatttgatacatgcgttctttagaaactcgctacattccaggttgtggttggcacaggacggtctctgaaaggaccaagggattggagtgagcctctcaagtcatttggtagtcgtactagtagtcatttgctcaagggagacgctctgccagtctgatgaagtaatgatgatgagtaggagtacttgctagtccttttcttttaagaaaaaaaaaagagttattgcgtactccctccgtcctttaaaaaaaaaaagacaagtcacacataaaatactcaacgtttgatcgtccgtcttatttgaaaaaattataaaaataattgaaaagacaagtcacgcataaaatattaattatgttttatcatttaacaacaataaaaatacgaattataaaaaaatttaatataagacggacaatcaaaattgaacacggaaactcagggtttgccttttttttttggacggagggagtattgacaatgtccagattctagtacaaattatcaagaaattggatttcatctgcaattcatcatggccacaccaatatctgtactcgtagaagtacaacttttcggaaaatttcactttgcgtaactttttattaccgttgttttgttttgtactgtcttttaactaatatttttactttagattgggttatcttacctttattttattttggaccaccctaaagtattttatgtatatgcatccacttgtcatatgtcagaacaatagtttaaatgtattattggagttcagtgataaataggagccgacatactcgaaatcattcatatgaaaatattggttaaagaatgatctaaaatgagacaccgataataaaatattaaaagataacctaaactaaaatttacaaacttttatgttttttcttttgttctccttccctccaaaacgggttctgttttggatgttagcaatgccatcgttttcctttttgcaggaatcatatagtacatttatttatcgagttaactaggagcgattaagatcaaaattacactcatccagattcacccagttaacgcatctgatgggagtaaaacttgccaaacatcagaatttgcatgacaaaccaaaaacgttgttgcagaagtgcagaattcagtacaagaaaaggcgaacagcaagttagcaaggcagaggagtaaaaaaaaagatcaattatcagagccgggtttcgatcctgagacctgtgggttatgggcccaccacgcttccgctgcgccactctgatgttgttgtactaagcagcaaggaaacaattttgtcctgttcttactaaacgatcaccatagcgtggcaaatgccttcgcctgtagtactagcaaacacgcggcgaggcgagcaacgagccaagcgcccaggccgggtcaccacgtggcgttggcgacgcaaagccggcaaggcaacggccgctcgctcatctcacctaccaccgcctgcacagctcgtactactacttattactggtaagctcggcgcctctatatccaaatccggcaagtaattgttttaaccgcgcgcaggcaaatcctgcatgtgtgcatgccctcgcggtgccttcccggagtggacacagcggtggcgcgcacatgtcgtcgcgacgtcgattttcgattcgcaccgcgcgccgcatcggcctacgctacgtacgtcgcgcgtgtgtcggccactgggagagactagagagcgcgcgggtgacagggccgggcacacacggacgcagctagacaccgtagcttggctcgaactcgaaggccatgccacccacccaccccgcgcgttcccgagaacggaaaggccgcgcgcgcgcgcaaggcaaacggccgacgcgcgtacgtacgcccgcgcggcccgtgcatcggccattccgccccccaatccccaccaccagtgtgggttccacgtacgtctttgacggacaccaccgcgtgctgcgtgcatcgtgcggcttgcccttcgcttcgctttcgcgaatttccagctgccgcctgccggatgcatggccgcggcttcgcaggggagagcagtgcgcaccagggtttacgatttctaagatggccttccatttcagggctctggcagaacgacggtttctgtgaaatccgataaaaagccggtagattccaaacaaatttcataaaccaaaatttgaatacagattccttgagtttaccgataagctcgcgaaaatcggtcggctttgacgaaattctgagcgaaatcatcgaaatttcaatcattaactagaaaaagagataaactgaaattgtttttcttttttttaagttcgttattcttttatttcctacttcaaatttcagtaaatacacggaatacatcaattttttttttgaaaatttatatccaatagattttatgaatattatactatttataagattttatttgattttttttcttttatttatcaatttaaatttgaatttggatgaaactcatcgaaatctcagacagcttttactttcgagccttatcgaaacctcaaaattttgcggaattcgaccggttttcgttggaatcatgaaccctggtgcgcacccgcatcgtacgtttgccatcgatcggccgccccgccaaagatggcgacgcacccatatctcaggcgtggccacatgctggaagggatgaggaaataagagatgactggcctttttttctctctctctttctaatttcaaccggccgtcaatttaaatgtatatagtttaaggaagaaaaataaaccagtaataatttcaagtaggtttgtattacggctagtagttccatggagtatatataagagaaatatactcccctcttggttgataattcattcttatcgttttaaacaatgacacggtctctaaaaaacaactttgaccaatatttttcattataatatatataaaagggttaacaaatatataattttattaaagtactttttaagattaatctatacatgtattcaccatatttgaaagacaaatattttaaaaattattcataatcaaagattctaaaatttgatctcgactttatctaaaataacaagtattatcgctccagaggaagtacctatcttaaagtcatggcatgacacggcacaagatacgttttgagtaagatgtcttggtatgaaccttagtttagtgacttagaattgttgctaaccatgaatgccctctattactaaaaaaaggggtgaaatttgaagtaattccatattaatgataggttgacttttaaaatctgggcttttagtatttcttttctacttgctcggtaagtcaaataaccacaaccgatcgaacaattatcattacattttatcgatcatatggtctggtatgaactatgccgagacgtggcatataaatattcgaatcttaatccatctatctctctttagcttgatgcccaagtcagaacatggaagtagcaaccaaatgtagaggtcgcatgtatcatgcaacgtattagaatctgaatccattggtggagaaatgctctttactcctgatttagaaccttttgtagtcccggttttccaaccgggattatgaatccgggactaaagatcgctatatttagttccgatttaaatacatgagattaaagatcgatctttagtcccgattagtaacaccaaccgagagtaaagtagggaatctttagtccggttggtaactggactaaagagggggtagcggcagtccctcgaggtccctttttcttcttcttttttcattgttgatttgctaatggctagagttaatccctgtattttatgcacatcccgaatcagcatcctaaatcttaagttacttatacacactgacggagcgtggggctcctcactgggagaccgcgcgggcccccctttgccggttcggccggggacgctaggtgaggttctaagccctcgatttgtggaatgtttcgcgagagagcaaatgcacaagacacgggcgatgtagacaggttcgggccgctgagaagcgtaataccctactcctgtgttctggtggatctgtgtatgaaggagttacaaagagctggagagcaagagagttcaaactctagagaccctctccctctctctctcctctatgagctccgctcttccttttacgagctctccttttcttctcccttttcttttcctctttctccttttttttctttctcctctcttggtaggcatggtcctccttttatatctcaaggggataccacatacaccatttctacctatccttcttttgggtggggacccattctactttgaccaaaacatggctcatgccttcgcctcacaccgggataaccctgtccttccttcatttatgggcggagatttgcaatggctgctgtccgaatgaccctccgatgggatgggtcataccaacctccagatgacggaggcaggtgcaacgtgggagcacggttgtttgctgatgacgtgaccggcgtcagaccagtcacaaaccggtcattcttgtctaccacgcgtcagtttagcatgccacgcgttagcccttcttcataaaatgacttccttgtaatggttgcgatgaagcctggtatgaatctagccgggaccgacgtgctaactccaggagttcccacgccagctccgtctagggacgagtgcctagaggctctcatcattccgacgggacggggcgaggcgtgcgacaggccgcctgttgccacctaacccgcgatctgaccggtctgtgaccggtcacatgccgcgactggtcacaaaccggataagcatgcgctgcgccgcattgaatgcggcgtgacgcgctcgtctaacccgctataaatgtggttaggtgagggccgctatgctcacctaacccacacacgtggcgccaacaccacagggggttggggcgccccagccctcggggccgaaacgggagcggcccgacccctcggggagacagagggaggggtggccatgtcaccgtcgggcccgaccccctcggggggtcgggccacgtgagtgatcgcggctacccaagcctctagtcacgatacccccggccccatgtcaccgacagtagcccccggcgtcacgccagggcgaccgcccccctcgagggaggcgatcgggcgagatgccactccttaggcccggtgacaggtggggccggtccccacaggcgggcagaaacccaacggtcgcaaatcgcgcgcatcggcaagggagaaaccgatcgacaataatgagcggcctcttcaagaccgctacattacttgagtagcgcgcgaatcgggacgaaccggttcgtttcgcctagtgatgtgatgatggtgcatcggtcagcgagcgtagttaacgcgcgcacgatatgtcccatcttgactgccacggccgcacatccgcctcgtgcgccgcaaacgggcgaacgggattagtggaggagtgggcgcgagaaacgagggggcgagatagtgggagcgggaagcgaggagccgggcatagcgttggcaagggtataaagacgccgaggaagagatttgtttccttcctctcgccactcttccccttgccttcgccacttgtgctctgacactccgtttcctgcgccctacccttgccatactcactcgctctcaagctcctcctccgccggggagtacaccgggtccgaggactacatgaggacccaccaggggcgcaaatgggactgggaccctgaggacttcaggatagtggtccaacgggtgctgaatctcagctccgtggaggcatccctcatccctcaaggcgttctccccctctgcagcgatccagagcgcgctaacatcctgaccatcatgcaggcggtcggggcgtcaggggagcgggctcctcgaggccacgatggcgcgagcgggagccgcaggggggaacaatctacctcgggagggggtcgtgcttctgggccccgtgacgggggcccggggggcagccgccctgccgacgcccgggggaagaggaaacaggaggataccccctccccatctcctccccgagggggcggggcggtgcgtgccagcagcaggcacccggagggtgctgcgccgacgtcgtagcccgagggggagcgaaaaaaaaagcggctccgcaagatgggggggggaccgaaccatgccggggaaacctcatctcccccccaaggtggtcgtttagccgacctcctcgcaggttcgtccccgcgcccactgcggccgtattcattctcccatctcccaaggcaagttttcactcacctgtttttcgtcttctggtttttcttctgcctcagcgagatcccgtcgcgcccttcccgccattccaagtccggccggtctgaggccgaggagacggtgaccgcggaggcccggaggcgggaagctgaccggcgagaagccgcaaactgcctccgggaagccgaggaagctgcccaggaggctgtccgggctcgccaggctgaggaagccgctcgggaggaggccagactccgccgggccgaggagtccgtccgggagacggaggcggcacacgcacgcagggcggcctgccaagcccccgacccgactccacccgaggcgacaacgacttccgaggccgcccacgacgaggccgcgggcgcgccgctcgggcccgacccctcgggcgacgttcgggacgagcccgcttcgggggacgcccccgagttcggcacgtcgatcggtgggccgagccgtgcggcatccttaccgaggcggctctcccccacgccttccgctgccccactgagcgcggagccccttctgcaggccttggccgccgcgaacaccacggtgttggacgggttaagtgcccagatggaggtcctgcaggcagagcgggcggagctcgacgcggcgtgggcgcgtgtcgaagaggggcgacgctcggtggaggccatggtggaggcgggccgcaaggcacaccgccggcacgcctcagagctcgaggcccgtcgtagggacctggcggagatcgccagggaggtggaggaggagcgggagactgccctcattgccaccgccgtgttcaacacggcacgggacgacctctgcctccaatacgggagccgggcggcggagctagagaagaagctcgacgcgtcccggcagcgcgaagaggcccttgaggctcgcgccacggtgctggaggagctcgcccgcaccctggacacgaaggagagggaactggtgggtcgcgaggccgccgtcgccatccgggaggcaacgctggcggtgcacgaggccgcctgcgccgaagaggagtccgcactccgcctccgcgaggacgagctcactgagcgggagcgagctctcaaggaggccgaggtcgcggcgcagctgcgggaggagcaggcgcgcctcaatctggaaggcgcccgcgccgagagggccgcactggatgtcgcgaccgggaaaattgccttttcccgaacgctagtgtattaatccccgtcccaggaaaagccggggtacaccacacaaacatgatataaaagacacatctttattatatcgataatatttacattattacaaaggcgcttcaggcctggcaatcaaaaataaacagtagcggactagcgggcctacggctccatcttcacaggcgttcaactggggtataagccaggactccacctaagacatcttctccaaagcttctcttactgaagaggggaaagattgagcaagaatgagtacaaccacagtactcagcaagccacaccggagatgcataattaatgcaagggagtacaaggggataataatataggggttaacttttgcagtaaacagcatttagaagtcacttagttgcccaaagccattttataaagacgatcctagagctacacagtattattaatcaaggccgtgaacccacacgaacctgccttaacccaaggcctacgatgattcagaccgaactggcaacccgaccctgggtcccagctcgtccctagccatcccaggacaaccattccacattttagttgttgagcaaattttaagaattaaaacactaacttgggtacattgctcggcttgcccataaccgagggcgcggctattcgaatagattatactctgatcagaggtgtacatctttacccacaagacacatcttcctcacgtgtaaccacgtgccacataccaccacggtatacggacggaagacgtgacatagtttccaacccatcctagccatagacaagagtaccgacccaaccccacctacggccggaacccccgggacaggcaggcagaattgagccccctagcagcaggacactggccctgtgccatgacatctcgactaccgggccacagctcgtgtagccttcatttgtcctagagatgtccatcgacccccgacttcgtccatctccatccgtgtacttttgtttataaccagactgagccacaaactaagccttacccactagacatgtggaagtacggtagtgctttgcaacagaggcccgagcttaatccttatagtggccggggtgctacttcccacaactagcatgcacccaaaccccaccgaaaaacaggttttaggggctttgaaagaggaagagaggggtatgtccaattccacaataagccaaccattccatagtatccaagtgatatgagaattccccaagtctaaagttataaaaccacctaatgttgcgtaattaaacagcgaagcatctacctaaattcatactagtggaaccatgaatagagtgtccactagttggggttttgtttattctagggtgaacaaggtaataataacaatagcaataataataaggtcataacaaaggtaaataggcatggctaaataaaacagtgataacgcaggaatttaaataaagcgataatgcattaatttaaatcaaaataattttataaactgggattcaatatgctcaaggatgatgtgacttgccttgctcagagagaacggccttccgaaccttcggcgacgaccacgaaccacgcttcgggaacctccggaacgacagaagctacgcgaagcacacaagcaaagctacaagcctataaagaagcaataacaacacataaaaagaaagcacacagttctttaggttataacaaacattaagagacttgaacgggtcgattcggagctcgtatgaccaagatatgatcatccgaagtttaatgctgttatatggagatttgcggattattataattaagctttgcaactataaaacatgtgtaagcgctagcctggaaaagacaggaaggctgcgccgttgacatgcggaccccacatgtcaacctaaaggaccgcggtaaactgagtacacagagacggtccacgggtcgacggaagcagatcccgtgtgtcaaccgaggcgagtggccgacaaacggactccactagacaccacacgggctgcacgcgtggaaaccacgcggctaccgagcgggcacactaacacggtcaccacacgcacaagcgaacgactaccgacaccggtacacaggtaccggggtcgacaaccgcacgacagacacgggcgacaccgaaaggacgaggacggggcagcgagggagagggatccttaccaccacgcgacgaggcgtgggaacgacaacgacgaacgggcgcggcggagacggccgggaacgacagagacgaacggcgaggggacgacttcagcggcgatccttggacaaaggcgagacgcggctggcacgaggcttgacgacgcagagccgaggacgaagacgacgacggggcctgcagcgaccttgacgaaacaccgaggacggacgagaacggctcgatggagggacgaacgccacgacgaccgggaacgacgagaggacgacgacgatgatgaccggggccggcgaggaggcgacgagggcagctggcagcggctgcacggagacgaggacggcgtgttccacgccgctgcaatgccgacgacagaggcggcgccgcgagatgacgagccggcgaggaggaacgatgatgacgacgacgaacaccggcggggttcggtcgaaggggaggcgaggccgagggcgaccttgctgcagcgatgccggaggtggagatggcgacgtcggccggcgcacgggcacggcggaagaggctgccgaaggcgacgtcgacgaggaggaaggagaggccggcgcgggcgacggcgttccggtgaaacagaggagcagctggaggagaggacaacgctgcgacgtcgatggaggagacggcgacgtacaggagccgaccgaagacggggaggtactggacgccgacgaggaggccactccggcgagcttcgggcgaggaggaggtgatgccggggatgagggcggcgtcgcggagccgagggaggtggtggcgacgtcgaccggcgctcaggcagggagacagaggcggctggaggtggtacagtggcggcaacgccactggacaacggcgggaacgcgcctccggtggtcaccgcgcgaaacggagggcaggccgggggagaggaggcggctgcgacgccgcggaaggcgacggcacggccggccggcgcacggtcgaggagggagaggcggctggaagcgcccggcgcggggaaaagagaagggcgacggcggggaggtggctagggaccacgggagatcgcgggaaggggctaaaacgagagaacggggcgagggggttccattttataggagaggagagggagccggccacgggggaggtcggaacggcggcggtaaaggcggccggcggccatggaagttggccggagttggcgcgggcgttcccggcgattgggggcacgattcaagggggaaattgggggcaactgaagaggattcaatggggattaaaaccccccaattaatttggaaagagccggcttgaatggggcggatttggaggaggaacggcgctaggtttgcacgggagagagaagaggccggctgggggaggaagacgggtccgacaggcgggacccgcctgccaggcgcggtcaacgcgcgtgggcgcgcgcgtgacaggcgcgtgcgcacgcgggaggagggcggctcgggcaggggcgcggcgtgggccgggcggccggcccaggaggagaggaggggaggggtggcccggggagagagggaggaggagggagtgggccggggaaggaggaagggcggcccaagagagagagagggaaggaaaaagagagggaggagggaaggacttcggccgcgggccgggggagagagagggaggctttgggccagacttggcccaaaggagggagagggattattcttaggtttttctttttaataaactttgataattgtttttgttgtttaataaatatttccggtgctctgaaaattcaagtaaaatttgagggctccttttagaccaaggagaatttaacaaaaattctccgggccacattcgaatttttctggcacgtattttagtgtttgccaatttcttttcgacttttaattaattctattattccttttagagaatgaattttatttcggaatgaatttatcaggacgtgacactggatcagcgggccgctgaattcgaggcgcgggcgaaggagctggacgcgagagcgcgcagcggcggggcggccgcgggcgacggcgacctagccgcccgcctcgcagccgccgaacacaccatcgccgagctgcagggcgcgctggactcgtccgccggggaggtcgaagccctccgcttgatgggcgaggtagggcctggcatgcttcgggacgccgtctcccgtctagaccgcgccgggcggcaggcgggcctctggggcgggcggaccgcgaaatatgccgccaaccaggggggcctcgcccagcgcctctcagagatggctgggaccatccagcggctccccgaggagctcgaggagacgatcaagtcatcctcgagggacctcgcccggggggcggtggagctcgtactggcaagctaccaggccagggaccctgacttctccccgtaggcagcgctggacgagttccctcctggaaccgaggatggcgcgcgcgcacaggtccgggatgccgccgaccacatcgtccacagcttcgagggtacggcccctcggctcgcgttcgccctcgactccgacgaggagggcgatgacggtggtgcggacgacagcgacgacgaggccggcagcccgggcgcgtcggcgtgagcccccaggcccccgccaatcttaaatagctttttctttcttcttctgaggccttcgggctcccttcttgtataaactaattcaatctgcaatcaaataaagaggaaatttttgtgtcagctctgtttgttgtgtgtatgagacgaggatggtctgtgccgcggtccttctgtgtcttggcttgaacgagggctcgtgcccaggtcccagcctcaaatggcgcgggtcggggctagtgcctggggagatccgcgtgtcgagactggccaggccgggaacgtggtgaccgagggttatggatgacccgattgtgggcctttgccgattctcccccggagttcaccacgccccggggcacggctcggttctgggccccgtttggcgattttagccggcccgggccaccgagggcaggatcgagcacgagcatgctaattcaagccaagattcttcgaaaggaaacaatggcacagacacagtccttaggaaatcgaaaatgcttttattgaaatacggaagaaaaaaatataagcttatgcatgtggaagcccccggccaaccctgcacgcccgggggggtgcggggttggcccgagcccgagacctgacacccgacccccactaggggtagaagcgacgaaggtgttcgatgttccacggattaggcagctctgtgccgtcacccgtggctagccgaacggagcccggccggggaacgccgatcactcgatacggaccctcccacattggtgagagtttgctcagtccagcacgcgtttggacgcggcgtaggacgaggtcgtcgacgcagagtgatcgggcccggacgtggcgctgatggtagcaccgcaggctctgctggtagcgcgcggctcggagggccgcgcgccgccttcgctcttccaagtagtcgaggtcatctctgcgaagctgatcttgatcagcctcgcagtacatggtggcccgaggggacctcagggtgagctcggatgggagaaccgcctccgcgccgtagacgaggaagaaaggtgtttccccggttgctcggcttggcgtggttcggttcgcccagagcaccgctggcaactcctcgatccacgagtcgccgtgcttcttgaggatgttgaaggttttggttttgaggcccttgaggatttctgcgttggcgcgctccacttggccattgcttctggggtgggtgggagaggcgaagcagagcttgatgcccatatctttgcagtagtcaccgaagagttcactagtgaactgggtgccgttatccgtaatgatatgattaggcaccctaaaccgagcagtaatgcccctgatgaatttaagcgcggagtgcttatcgatcttgatgaccgggtaagcctcgggccacttagtgaacttgtcgacagcgacatacagatattcgaacccgcccggggcccgcctaaacggacctaggatatcgagcccccagacagcaaacggccatgaaagaggtatggtctgcagggcctgggccggctgatgggtttgctttgcgtggaactggcacgccctgcaccgccggaccaggtcaaccgcatcgttgagagccgtcggccaatagaaaccctggcgaaaggccttgccaaccaaggtgcgtgaggcggagtgggctctgcactcgccttcatggatatcggcaagaagctcgacaccttgttcccgaggaatgcacttcaggaggactccgttagccgcgcgccgatagagggtctcttccaccagcacgtagcgcttggagatgcgctggacgcgttcactcccttcgcggtcctcgggtagagtcttatctgtgaggtacgcctggatctcagtgatccaagcaatcaatctaagggagctgggagcgctcccctcgggtcccgaggcctggacttcgacgggcctcgggggccgttcaggcgcgtccgtctcccctagggggtcgggtcgcaccgacggctgggcaagcctttcttcaaaggcgcctggtggggtctgggctcacgaggaagcgagccttgagagctcgtcggcgaccgcgttatcccgcctgggcacgtgccgaagctctatcccgtcaaaatggcgctccatacgccgaacctggcgcacgtaagcgtccatctgcgggtcagagcactggtactccttggagacctggttgacgaccaactgggagtcgcctaacaccaggaggcggcggatccccagtccagctaccactctgagtcccgcaaggagtccctcgtactccgccatattattggtcgcccgaaaatcgaggcgaaccatgtatctgaggacgtctaagctcggcgaggtcaacgtgccccccgcaccggtgccttgaagagacaaggagccgtcgaactgcatcacccagtaggcggtgtgaggcagctgcgaggggcccaagctggcctcgggggcggagacgtgctcaggggccggggtccactctgccacaaagtcggcgagggcctggctcttgatcgcgtggcgtggttcaaagtgcaaatcgaactcagagagttcgattgcccatttcaccacccgtccagtaccctctcggttatgcaagatttggccgagggggtaagacgtaaccaccgtgacccgatgcgcctgaaaataatggcgcaacttcctcgaagccatcagaatagcgtaaagcatcttctgggcctgagggtatcgggtcttagcgtcccggagggcctcgctaacgaagtagacgggccgctgcatctttcggcggggccgatcctcttcgctaggggccgcatctccagggcgctcttcgtccgagaggccgcgcggggcgcactcggcttctgtgccgacgacctcggggtcggagggcgacaggcgcggccttcccgcagtggccccggggccatcctgggggtcgggggcacctggcaccgtcggacaaacgtgcgaagggccagctccggccgtcgggggcctcgggccgccgttcggctcgggggcctctcctccctgctctctcccgggtcgagtcgacacagggtggggatgcgcggggtgagggttgtcctcgtcgcgctccacaaccaacgccgcgctgaccacctgcggggtttccgccaggtagagtagcaatggctcatctggctccggggcgaccaggactgggggagaactgaggtacgccttcaactgagtgaaggcccgctcagcctcctccgtccagataaacggcccggagcgtttgaggagcttaaataggggtagcgtcttctctcccagcctcgatatgaaccgacttagaacggccatgcagccggtgacgcattgcacatccctaagcttgctggggggggcgcatccgctctatagctcgtatcttctcggggttggcctcgatgcctcgggcagagaccaagaacccgagaagctagcccgcaggcacgccgaacacgcacttatcggggttcagctttatgcgggcggagcggagactttcgaaagtttccgctagatccaagagtaaggtctcttggttgcgcgtcttcacaaccaagtcatcaacataggcctcaacattacgtcctatttggctacccaaagaaattcgagtagtacgctgaaaagtaggacctgcattctttaacccgaaaggcattgtcgtataacaataagttcctataggggtaatgaatgcaattttttcctcatcctccctagccatgcgaatctgatgataaccagagtatgcatctagaaaacacaaaaggtcgcaccccgcggtggagtcaacaatctgatctatgcgtggcagggggtaagggtccttaggacatgccttgttaaggtcggttgtcacgcccggaatttctatccaaaattccaaacgcttacatgtgtgtgaaccctcgtccaggaatcagccgaggcacacaataacaaattgataatagagtacaaatattactctaattaataagcgaataaaatgtcattacagaggtagatagttcctctcaatcaataaagatctaagcagcggaaaataaataaacggcgcagacggctccactccacaggcagcttgaccaaggctacacctaatcctccacaccatcagcctcattgtagaactcttcctctgatgaatgattgcaaggtgagtatatgacatactcagcaagccacgcagcaaatatgcaagtgcacaggataacaaaggatggcataatagggttgcatttgcaaaagcagcatttagcaaacctttgagaatttgataaaacagttaagtaattaaacaatattaatccaacgctatacaacatgccctgttgtataggcccaaccattctgaacaaccaccccggctgcacagttctatctccaaaccaggaatgtaccattccaaaccaggagctaaacaaattattaccagtttaagcatctcttacaatgatgagaggtgtgagactaatcacgaaagacattgttagacccgcccataaccgcgggcacggctattcgaatagttttactttggccagaggtgtaccactgtacccacaagacacaaccccacatcatgtcaccatgtgcctcaataccaccacggtacctcggaaaggagttgtgacaatacccctcgcataacacaatccactgcagcgcaccttcctggatcataatcacccccttataaacaaggcatggactccccagcgacccccgtgggcttatctccgccacttctcagtctggtgccccgcaatgaaccatgctatacaaaagataaagccgttgcccatgctggcttgtggttggcacgataaatgtttcacaaccgaaactcgtgaaccggtccttaattgtcatgagcacgaccatcaaaaccatgtgctcacaacccaccattaccaggttttagttggcacattaattaattaactaatcacgattgaccatcgtgaactatcaataagccatcattaaataatagtgagtcattagttatcccgaatgtgtactaatgtttctaagcagggctaagcaattatatctaatatctagttgaaccaatataaataaagctcaactagtcaaattataataacccatggtatcaaggaataaggtaatcaagaacaaaagggctataacaaacaataggttaattccacccaatgacattcgaaaataaatgcaatagttgaaaagaaacaatagctttaaataggatcaacatgctcaaagggttgtttgggatctgtgtgacttgccttgctggccttggaattcttcaaactcttcttctgcgaaaacggactctccggaaacgacagaatctaagcagaaaagagcaaaatcaccaaaacagcacataaacaagcatgaacagtacatgtggatatttttaatgtgtagatctcaattttagaaaaaattagagacttgaaccgactaaatcggagctaagatgaattagttatgaatttttaaagattaaaccggattaaaacacttaaatcggtttaaattgaattacgacgcaataatgaattatttttgaaaaggaaaaggggatttattgcgtcagcggctagggtttgggtggaccgggcgcacgggcggcggttcacgcgaacggacggccgagatcgatccatccaaaacggacggccgagatcgatcgggtccacggcggctcacggcggacgaccccgatgacatcagcgacgacgtcagcgacagcggcggcggctcggcggagaagacggctcgaacggcgcacgctcgccggcgaacggcggcgcgaggacgcaaacggagggcaccaagacgtagaggacaacacggcgaactcaccggtgacctaaacggcggcggaagaccaacagacggcgacggcgacgaggaggaagcggcgggaaccttcgggtcgacgacggcgaagctgctccggtgatctccggcgacggcgaaggggcggacgaggacggcgacaacttggcgagcacgatggtggtcttcccgagcgacggcgacggctgaaacgacggcggcgcacggctggagcggcggcggcgacggcgaagctagggcacacggcgctagagcgattccgacgactagaggcgaaggcgagggtggcgacgggaagaggagactccgggggtccttttaaaggggctcggaggcggcggcgaaggcccacggcgacggcaacggcgaaggaaagctcgggaagaacaaatccgagacgaactcgaatccaactctttccaaaacgatttagccaaagattccaaaggagaaaaggtagaggagatcccgaggatcatttcccctctttcaattcggccggagaaggaaaggaacggccggatttggaaaggaaacggcggcggcgcgaaactagggtttcggcggcggcggccgaaggtagacgacgactgacaggtgggccccacctgtcagcgagcgagggcgcgcgcgggcggcggactgggccggctgggtcgaggagagagaagagaggttttgggccgactttcggcccaaagccaaaagaagactttttaaaacctttttcaattaaaattatttcttaaatgcaattccatttattaaaaatacttccttagctcaaataaatcccagaaaaatctaggaattatagaattaagcaaagtatttaatgaaattttatctggcccaattttatattggaatttattaattaaaacttaggttttcttttcaagacttttaaaattaattctaaaaattccatttaaacaacaatttatatattttgaattttcagggtgtgacatcggtgtagtcgatgcacatccgaagcttgccgttcgccttgggaacgacgatcgggttcgccagccactccggatggatgacctcacggatgaatccggcctccagaagtcgcgccacctcctcgcggatgaaggcttgacgttccggggcctgccgccgcactttctgccggaccggccttgcgcccgtctgcacggcgagacggtgctcaatcaccttcctggggaccccgggcatgtccgccggtctccaggcgaagacgtcggcgtttgcccgcaggaaggagacgagcgcgtcttcctatttgccgtccagaagaccaccgattcgtgtggtcttggacgggccgtcgcccagggcaacctccttgaccgggacctcgtcgcacgtgatcatccgctgcctcggggcggctgggacggaggtgctgagcctctcgttgccaccctcgggcttggacgcggcggcgaggtggtccgcgcgctgctccatacaagcaagcgcgactttgaggtcgccatggacagagatggggccaccggggcccggcatcttcatctggaggtaggcatagtggaccgccgccatgaacttcaccaacgcgggcctcccaggaccgcgttgtaaggcagactgaggtccgccacatcgaagttcacccgctccgtgcggaagttggcggatccaccgaaggtgaccgggaggtcgatatgacctagcggccaagtgtgccccggcgtcacaccgataatcggctgggacggccgaagcaccatccccgggaccttgatggcgtcaaaggctgcgggggaaaggatgttgagggctgcacccccgtctatgaggacacgccccaacttcatgttgcaaacggtgggggaaaccaccatcgcgatctgtcctccccgggcaacgcacggcgggtggtcggtctggtcgaaggtgagggcaacctccgaccaccgcgcccgccgcgtcgcctcatgggtaggggccgcggccagaagctctcgcttcatggccttgaggctccgacgagaagcgtgagcgcacgctcctccatcgacggtggcgatggtggccccaggctcctggaaccctaggtcatcgtcgtcatcgtcgacgtcctcggcgggggccttctgcttggcctcacttcgccggttgccggagggagccgccggggccttgccctcacggcgctcctgcctcctctcctcctcccacttcctcgtccgctcagccaaacttttgaccgcgcggcagtccgtgaggtcgtggagggaggtgttgtgcacggtgcaacagggagcgccggcctccttctatttgtcgctcgcaggcctcccctttcgggtggcccgcgaagcgccctcgacggcgaggacgtgtctctcgtcgtcggaatgggccgacctcttcttcctcctcctgtcccgccgtcctgaccgagcggcggatccgggggcggccgaagctgccacaccggaaccggtggagttccaggtccaggcctcctccttgcgagccacacggtccgcgagctgaaaaagctccgcagtggtctggggctccttggaggcgatcttttcgagcatgcggttgtgccgcacgcccccccctgaacgtgtagatcaccgcgtgtgcggggatgcatggtatggtgttgcggacctgacagaaccgctgaatgtacgagcgaagagactcatcgtcccttcgctgtaccgcatgcaagtccgcttcttcatctgggcgcggatatgtgccttggaagttcatggtgaactgctggcacaaatcctcccaagagtggaccgacacgggcggcaagttcattagccaaccccgcgcctgtcccttcagggccatggggaagaagttcgccatgaccctgtcgtcacccccggcggcctcgatcccggtcgtgtagacctagagaaactcggccaggtcccgatagaggtggcggcgggctagaagtccgagaggcggaggaggattacaatgttggcagcggccctatgggcagcagaggcttaggaattcgacgaagcatatcctttcagctcgcgtctggtcggctagttctgactggacgacaatggatgaaggtggactacccggcggcgtgtggcatcggcttacttgaagcagatgaagatggcaccagtggagattcgctgcgataacgcactaggggcggtggcgactagacgactttcaatcgtcgatttcgactgtttcatgagagaatgttgggatgcagggatgtgttgaggttgtaggtttttcggttttttggttgtattctcctctttgctgaggtctgagtctcagtgctctcgtatccttttggctgtgtatatccctcatagatatagaggccagattaataaaaatcctttatctaaaaaaaatcggacacaatgaacataagtaatacatagctgtatcggacccacaaaataattttatacatacagtcataaccattatcagtggctagcaataaaccttgctcatgccctatacccatacccgcaagcgccatgtgattatccatattcatgctgatttacccattagagataggatttcatccccacaacatacctacagatataacaaagaactacctgatactagggtcatttacccacgatcaaacgggtttatagggcgtgattgccattcctaaccagaatgccaaccaaacaaattacatgtactcccttcgtttcataatataataatttaatattggatatgatattttatagtacagcgaatctggacaggaggatgtctagattcattatactataaaatatcccatcatataggttactatactatgtgacggagggagtaggttgttttttaaatgctcaacaacacctaggttttgatatatcaatagccgcactgaaccacatatgatagggtgggcgatcgaaaaacaagtactcctaccaacacaatggtcttgtttagctgggggaaatttttgggtttagttatcacatcgaatatgtgtacagacatttgaagtattaaacgtagtctaataacaaaacaaattacagattccgccaggaaactgcgagacgaatttattaagcttaattaatctgttattagcaaatgtttactgtagcactacattgtcaaatcatggcacagttaggcttaaaagattcgtctagcaagttatacgcaatctgtgtaattttttccccctatatttaatactacatgtatgtgtccaaacatttgatgttacagcatgaaaatttttgttttgagaactaagcagggtgtgtttggttgctcgcatcactcctagcctggcccgtgtgagccatccaggctctccagggcctgggtgagtaggtgcgaaagggtttgttcggtagatggtatgagatagtgtttgcttggttgtacaacggatgctgttcatcagagtttttgtttggttgattgcatatgggctgagtttggttacctcatgtttcttatgtggtgagattaccccttgcaattccatgaaaaaaaaatagggtgcatagcatattttaaccgacagttgagaactaaaattggtgaattccctacatcaatcatagcaaggcccaatcaaaactttcggtatatgttgaccggtcaggaaaaaaatgaaaatgaaatcaaaacttacggtatatgttgaccggtcaaggaaaataggaaaaataaaaaggaaaatgaaagaaaaaagtggatatcgtcgcccaatgactcggacgaggcgacctccatcgctgccacatcgctactctgcgcagccgacttccaccgctgctgcgatctctccacctcatttgcgccaccccgttcttccttctaccacgccagttgcagccctcctcagccacgctgctctccatattcccctccaccctctgtcgcttgctaccgttggtggacagatccgacggctgtgagctcgtagccgccggatccggcggtctggcgactagagaagggaggggagggcggtggcaatgacggggaccgctcttctcgctccatgcagttcgtcaccgtcatcggggatctagaagccgaagctcgttgtttttggaatctggtgcgtgggtgggagctcatcaagggaggaagcaaccggcgaggaagacggtgccgccgacggtgaggatgggaagagaaaggcaatggaggctgtggcggcggcgccccttgacctcgagtgtctagatacatcatcgacttcttcatcttccttcttcctactgaatcgtgtgtgagcaaatgtgagaaggtggtgaggggatgcaagccggccctgcctgcgttcctcctcggcctggctcggagaggcaattttgcacccgcccatcctggctcgctcctccgtccaggcaaccaaacagtgagctcgctgcatgcaccgtaccggtgcgagccaccgttgatgcgggcaaccaaacacatcctacatgttcatgttcaacagtcaaaatcccgcccacatagaaagctcccagacccgttctcatggatccacgtgatccgtcagcagtcatcagacggccagagtaccacccaacatccatccaagcgtcaaaacacccctgccacccgtcgtacgcaagtacgcaccacatgtaaaacacaccacaccaccccctccggaggcccccacccactgacaagcacacgtaaaacggaggcggatccgtttgcgccgcttgcctttgacacagggacagagagagagagagagagagagaggagttttgagcgcgcgtcccggagcagagtgagtgaagtgccttcactgttcggttcggtggtggtgagagtgacgaggagcgaggcgaggcggcaacttccatggagaggaggagttggcggtagattaactcccaccacctgaccggaggaggagacgaggccgccggacgagagggatcaacgccgccgcttcctgccgctgccgcgagcagaggcacaggtacgcgacgcccacccgcgcgccctcctctgctcgtcgccattgcagccgccgcaccgcagcgcgggttttttttttccttgcttgttcctggtggcatatatatgccgggggcggttaatttgttcccgcggtgaatacgcgcgggtttcgtttcctatcatcaggtggcggttggttgcatcgttgcgttatattgtgtgtgtttttctctctcggttttgttgatggataaggttgggggagggagatttggaggaaatgtgcgttttggtctaatcgggatgtggagttgattcgtggcgcgaggcgattaaggacgatgcgttgggtagacaagttcttgggttttttctttctttttttgttcttattattgttttggatttatatagtaggtgcctgatgcatttctgagctctctcgtgggggtcattgtgttgtgattctttccattggaatgcttatcatctgatctatgatttcagtgatgaaatgttatctgtctgcgccgaggtaatttcagataaaagaagaagaaaagggttccacactcaactcatctatgtggtgtggcttcagtgtgtttgttttattttaaaaaagattttaactttttttttgtaatagcaaagaagaaaagatttcaacttcttttttgtgttcctggaaggacgcaaatgcaactgctaccagcctatcatttctggttcatgattcatccagttcactccggttgcagttgccatttttagttaggcggctatgcttttcatgggtggactgacgtggtaaaagcttctatttttggatatcgttgtttatctcgtttggtgcttcaggtggccattttctgcatttcgcgactgacgagttcgggtagtgtctcaatatggcattattagttggaattgtcatgctttcattttttttttcagtctgcattgtcagatatggactgatgttgcactttttttttttgctctgatttttcttcatcatttctcattttcgtcttgcctttgtgaactgatgctcatatgtttactctttcattgcagtctgatcgcttcgatcatcgcggtgattgccggagcttggttcgacctgcattgtagtactcttgctgcttactttcgtaaagaatcaggactgcttgccttttgggttcaagctctggctagtaatcaacagaatggatgcgaaagacttggtggaaataggcatgaaggaggaggacattacaacaatgctgtttggaaagaaggttatcgagctgacggaagacgcatttgatggttcgaaagaagaaaggaagatctttgaggagctcttctgcagaacaggcactagcggagcaagcacccgccatccacgccgggatggaaagagcagttcactgagagatgcaagcaaagaattgatatcaactaacacaccttcgagctctgcctccaatcacaagtcggcgcgctgccgtgtggttgagtcttttacatatggcaacttatcaagctatcttgtgttctgcaacaatgacaaacaaaaaatgcagaagacagtgggctttccggatatggccagtgcttctgatctcgtgatacagtggacaccgccttccgttgagagggtgtacacccgtagggcagtggctcgcaggaaccaaagagcaaaactttgcagtgttcttgatctggagagggttgacattaccagtgttagacagcgtagggacagagggcagcataagtatggccacagccatgcagtgctttgggatcatctccgtctacacgctaatcttctgatgatggatgctgggtggaagattgatggcaaggaaagatgggacaagagtaaggttgatcatatttatgagtcacctgacaaagtaatgcgcctgttttctcttcccagggcatggaaatgctttggccagtggttgcttattaattcatccggctttggtggaaatgactacggtcggatatggttcaacatccatgactttctgagtgatttgaagaatacactgctatgcttagaatatgaagtccggctcccgaagcaatctctatcttttctcaaccagtggcagctccttgaccctttcatggcagtagtttgcattgataagaaggttagagccctgaagaagggagtagcactgaaagctgtaaacagcactgttacatttgtcagctgcatcgagagtgagctgtcaaatccccggaatgccgacaatccacttggtctaaaccattcgaacaattttaacagcacacatcccaggtcacggaaaaatcttctgccactgcttcaatctgatgacctcgatggaaattcttcgcgcagcaaacatccttctactgttggaaaacgtaaatctagccaatataaaatggatgaaagattgccaatcatggcagaaatacaagaaaaaagcatcagaagtactgctcatcgtatagtgatgggtctccaagattcaacagcttttcctggttcaaggactagtttaaatatgaaaaataagccttcatacagcaagtctaatttgacacagagcattcaagacaaatctgatccactatattttccacctaattattctcccagtgatcttgttgaaaatgctgaaataaatgatccgagttttcatgcctatgacatgatagaatctgcaaacgtggacaattctgcagatagtcctgacgagttgctcctaggagcaaacttactgttttctcacgaagtggacgagatgctccttgacgacagggctgcaggaa

SEQ ID NO: 8432 - DNA, 30270 bp, Oryza sativa
tatttttcggtgatggtgggccggaaccttgggggccaacggacgttccgaaggctcgccacaaaggctcgatagccggcaccgccaaccggggacacgggggccggcccccgtgcccggaccgaagtggcgctccggacgaggaagcgccctccgttgcgtgggcggcgcgacgagcgtcgcgccggcgctcgatatcgaggcgggcatccggccccccacgcacatcttcttgggtcggaggcgttgacgagggaatggcggacgaacggcgggtaacggccgccgctcgccgcgccctccgcctcgacgacatggagccggcggcggcagcgccagaggcctcggtggcggaggaccgcccgccggcgcctaggcgttgctgcgccgtcatgaccaagtcggccacgtcatccagccaacgtcgggctggagtctctggatcggggacgacgggcgggtgacgcaggagcgcgcccgcagcctggagcgcgccctggggcgtgccgccatcgccgtagacgaggcggcgacgcgccccgtctcgccgtcctcccccgtcgcccgcgagtggcgaagtcgcggaacctccgaccttcctgagcgcctccccccgcccaagatttcggcgagagggggatggtggggtgcgagcccgacggcgcgggttctgctccccgtcgtcaccgctagcgttcggagagaggctgtgcgccactgcccgttcggccattgggctgagcgggcgaagcttggcgcacacgaaagaggacgagggcttcgaaagacacgcgcgccccctacctggcgcgccagatgacggagcttggggctcctcaccgggagaccgcgcaggcccccctttgccggttcggccgggggcgctaagtgaggttcttcgccctcgatctgaggaacgtccgcgagagagggagtgcacaagacacgggcgacgtagacaggttcgggccgctgagaagcgtaacaccctactcctgtgttctggtggatctgtgtgtgaaggaatacagagagccggagagcgagagagagttcaggctctagaaccccctcgccagagtcccaacccccctcttcctaggcctgggcctcctttttatctggtcaggggtcaccacatggggctctagctgcctaagaagggaaacatgctttttacaaagagggctagtctacagccggaagtgacctctgacaagcagagcacacgcctcctgcctcgctcgcccgcttttccggtggacgcccatttcaaccttcatttaatggccagcgacttccttgccatacttgcgctgaagtctggaatggatctgactaggactgacataccaactccaggagttagcacgccggctccggctagggacgagagccaggtagctctcatcattccgatgggacggggcgaggcgtgtgacaggccgcctgttgccacctaacccgcgatctgaccggtctgtcaccgcgaccggtcacggaccggataagcgctcgctgcgccgcattaaatgcggcgtggcgcgctcgtccaacctgctataaatgcggttaggtgagcccgctgtgcttacctaacccacatacgtggcgccaaaaccacagggggtcagggcgccccagccctcggggccgaaacgggagcggcccgacccctcggggagacagagggaggggtggccacgtcaccctcgggcccgacccccccagggggtcaggccacgtgggtgaccgcggctacccaagcctctagtcacgatacccccggccccatatcaccgacacatgctatacaacatttaattcatctctacaattaactatccataaaccataatccgtcgaatcctccattaaaaaaaaaccacacgctttagacccgatgctctcatgtcatcacttgtggtatatgtccgtgttactatatccatcagctagttgcgcaaaaacatatataccggatgagatactcctttccaaaagggcagagctttttgctcactctctctcctctctctctctctctcttccctgtgtgcttttctgttcggatcatatcccaacagaaaacgacgctgccaagtgccaacccaagtagggagatattaaaccaacatattttatataatagattatctataaggctggctataattttcttctcctatccatatctctcacttataaattaattgtatttgtcttggaacttgtgataagctagctcttgcataagagccaacatctttgatttttcattacctctctcctccacataagtttatagtaagcttatagctcactattatacttgctctaactaaagccactgacatgtgagaccgataatcgctggacccatatatcagtaacaaaagacacggtgtagtaaaatatcgaccgatattaaagctttgccatggcatactggcgaaatgggcccatccatgccgtgccatgcatgctacagggcacccccaacctgactttccccctgtcacgtaccctgtacgtacttgcctgcaccatgtacgtaccaccatgtgatactctctacgtacgcatgtgtttaaatccagagtttggatctaaacttcagtccattaccatcacatcaacctgtcatatacacaacttttcagtcacatcatctctaattttaaccaaaattcaaattttgcggtgaactaaacacagccgtactacactggaccgccctatagcatcaatgcctgcaaagtactctactagcgctgtggtattatacatcactgtgttttgtgttgtgcagtagacatgtttgtccatacttccttttatgttctgaggaaaatatactctcgtcgttgtagaaagttgttttgggttcgtgataagttacatttcttcaagtttgactaatttttatataaaatataataacgtttacaatgttagattggtttagttatatctatcatttgtatgtatttttatgagtaaagtatacagactgttcttaaacttatagggtgtgtcattttggttcctaaactctcaaaatacatatccaaagtcccaaaacttatcaaaatatgttatttaggtctcaaatcgccacaacctcttcagaattttacgtggggctccccacatggatgtggcgtggtatcatcttgactgaaaaataggacccacttattttttttcttttttcttcttttccttttccttctcttttttttccttttctgttcctttctctgtgacctgagtaccccatgcggcggtagcctatttttagtgagaggaaggagaagaaatgaaaaaaataagagaaggagaagaaaaataattttttttaagtaggtcccatttttaagtcaagattatgctacatcacattcgtgtggtatgccatatcagcgccatgtagaattctagacctatatgacactttaacaagttttgagatctagatttacatttaagagattggggacctagatgacactctaaggactgctcatgcactttactctatttttctagaaatgtcggcaccttctttgtgatcctggtcgaatttgaggagtttttggcttaaaacaaatccaaaacgacttataaacttgacaagtttagatatttgttacaaacgacttatattaacgacaaatctagacaatcttttatctaaaacctaagctctaaccatttgcccagattagttatattagagcaagtttaatagtatagcccactactagctccaatttatctatagccaatctaatagctaattcatacaatagttgtttactatactattaatatatggtctcacctgtcatacacatactgtgtcttggagtccgtgctacagctggctacagatctgtagactgcttctcttatctctcatcttttatctcattaaaatatgtttatagctgactaatagtctgctattgtacctgcttttaggaggggttatatttggttgagtatttttcgggacggatggagtacactgcaatatagctgtagaatattcataaaattttctctaaaaaatactcctcgtgaaatgattgttcattagtcttaagtatactcctaggtcaaaaaaaattgccaagtgaggtcttaataaaagaaagggagaaaggcgtttgcactgcatgcagcaactgcagcagtagtggtagttaattaattaattaattaataatggcgatcgacagctcagctcggaagacgatgcccacccctctctccgaggccgaggccgcacgaatcttgaagcgcctagccgttcgccgcgcgtgccgcgggcggcggaggcggtggccacgtaagcgcccgccccacgcatgcagccgtcggattccgattccttttgccgcttttcccgtctgcccccctcgttctccgtcgcctttaaacctagagtaatcaatcaattgatttattggtaattcacgattaattaattgttttctttctccatcaaccccaattaggttataaattatgcttatataccctaatgtataaagtattcttttattctagtactttatactagcactattactccatactattgtactccctccattccaaattgactacatatagttttttttaaggttattcctaaatgatctacatatttgtgcttatttattaagtctattcgttacttgtgcattggagtaaatagacattgatgcatgcatccatgcacacaagtatttataacacacatgcaatatcttgatttgctattggctaggaaatagtggggatggtgtttgagtttgtttctagaataaatatagtatgagagagttattagcttttcttggtcttggtgtacctatgaaatatgtagatcaatttgaaatggagggagtactatagtagatgtagatccactggattatgatttgtgaggaagattatgacggtgtgtatagtatagtattggtgttagctgaatgcaccctttacaaaatggcatattgtttgtttcggtcttagatacatgtcattttaattatcaatgtcatctgccaaatacaattcttttcatgtgttttattttactataatcacactacaggcatatttgtgacaaaaaaaagaatgggaattatgtggtagtatgtatcactttatcatgtatatgtatgtcgaggagcttagctaagcgaagactacatttaatattgattagcggatctaattacacacaaacggttggttcaactaaccctacaacttgttacgtgcgatcctataagcctttgtttatattgtacgtaaactatacaaaaatgacctaaaaataactcaattgaaatatgaatcaacgcgacaaaaatctacaagatgtttggtacagttgaactccagctgtgtgacacttacaactacaataccaagagatcgaaatatacaactttggttgtacagcgctaccggctatacccatagcccaaccacatgtcagacctcatccaaccctagatccaccgcaactcgatattatcacacttctcaacctactcttattatcatactacaagcttgttagcttggttacaatgtatgctaatttgaagctctgaactatgaacacgaactataccactattactattttgcccaacaaaccccaagtagagccgcctaaccaacaaccaacctcgttgaccgctagagccgctaatcactctggagtcgggacccatcaccgaatacgcgagaacccgaggaccaaaccgcaaaagcctcacctcaccctaggctttgatatgcgtgcggacgcctaaggctaggagttaacctcgcgtagagagagagagagagagagagagataactagcagagcactcgcggaggcgaggagagagagagagagagagagaggttggaagaggaggggagagtccacgtgagtgagaggaggaggaggaggaggagatccctctcccgcgcgcatccgcccctctcgccgatccccaattcgccatggatccaccctacgcaggtcggtcagcgccgcccccgcatccgcggttttcgccttgttttttttttttgttgttgttgttgcgtgtgtgtggtggtggtgatggctcaggtctcgcggcggcgtcggggggagctcgatctgtttgttccggcgacgaatccgctgttccggcggtgtaattgcgggcttggtggtggaggaggaggaatttgtgggcgtggattttagggtgggaggcggtttttttttttttggggggggggtggtgtagtgttcgtcgagatttagactttttgtgtggatggatggatgggttagattatgcgcgcgtggattagattgcggcggtagagggtttgtactgttcattgattggtttgttgggttgatttggagctgtagctgatgcgtggtagaggggtggaggtggaagcgcgttggggagggtggatggcgatgccgctggtgtcagattcgccgctgcatgcggtgatgggtactcacattgcgccccctctctaccgggggaggtggcagcggagtggttcctgcggctttacgtcgttttcgtgggatttacgtccgcgggcgttggtagcagcagcctatcctcttttgggacgggaaaataatatggcgttaggctgtttgaggcctcctgttcgtgcgttgggtgttgcattggtgctgatttggtgggatcacggctgccgaaggcgggtttgtttgctgttagttgatggtaaggattggctgatacgtcgattatatcttctagaggagctgcgtctacttgcatgtcaaggttaccacgtttaggggttatatgattgatgatagtttctttgtttagtggtccaaaattagaaagactcatttctttttagttttctcgtttcccttagacagtctgtagagagttgactttctgcggctcgtgccagcttcgatagctctagttaacattgcgccttgtggtatcacaactgtgctttgtagttcacatttagtcctatacaatatggtacatgttgatgagcctttaattcttagattattgaccgaatcatcttttttttccgaggttaagacttattctgttgcaatgtgctataattataatttgacttctactccagtaagacagtgtgctactcacattaatttgattcagcatgtcgagaatttaatttcctttggaacgtcattcattgagtttttccttgcacgctaagttactcagtaccgtctcatagttgttctgaagaagagaaagaatgatgccttcaaaatatgtattcttctactggatctaatgaactttaaacctttccattctggactgtaaatatgaatgaacgtctaaatttccttcgttgtttgcttcttgtccgactggattttgtaactatttctgactttatcaaattgataataatagtttccagtgttctcttgtttaggagtacctattgatcctgctaaatgccgattgatgagtgtggatgaaaagcgggaacttgtccgtgaattatcgaagcggccagaaagtgctcctgacaaactgcagtcttggagtcgccgtgaaattgtagagattctttgtgctgatttaggaagggaaaggaagtacactggattatcgaagcagagaatgttggaatatctcttcagagttgtgactggcaaatcatctggtggtggcgttgtggagcatgtgcaagagaaggagcctacccctgaacccaacacagccaaccatcagtcccctgcgaaacggcagcgaaagagtgacaacccatcacgactaccaattgttgcaagcagtccaactacagaaatacccaggccagcaagtaatgctcgcttctgccacaatttagcttgcagagcgactcttaatccagaagataaattttgcagacgctgttcatgctgtatttgtttcaagtacgatgacaataaggatcctagcctctggttattctgtagttcagatcaacccttgcagaaagattcttgtgtattttcgtgccatcttgaatgtgctcttaaggatggaagaactggcatcatgcagagtgggcagtgcaagaaacttgatggtggttattactgcactcgctgtcggaaacagaatgatctgcttgggtattctccctaaacaactttattatttgcacagttttttttcctgttctgtaactatacgaaattatgttttaattattcctatgcctccagtttttactgccttaagtaatgttaccattatttattgcaacgataactactagaaatatgttagtttgacttttgtgagagttagctttgataatttgcatgcattcttgctttccagccactttgattaccttactgattctgtttttaggattcttcggtgaagatccttgtagtgtcatcatcattggtccaatcatatgatgcatatttctcaattgtgtcttaagaagtgggttggctgcttttgcccttcagcttcatgctttgagcttgtggtctgtgtgcttacttctgcattaagctgaattagtgttggattcttccttctccatctggagtaaatttgtttgctgggataaccctattttcataggttgcgagctgcgaaaacaggctttcgactgcattttggtgtctttgtgttgcattccatagggttcttgtagttcaagtttcagggtatgaaccaagttactaagccagtaaaacttggtgaggcactgaggccaggtggattcaatattttcaaggatgaatagatcatggagaaatgcttagactagtatatgcaaggagtctctaatttgtctgtgcatgtttataagccatttgagtaacctgggaaataggattcattttgaagttttgaactacaagacaagtgattaattgtctttctcaaaagaatctgcttggctattagtatcttgtagtagtaagttttgaaccagttatatgttatttagagttcaagattctttggccagtccagcacaatgcacttaagtaattcaatcaagtttactggcccattttccaaaactatgctcctttcaagagtttggatattgaaacagtaaattagcttgccgagcaatacttgactgtttaatgccttgttcaggtcctggaagaaacaactggtgatagctaaagatgctcgccggttggatgtattgtgtcatcggatttttttgagtcataagattcttgtctccacggagaagtacttggttttgcatgaaattgttgacacagcgatgaagaaactggaggctgaggttggtcctatatctggagttgcaaatatgggtcgtggaattgtgagccggcttgctgttggtgctgaagttcagaaactttgtgctcgagcaatagaaaccatggagtctctgttttgtggatctccttctaacttgcaatttcaacgtaagtttccacgtgcttcacgttagaccacatacatacaaatagtgttgaattctcatgcatatgtgcattttcaggttcacggatgataccatcaaacttcgtaaagtttgaagctataacccaaacatctgtcactgtagttttggatttgggtcctatacttgctcaagatgtaacatgctttaatgtatggcacagagtggcagccacaggctcgttctcatcaagtccaactggcatcatacttgcaccattaaaaacgttagtggtcactcaacttgtgccagctacaagctatatattcaaggtagttgccttcagtaactacaaggagtttggatcgtgggaagccaaaatgaagacaagctgtcagaaggaagttgatctgaagggtttgatgccaggtgggtctgggctagaccaaaacaatgggagcccaaaggcaaacagtggtggtcagtctgatccttcttcagaaggtgtggactcaaataataacactgcggtgtatgctgatctcaataaatcaccagaaagtgattttgaatattgtgaaaatcctgagatacttgattcagacaaagcaagtcatcaccccaatgaacctacaaacaactcacagagtatgccgatggtcgtagctagggttacggaggtatctggattggaggaagctcctggactctcagcatcagctttggacgaggagcccaattcagcagttcaaacacaattacttagagaatcctcaaattcaatggagcagaaccagagaagcgaagttcctggatcacaggatgcatcaaatgctcctgctggaaagaggtggtgattgttccacctcgatattctggctctattccaccaactgcacctagatatatggaaaatggtaaggatatcagtgggaggagcttgaaagcaaaacctggtgataacatccttcaaaatggctcttccaagcctgaaagggaaccagggaattcttcaaataaaagaacatcaggtaaatgtgaggaaatcggccacaaggatggatgcccagaagcatcttatgagtactgtgttaaggtggtcaggtggctggaatgtgagggttacattgagaccaacttcagagtgaagtttctgacttggtatagccttcgtgctacccctcatgacaggaagatagtcagcgtctacgtaaacactcttattgatgatcctgttagcctttctggccagcttgctgacactttctctgaggccatctacagcaaaaggccaccttctgttcgctccggtttctgcatggaactttggcattaaagagaggggagctcgtaccgttctctttgtaggggagcatattttggtcccattctttcgtagcagatcgttgcattgattcttcattggaaatttcattgaagcggttaacttatacaatctgttcattgctctactttatttgctatgacagtaggtttaatttatccagcaacttatttctgttttttcacttaggagtccatagtttacagttctgttatccgtaccgccatgttggtacagagcatcaagagctgtgctcttttggtcagctttaggaacattctgaaattgccacaagtgtgtgggtacctgaagctctgttgctagctgctgtgagagggagggatgattctcaggatgtaccgggaaacattgggatgaagcaggcttcgtgtcgacactgacgaatccgagctaaccatgccttgtcaggataaatgatgatgtggtgctgtatctggggttgaaagaaatgcaaatgtgctgctgacttctatggggaatgggaggagtcctgatgtttttccttttcttaagacaatagatgcaaaatgtctgcactaatgttatgttcggtttagacccttgcttttactgtctcctactgcactttcttgccttctagttctaccgtttgagaagttaaatttatgtgcacatgcaaaaaggtttggaccttggatcctgctgcaggtttcacttgtgtacctggtgtatgatgtttgatactatttgtcttgcatttctgtagaagtacggtacggtgtatgattgattgtctggctcggcagacggcagttggtcatggggtcagcagaaagccatgtgcagatcaggttggtcgatactcccgtgacccattgttttctcgatttgtgaagagagttgatgggaaggaacaagtaaacttctgaagcaactcatgatcataagatggtcatcattgtgcacatgatactcatagcaacaccagttcatcacatcgctcaaagattagatgttgaagttgaactggaagaagaggtacatagaacacctgcaaatgaagatgatgctgaagaagaggaagataactggttggatggatgctatgatcatcattgtgctcattatactcgaagcaacattagtacatcacagtagtcatcaaagatgaggttgaagttgaactgaaagaagtggtacagcacatgcaagtgagcaagagaccgaagaagaggaaggaaactggttggatggatgctgtgactgatgatcatcgaagcgaggatgaacatgaactgaacaccttggttcattcagctccggcgaccgtggccggagaagcggcggccgacggcggcttgtggacgacgaaggacatgcactggcactggcggctgctgtcgaaggcgatgaggcggatgaaggcgtccgggtactccctccggcattcctccacctcccggagcaccgccgccgcgtcagagcatccgaacatcggcagcttccacagcgtccagtacctcccgtcgtagtaccccggcatccggctgttgctccggtggatctccccctcctacaccatatcatccattcatagtacaaacttataacaatacatttttcttttgggtaaatactaactgatggataaattcatcatggagaaaattagtgtaattacaaaaagagttaggacaagtttgatgcttagtttgtaccttgtcaaactcgaggcaagggacccatcctttggacatgatgaactcgatctccttggagatggacttcgcgctcaggggaggcaggtaagacatcgcctcgtacctcctgttggtgaaagggttccatgtctacaacaaaattaaatcactcgctgaatttactgtaagctgattttgcaagtatttcatgccgaaaagaaaacactttgatctgatctttttcgactcctcaaaacaaaagtaacatatagatatgcagagaaagtttcatgtttgctgaattgctcacctgcatgcagtaagttctgaagccattggatgctgcacctcttcttgccctgcaggagccaggcaccaccctcctctgatcccggacaagcttggccggctgctccggcgaagcgacgacggcgccggcgacgaagctggccgtgttgatgaacatgatgtcgccggagtagagagtggtggtggtggccggcggtggcgtgaagaggttaagaaggggagagtagagcaaggtgacaagagatggagagtgtggtggcgctgggagaaggtggcaccggtgcacttgggatggcaatggcatgggcatctttccatttcctttataacaattaacaaaatgggtgtttcaaatatgtccctttttagaaacataaaaatgggttcaaatctatttcttgaaaaacatactattgtgaataaaattttggcgtggttatcaaggggaatggttacatttcttggtaagttgatgagttttaatgggacaaatgtggaaaatactttggctgtgtacatccggtttagatatagaggctagattttttttatcgattttctaaataatatatggaaaacacaaattttacagttttttttaattagaaaatcaaatgaggtgaaaggaaatgtcaatgttgctaaactatctctcatataaattcgtgatgaaaaaaaaaatctcattgatcatttttttctcattggtctagagaaacggtggcttcaagccttcaacatggaagttgtttgtctgtagtggacgatgggaccagagaccagagcaatggtggtgatttcttcctttggtgccatcgccgatcttttccccccataccactagcatgtaatcatgcaggccgccaacagaaaatttattgatcacctatggtttgatttgatggtggacttaatcatcattcaaaacagtaggtttatttggcttgttatgatcaacaaaacgaaataggctttgtcatccaatcatgtaaaagcatctttctgcacaatttggcaaatgcattgtgatattgcgagttcaacaactaagcttttctttatacaacagtcttgaagaatgtgatatatcagggtaaaagatttctggcattcctgatcctgataaaggcatgatctcaagcccttgctcaaatcggtttcagttgatcccattggcagttgatagaagtgaacagtgctaccagatgagagctatagattgtgttcaatttacaggttgttgttagtacacgtttcccaaatgatctaattattcaaaaatttctgggctagggtagtatttacagcaaaatcaaaactactgcagattccagtatctttgacagaataacatctactggccccttgcacttttatgctgcaaatgacgcccccttcactagcccatcgttcagaatctcggccaagtcattttccagagccaactcctgcatttagagtagaacaatattagtctagatgaaacacccataacttcagaagttcagaacacatattggagatatcctgatgccttcatttgagaatttgcagagaaaagatggttccttttttttgttttaccttgtcgctgactgaacgctggtggccttggtcgatggaagaattatctccagatgatgcaacgaatgtgtgaagacggatcagctcagggagcacgacggattccaagtcaggacggtctctgtgccggagttcacagcatttcagtgaaagctcagcaaacttctgagcttcctgcacaggccagccggtgacattaggatccaagagcccctcaaatgttccttcctccagtgcatcagagaccatgtaagcaagccccattgcatcttttgcagtgatcatctgaagatagatgatgccgagcgcataaacatcggatttcgtggtgaccaatccagtcttctggtactcaggatcgatgtagcagaaggtccctgcagcatctgtcatccggtactgcgtgaccgtctcatccatcgaccggggaatgatgcgagcgaggccgacatcgctgatcttgctaacgaaatctttgtcaaggaggatgtttccaggcttgagatcacggtggacaaaggcttcaggtttcatcttgtgtagatagagcaagccagtggctatctccactgccatcttgaaacggagctgccatggcagcggtggggtgcctgaccggcagaagagacggtcctcgaggctgccattcggcatgtattcatacaccagacagccatactcagggcaagcacccaacagatgcaccatattcgggtggcgaatgttgttcaacaactcaacctgttgataacacaatttaaattcttaccatcatggtttacagatatatcatttatatatagctgaaactgatgcatgatgtttttctttttagcaaaggactaaaagtaaatcatatgattcccttcccttttcatttttggatgcaccacaatagtctctatgatttcatattactgaatgttgagtttttcatttttgtgaatgaaatttgaaattttcacgtaaacacatcattgtctacatgattttgacttaacagaagtatctggctatctatagtgacaatattaccaaaatcaaatgataatatgattgtgctgctctgaaaacattttactgtcagtatctatcccaagttcccaacatcactctcatttgattggaaattaaagagattgtggtggtgggatacttgtgtcaaacaaaattggccatggacatacctcctgttgaaactgtttcagtccttgagttatgttagaatggagaatcttggcagcaacaagagtattgtcaagtgtagctttatagactggtccataacctccttcccctaccttcagttccggtgagaaatgatcggtggcatttgcaacctcttctgttgtgtatattttgcattggaatctagttggaagaccctccagtagtcttttcgtctcaattggccttggcaaagatttacacttcagttcaaggttgtaagccttttcagaagcacatccatgcttagaatcatttctaggcgagtaaaatttgggcggcaaacgtcttaagatcggatgcaccgtatcctgggaactatggtctttaaattcctgtatggttctctctctgcattgatcagaagaggaagtttcgagtttcaagagcttatgctttgggccacgaactgcggaactcggttctgcatttggtctctcactgtaggaatgggttgaacatgtcgtgaattcttgtaaatgttcatcctcatgttcaacacttgcatttgagttttcactcctgtctccgatcccaagaggtaactgcagtccaaatttccattagaattcatactttcagaatatgggattagagacaagtaactttatgagataaacaataagcaacacagcacaaggtatcacaattaccttgttccacatgtgcatatcgtcatttttctgtttcagctcaagctttaacttccttatttcagcctccaaatcttcctgcaaaaagcagttggtctaatagttatatttctgcaagtgacaaaaccaaaataacaaagagtaggggaaaatatcaaaagcatactgggtagtatttagaagttgattcagtacattcttcactcaggtttggagataaagggttgcagccaggacaaagtgcactatcataaaaaaaaaaactcatttatcaaaacctgggtagtttgtatgagaagggcacatatttgatgtatccatgaaaacatcaaggaatttatgttagcatatatatagagagaggatgcaaagctcacctagatgaattttgcccttcaatatgtattattggtgctggttcacctgcaaattccacatgcacctaatgaacatacaactcacaagtatactagagtgaatatcatctaaagggaattagcattagagtaacacaaactttttgcaattagcggccgattttcagatatattctccagctcttctttgctggtatcatttgcatttgcatgggtggcaagcctgaatgaagatagtttccctttggatataacatacactgaacagaaatttggtgcagattttgtgacacatgttggcacatccaacttccatattgtcctgcactagttaagaactgagatcaatatagcaatcaaaagagaagtattaaaacaattcagaaaataaactgtaaatagaaatggttgcaattttctttgacttaatggttgtaaaataatacggcaccttgtaaatgcattcctagatgatgcccccagtactaatttgtcaactttatggtcaaggacaaaatctataataactttccacacatcagttccatcaagaatggtttccctgcattgtaactgtagatattaaagcaagtcagccaaaaaagggtcatgattttgctcatgctatcatcaggtcaaacaaaggaaagcaaaatcttaatagattatatgaaaagccacatgaatgatcgatttcaggtccatgccaacatgagcattccagtctgtagttttcagaaactctctatatctccatagattttagattccgccaaaatgaacataatctctgcgtgacaaggtagaggtaggaaaaatggatgcatacccctcgtctgctgcagaagcactggaatgggagcagcagatctttggtgtgatgatccatttgatcaggagaagaagctgcaacatcatcctgcacgtgcaatagggagaattgctttccccctgcataaatgaaaaacttggaaaatttataaactctaacaatacaatgcaaaattcacaattcatcaatgcacatcacatgaacagcaccgcaacttggatgcacatcaaatgagacagattaaggtgggttcttttctccccttttccaacctctactcactagttttctacgcgcacgatttccgaatactgaacgatacgtatttttgcaaaaattatctatcatatcaatcatgtcaatcattttttcaagtttattagccaataacccaatacttcattaatcgtgcgctaatccatctctccgttttccgtgccgggatcccaaaggagatcaagatcacgtcaagatcaatttctagggttgagatgggtgagctgaggggggaggaggatcgtaccggcggagtggagggaggcgtgcttgcggcggacgtggaggaggaagaaggggtgggagagcgagaggacgtggtcggccgcccacttgagcgcgtgctggctgcccctgtcgccgtcgacggccacggccgccaccaccttcccgccgtcggctgccgcgcggtggtccatctccgccagccgcctcatcgcggcggccgccgcctccttcttgccgccgccgccgccgccgtcatcctccttcttcctcgccgacaccgggaacggcgggtggacgtggaacgtggggtacgacatctccggcgaggaggaggaggagagagagagagattgtggcgccaaaatggagggaagcagcggatttggagggaaatgctttgcttcgcttgcgagaggagagtttttcttttttttttttccctttttgtccttctcatattattgactaaaaatagtccagttattaataattgaatttggacgaaacagaatactgaccttttagaaaatacggtcataaatatttgacgttaaaatcgtaatttgatgatttgattaagtttttgaacccttatgtatttaatattaaataaatatgatattatttttcgaggcaaatttaattacacacattatatttaaaaaaactactccctccgtattttaatgtatgacgccgttgacttttcgaccaacgtttgaccattcgttttattcaaattttttgtgcaaatatgaaaatatttatgtcatacttaatgaacatttgatgatgaatcaaatcacaagaaaataaatgataattccataaattttttgaataaattttttgaataagacaaatggtcaaacgttaaacaaaaagtcaacggcggcatacattaaaatatggaggtaatatgatttttgaaaactttatactaaaagttaatggcatcataaatttgaaatgaaatcgagggagtatattaaaaaatatttaaaaacagagtactagtaaagattggtaatctatgattaagtcttgtcctgttcgctttaccagcttaaagtaatctgaataatagattgctccagttcaatgcgaacacatcaaacagttcagtgcgaacacatcaaacaaaattgtgtgatttttgctgcaacaatcatatggttgatggatcatcattcatgcaaggctctcatgctattttttcacaccactaatcctggtaatgaaatgtgatggtattcataattgcctctttgcttcaccggcttgaagtaatctgaagaacagattaactgcttaatctccagttcagtgcaaacatatcaatttttttttgtaatttttggctgcagccaacaatcatatcctacggttgatggacgcctccgcttgttgacagaccgatcgattcacatggcagtttgaagcttgggtctcttgaagagtcacggatggaagaactggagtcttgtctggtgtggagttgctgctgaaccatgttaggatgacgaatgttgttcaataaccaacctgttgataaacaccatttaagtaatctcatcatcatatggtttacagaatatggcatttacataagctgaaactgaagcatatgatgcattcttgacaaaggtctgatgctgtaatttcttttggaaatcatatgattactttccttgctgatctgctaaagataaagagaacaaatatgaaaggtctgccgtcatacctatgttaacttcagaaaaattgcccaactgggctaagaagcttcccttccatcacctgaacaagttactgtactggagggtcgttgttgccaattgttgcagttcatatacattggtctgcagtaaagaggataataagatatctgaatcatcatatatcatgggttatcagacaagaaggaaactacaaaattaatcagcgcaattactgatgcagcttgatccagatgcctcaatgacacatgttctactggacgatttgcagcttttcctggcaaaaacttggtctcatggagctcaagaaaccagcacacagtagccaggtcagtctttgctagttgagattggagtatacctgaacagaacaccatgcttatggcgtgacaatcttgatgcaacctatatcagcttatccaataattccacactagaaccaaagcatgttgaagttgactaccactatgttagagaaagggtggcacataaattgcttgacattagattcacttaagccaaagatcaagtcgaacaagaattctgacaaagccactcccagtgcacacgcacatggaacaccggacaatctcaatctgttttaaccaggatggcatagaggatgttaaagtaatcgatgaaggcataaacaattttttttaaaagaaattgacttacaataggaggcccaaccatacagcacattctgatctattgctcctaagctcacggttcagttctatccatccagcgccttctgttctactgctcctaagttcaaagttctgttctattgctcctaagcttcagttaggtagtgacattaaaaaaagaaaaggaacaatgggagacaggagtgctaccgatttaattaagattagaaaaaaatgcataaagttttcaggatagtttgagaaccagaacaatctatatgtaaaaaacaattatagttgatcaacggcttgagaataaaatggattgagattgtcttcttcaaagaatcaaagtaaatctaatcacttttataggctagctgcctagctccttctatagactcagctaggaaacaacttgaggtgcatgctttgaatggcaagacaaacagaaacgacgaaacgtgatgcactgcgacaaatctaacctaaaaagtggtgttttcagttggcatgggtgccatttattcccaacatatatggatgtgaatatgttaatatatctcagcaaagaaatgcccctgatgcctatatggatgtgaatatgtcattgtattcatcaccagcaaagtaacacccccattacatacacaattttgaggaacctaaaaaaaccaactctagactaattgccacattcagagactcaactcaatcccaagattaatagtaacagacgggaaacaatgccatgctaaaacatctgcatgcaaactttaaaagttgtgtgattcgaatgttggcaatgtaatgaaaattcaatcgatggcaatgcaatgaatgatactcctgagtattcattatagtctagagacaggccaaatgaacaaaacaatattcacttcttttttgccaatgaactaaagagggagcatctattttccaatttcctgtttgaaaatacagagtattacaagaaattgcataatttcaaaatactccagctaactcatcttcaccaaccaaataattgattgtttacatgccttatcatagatactccctccgttttatattataagactttttagcattgccgacattcatacgtatgctaatgaatctagacatatatatactccctccgtttcatattacaagactttctagtatttcccacatttatatagatgttaatgaatctaaacatgtatatatgtctagattcattaatatatatattaatgtcggtaatgctaaaaagtcttacaatatgaaacggaggaaataggtacgatgaggacgttgtgaaatcaaagaacactatggcagaggactttgtgagcgatgctgtaacgctccgacttgtgcttgatcatccggagctcaccacgggaggtgcgctccagctcaacgccggtgaagacagcgaacctgtcgaaccgctgcgagaagtcgcagcgcacctcgactagctcttggaagaatctggccacgaagaacctgctagagccaaggtgcacaaggaaggcctcgaccgggatccattccctcggcactgacagctccatccacacgttggtcagctccggccccgtctccggcgaggcggcggcggcgaggtccacggcgcagagcgggtgcttgtccctcctggaggaggagagcccgaaccagagcttgtgctcggggacgtactccgctaggccggcgaacggcatcggccagtcggcctgcttgctccagctgcagctaaccgtgtcgaaggcgtaggtgcccgcgcgcgccgtggagatccacacctccgatccgccgaccaccgtgtaggactcgataggcttggggctgtagcccggggcaaacaggaatggcggcggcgggagcgcacgggagcagtaagaagaagaagaggaatccaccgccgtgacagcctcgaagcaatggcggccgccgcagggcaccctggggtacaggtcgaagaggtagatgtcgtcgcctacagggacggagactggccagtacttgggtttcagcggggtggtctccgcgagcagggcgtgcgtgccggcgtcgtagatggcggcgctgtcggactggtccgtcaccagcagcctgtcgcgggcgcggccgaagagcatcaccccgatgtcgccgttgctctccggcggggccggagctgggtagaacgacatggagggctccggcaaggaggattcctccgtcaccaccgccatggacgacgggctgaacggcggcggcggccggcgggagaagaaacgcgacgtgtcgatgtggcggaggttggcgctgccgttcaatgcggtcaccaggtgcacaacccgccgcagtgaacccatcctcttgatgctcttcttcttcttcttctacaccccgtcctaggtaggaaaccacatcgattcgattcaatccaatccaatattatctttctgaaaaccagatctcccaaaacaaacatacctgtgctgtggaagaagaaagaagcgacaatttgaatccgatcgtacgagcaacaggtggtagcgcggcgggcggcggcggcggcggcggcggcggcgggcgtggtggcgagggtttccttcccttgtctgtttttttattttttatttcccctgccttgttctgtttatttattgtttcgctcggcccagcaccaagacaggccaggggctcggcccaactaaggcagaccagcccgcgaggccgccgccttctccgcgtgtcgacggtggcagtggagaggagtgcgttgatcttgagcgatcgagccagcggtgtcgcacccatgcatgcgcgcgccgagctcacaatccgccgccagcaacggcgtcccgttcccaacacccgcaccgacatcgtcaagacgcaccacgtacgtcggccgaccggtcggatcctcggcttgccatgccatgctcttcgactcatatgccatggatgcgtacagctgcctactggttccaaaatacatacccaacgattttgctaaacgcgaagtaatcgaagcgagaagtctcccgaaataagatttccccacaaaataagatttgggttcatttcaaatccctcggctcgcgactcctgcctgcgtcgtcgtcgcctacctcaagccaaaaccatggctggggcggggctcccaagctggtgggcgctccctctcctccgcgtgcccacgtcgtccgccgtccgcatcatcccgtcgatcgccgccgccgccgcgcgcggccacgacctcctcctcctccgcgcctcctcgtccgaggccacccggggcttctcgtcgtcgacctccgcgcccgcggcaccggcccacgccacggctgaactgctccagccgcgcaaggacgagccccccgcaccagggtccgccaccgccgcacgttctcgtccgcggccacccgcgtcgtcgaccgccgcggccgcactggtcgagctcgagccgcagcagaagcaacctcccgtgccggcgtccgccgcggccacccgcgcctactcgtcatcggccgcactggtcccatctcccgcgccggcgtccgccacgaccccacccatgaagcagcgcacagggcagcccactccggcagcgatcaagcggcagcgccaactccaaccggcgccaacacgtgtggccggaccagccgatctgatcaacctcgctcaagcgggacgcgtcaatgaagcgatccatctactaagccagggagctcgcgggaattgcaaggccttcgaagagctcgccgcaagctgctcgactccagcactgaaggaggaattgaaagatgtccaccactacttcctgtgctccggctttcacaacgattgcggcgtgaacaacaagctcattgagatgtatcccaagtgcgatctgctcgagttcagtcgcaggacctttgatcaaatggcctatcgtacccttgactcttggcttctcatgatcgaggtcagctacaatgcggaagagtttgaggaggcgttctggcttttcaagcagctcaaaagtaattaccatgatctgcacaaaacaaagcacctgatatctccagttggatcggttgaactgatacaactatgccgatctggcaaggcaagaaaggctctcaaactgctagagatgggagtgcacgccaacctgcacgcattcttcgagatcgcagccggttgccgtacgatcgctgagctcaacctggtgcgcggatgcctgcaacgctccgcgttcagtcacaacactttcatcaatagcaagactgaccaaatgcaagccaagtttgagcagatgcacgccaacctcaagaacaaggacgggcacggccatccttagcccttgtggctaccaagtataccttctgcttcgtcacaaaagattttgcaatgttgttttgggtagtatctaggcatctctctcatgatggtagacgatagatatatttgctgacatgaactccgagcctcaaattacatacctactgtaagaaaacaccgtatgccacttggaacttaattacatgttcgtctctttcagcgtatgttagtgggccagctgctccaatagtggtgtaagtagaggttgttctaatatattcaaatagagcaacctgtaaatgcatttctagatgatatgtcccaatactaacttgtcaactttatggtcaacaacagaaatctagctacaatacctttccacgtatcagttccctcaaaattgatttccctgcattgtaacggttgtacgtactccctccgtcctaagatatttgacgccgttgatttttcttaaacatatttaattgttcgtcttattaaaaacttttgtgaaatatgtaaaactatatgtataaaaaagtatatttaacaataaatcaaatgatatgaaaagaattaataattacttaaattaatttgaataagacgaacgatcaaacatattttaaaaagtcaacgatatcaaatatttagggacagagaaaatacaacggtccgaagatgtatgtgatattccgtgcaaacacgaggagttttttacaaaaatgcccagccctctcaccgggagcagccctccaccccaaccggcaagtatgcacaccacaatagcgcccaaattagaaactagaaactattaagtgtggcgggctgggcggccgctcgactatgccacgtcagcgattcggtacagtactacagtgctcgggtgtatttttgcaaaaaggccctccagttttatgtaataacatatatgcccctcgcgaacagtttttggagaggagaatccgtggataaggacctatatgtaaaatattaagtgtggcgggctgggcggtcgctcgactatgccacgtcagcgattcggtacagtactacagtgctcgggtgtatttttgcaaaaaggccctccagttttatgtaataacatatatgcccctctcgaacagttgttggagaggagaatccgcggataaggacctatatgtaaaagtggaatatgtagggctttttcgcaaaatggcgttcactacctaacacccccaaaccctatccgttgccgcccgcaccctgtccctctccctctccagcgccgccaccgagcggctcgcgccgccgccgccgccgccgccacccctcgcgccgccatccccaccatcgccgtcgccgtcgcctcgcctcgtcacggccgcctccgccatcgcctccgccacctccaccatcgtcgtcgtcgtcgccgtcgccacccctctcccaccatcgtctccgccatcgttgtcgccgtcgcctcgcgccaccacggccgctgccgcctccgacttccccgtcgcctcgcgtcgtcgtcgccgtcgcccgcccccgccaccatctccggccccccaaaccctagccgccgccgcccgctcgttccgacggggattcggaggggtcgaagggaggaagaggcggtggcggtcggcgaagaggatgacgatggcgacggcggcagcggcggaggaggcggacgcggcggtgggagatggagacggtggtgatggcggtcggcgaagaggacgacgatggtgacggcggcggcggaggaggaggcggatgcggcggcgggagagcgagacggtggtgatggcgacgacccccgcactctctcatggcaatctcgggggaggtgtcggggaccacggcaacgctggtggtcatcaatggattcacggtcacggtggagtcagtcggggactcgcggtgcatcctggacacgcagggtggtgaggtgtagctgctgaccgtcgaccactgcctggagaagaatgccgaggagcgggagcgggttagcgccagtggtggggaggtcggccggctcaatctcttcggtggtcaggaggtaccaattcgctcccgagaggccagattgaaaaagagaggcttcctttgtgatgcattgctgtgtgacgctttgttttcagtcggccatgtcctgctttgtgatgcattgttgtttgatgcagttctaggttggccctctccggtgctagacaggtggcatgtgcctttcaagatctattggggacctcttcctgccgctcccatcatccctagttgcccgccccacatcccatcatcgacggcggcgtggattttggtggtcgcgcaggtctggctgacgagctccatgccggctcgaagcagatggcgacctcaacggcaacgtggatccaggctagagcttgataatggcactaatctgccaacgagcttggcggcaacatgcccggcggccgccgttagttccttacccagcgccgtctccaccgtcttcgctgcctccacggtcatggccagcggcggttgaccatggcatatgctccggcaggcaaaagcagagagatggccttcctcccctttctctcccatctctccttagattaatctctctctctctcaggctgccattgttgttcttttcatggataaaattgttagggatcggcaatatttcctattctaattgtgtcttgactgaaaattagttcgattatattcagagcccgtggttaggtgatccgagattggtgcttgctggctggattagtcaattagaaaaaggtagattttgatatgcagtattaatttgatcttgtgatgatcttagttcttgtaccctgccttcccttgaggctacttctggatacccaaggccctagcgcgaagacgtgtgagggggctgcaggtgagtcgggctatcgccgtggagcgaccgtggtgaagcagcagctctacagcggccggatcagtgcggtggtccggtggctttacggttgctagaggtgtgaatccttgcttcaatggttagagaaacttagatgcacctttgctgcatgtttcttccatgtttcatgtcttctttctgcagctgttgctgtttagggtcaactaggaggcagtgtctgtgtggtgattcatcacagttgcggcggtctcgacctacagcatatgtccatgatcgatgcgtgacaagagccgaaaaggatcatccattgtgtgagtgtgctctatgcggctgctaagcaaacaaccaattatgtttcactgttaaagtttggctgtaatattcgattaaaaataccttgataattttacctcccaaggatctaaatgttttgcctttgatttaaattgtttttcccctgatggctgatgcagtgatgcagtttttcaagcaagtggataagagcagcaagtattatgaatttcgctgcaaaactagattagtgaaaccatcaatcctccactttcaggtgagttataattcattattctatttaatgcaggataagctatttttcctaagctattagcatttggattattctgtatcatcacggagttgctacaccttatttcactgatcgtatgtatttgtccatgtcaatagaactaagaagttcaaaaaattgtatgaacaataatagccttaataaagggacctctgagcaagaaatctactatcccaggggaaaaattttgtaatattttgaaggaaatgctatggtggttaaatacttaaatgtttgcatgttgaactgttaaaaacactcataacttgatgatcttttgacagaacctatacaaggaagggctcttggagcaactgctacagtcaactgctctactggttagttggtcacttggtcgtcacttgtcaggtagtatgcacaaccttttgtggtatatcatctgctttatctaaattagtttggctcatttttactaatgttataactgtgtgtgcagcctgacggtgcagcatctaaaagctaacttatacagtgtgctttatctctggtatggctgacctcagttgtaagttctgaattttgagtggtgttggttagaaccatttatctgattgctcttgttcatgatgaatggcaatataatgggattactcttactcaggcattgatggaaagtttcaagatttgtgcagtcaatgatggcatcataaattgcgtggatatggtaaaaatatatcatttaccagttttctcttttgctgaatcattgattgatctactatatttgatcttgatcaaatcatatttttgaactaatgtagttctttgacatgaaaaaagcttgatgttaagtacagaagaaccaggtatgcataatcattgtgtgggttcattttcttttttcttctatagagttgcatgcattttcctttttgcttcgcccccgccccctgaatagaagtgtatacggagaactactgatctttagaatatcagagaaaaggtctaatctgatttgtatgatctctataaggatttggaactcaccagaaacatccaatttccatttctaagatagacaattatctttaccttaccctgtaattttttcgtttgaccaccgataattctgattccacatggatcttttatgtactttctcatccgccatctttattcttgtaacagtggaaatgtacatcagagaagcccctagaactgctcctattacaaataagaccgtaacaagtcattaagctaatgtcttaagggatatattatgtactcactttataaatcaatgcagttcttagctaatacgtgctcatgtgatgaagtatttttgtgccttttcctttgctttctgcttgattgatgatttccagataaaagttttagatgatactaacaacagttttttcactctagaacaaactattaggtagtaatacaatgcttaagaaacactccattatggtgtaatgtcttcatttcctgactgcttatccttctatacctcttaaacctagccattttatttgtttataccgaaacctagacattcaattttgtccggcacttgtactataagtggttagtagatgatgccatgtatgttatcttgggacaaaagtaagataattcagtggcttgatgaaactgtacaggaatatccccttttttagtaatctattgtgaaatcagttgctagatgtttcactaatcatgacgggtgggttagtaaatatgtgcggattattaccgggtaatacatttatccacatactgatcataattcagaggaacaaaatatattggcattgattatttattctgattgtgaggttaaggagtattcagcttgcaagtaataaaattgtactactacatttgtacctaggaagtcagctctttctggtaaaaattttagcatccttttattctaaatatgttttatatcttctagatttatttctttttcagggcaagtcactaactttatggtattggagttggagtagaagatcagcagctccatcatcgacgatggcctgatccccaaacatggattttggtggtgatacttccagggaggtaaaat

SEQ ID NO: 8433 - DNA, 19015 bp, Oryza sativa
gcgatcagatccgtcaaaatagaagtgtaacttttgctcagattatcgagccttcacgatctctctcactttcactggatcgtcgaggaaacgcaagcacttctccttgaggccatcgcaatggtgctcccgggcgaatgcaagcatggaaacaaccgttctcccgttcacgtactcgcacagtttgtgctcgcacaccagcctcagcctctccatcttgtacctgctcgccgccgcgaccaggtccgggagcatcgccgccgcgtcccctcctcctttcgtcgtctctggctccggcagcgagtcggtgtacatgtagcggagcagagcctcgaagtcccgcgcctccatgtcgtcgatgcgtatggcggtgtgatccaccgcgccgccggtcgtggcacccagctccttgcttggcccaaaaagctctgcacggaacaccggagaccgggccgcgagcaccagcctgtgtgccgcgaacgtcttcccgctgacctcgaacgtcacgtcggcgccctccccggtggcgaggaggcctccgaggtgccggtgcaggtccgacggtgggaccaccaccgtaggcggcggcggcggcggcggcgttgcggtgtctacgtcgatgtcctccgtctgcagctccatgaagacggtgaggtcgcacacgatcgtgaggcagtcgtcccggagatactccgatttctccagcacgtccctccggatgaaactcacaaacccccacccgctgcttttgaaggcgtgcgggttgcctcccggcacggtcgagcaagctaaacttgaactgagctttcacgtctacatcgtcgtcgaggttgaggaagatggagatgcagttagctttgtccgagtcgttgccgctgggatagtagctgatgtgccaactatggcctccgacgcggaaagatcgggacttgacgttgctgccgggggtcgggagcttgtccttggtgtgggagtagccgtcgatcttgagaaggtgctggccgctctccgtgccggctatgatggtggaggcagaccgcaccggtttgcggctgccagtggaggttggcatagctatggagattacgcttgattatttatgatcacgagggccacaattcttgctgttcaaggctgcatatgtgtgcggaattaagcaattagtaagggtgacacgcttaattatatagattactccctcgatccgtttcacattatgagtcgtttgacttttttcttagtcaaaacttttagaaaacaatagtaacatttatagcaccaaattagttttattaaatttagcattaaatatattttgacaatatgtttattttgtattaaatatattttcctataaacttagttaaacttaatgaactttgactaagaaaaaaaagtcaaacgacttacaatatgcaatggagggagtacatatttatgcctcattggtatatggtgccaaacattgtctattcagtctagtatttggtcctaatcaacgaggcaatatggagagtcactgttggatccaagtattggtctaggtgggctgtggcatgaggtatagaactaaaaactcgttctattatggacgtaattaatcaatggttgtgtagatttatgagcaactatatatggatggagatttagcaatagtatttccttatgactatgttattcctctctgtatgttgaagtgtttgtgattctttgttatcttatggattttatacattggtagtcttaattatgggctgcaaattatgtaataagtggttgtaaattgaagtaaaggccgagattcccattaactaaaagaactattaatcaatggttgcagatgatgttttttaaaatgttgttactatgaatgcgacctaaattatgctgggtcagcctgggattttatccgaattacgaattacctgggtatatagatgaatatcgaacggatggacaatggaagtaagtgtgagagacaaaactgaatgtctggttaggtgtaaaaaaagaagaagcaaattgtcaaattatccatccattttttcaaaaatagatcaagctgcatatccttttaatttgcttttgcaatgattctactgaaagacagaaagacttctcgcgcggaacttcatggagtacaaataatgcataacacacaaaaatagaagtagaagaagaagggatacaataaaaagtttgagcgtcaaagtcaccaaatgcggccaattaatcatggagcgcaaatgtacaatggatatgtcatcttgatgaagctttgaggcatcaacgaatcagtcaccgtgcaaattaatctagcagagtttcaataggcatatatgaggttcaaacaaagaaaggattttacacacacctgaaggaccatccgaatcaggtcagacttcagagacagagatatgtcgttgattttgtcttggctggagatggtttgatccagctaggattagctgctgttgcagggtcggcagatgtggcatctatcgacacagatttatatcggaagcaacagagagaggaaaaaaaaaggtcattgcttagctaatttaatttgttgttgaatctccagcttccttgcaagctaccgtctactcctagctcacatggatacacgcctgcaagtaatccaaggaatctgggaacctctgcaggtctgcaatcctttgctcccgacaacgggttcctcttcctcctttggtcagggcaaaaacttgggaactcactgagaatgagtataataatacagtaagttaattatagttgggaaaactgatccaaccactagaagggaagaactgattcagatggaccagatattgttggcctcatcagtttgttgttttttctgtgtgtttatttttttaaaaaaaaactgttgtggaaacaaaaacacatcactgaacatgtttgtcagagatgcatacaaagactggcacacataaacaaaaaaaatgctggaggaaattccaaatttacactaaaacaaacatggcagataaattttactacttccaaccaaaaattaccatgtttatccattttcttggattccatagaagatgcacacatacacatatcactatgcagtatacacacacacacaccccatacatccaaacaagtgctcctcctagcatatgttcaaagagggaccgacgacaaatcttgatctcgataaatttctattgaaatacattcgcgtgtagtacttgtgttggagttgtattacaatgcctgttttcttttatcattccatttaataatttattttccctcttcttaattactactatatacatatatacatgttgacacatggctacattagaggactcccaaactggttgcatatttaggcccactgtagctcagctagctacgtttagtacagcagcgagcttggcaattaggtcctttaaaatagaagggtaacttttgctcagattctctagtccctctgccttcacgatttccctcaattttactgtatcatcgaggaaatgcaagcaatcggagaatattaaggacggcgggatgggcgctcgctcgttgcgtccacgtcggattttgctacagtagctacggtgcgcacggggtggaaattatgcgaaaaagccctccgatttttcgtaataatgtataggtccctagcgtcctgtgtttgaagaggaataatcgcggacaggggcttttttgtgatatgtggaagaagaggggcttttccgcaaaacagcatccactaacgcataccccccaaagccctagctgccgcctctccctctcccgccccccctccggcgccgccgccgcttgcgcctaccctcgtgccgccgccgcctccgcctccccctccccctcgccccatccacgtcgccgagcgccgccgccgcctccactcccgccgcctgcgcctaccctcgcgcagccgcctccgcccccctccccctcgccccgtccacgtcgccgagcgccgcctccgccccctcgcgcgccgcactccgcctccccctccccctcgccctgtccaccccctcgccctgtccacgtcgccgagcgccgcctccgccccctcgcgccgccgcctccactcctgccgccgccgctgccgccgcagagcgccgccgccgctctccttgtcccgcgccgccaccgagtgcctgccatctcaccctctccctcttcttctcccgccgccgccgccgctgccgccgtcaccgagtgcagccgtctccacctccgccaccgccatcgccgtcgccgagcgccaccgctgccgctccctgctatccctttctcaccccgcctgcctccggtccccctgcttaccccgcctacctcccccatgatgcggcggcggcggtggcgacgacgacgacggtcgatggggtcatttcctccccacagaggtaggggtccacgctggctgcggcaaatttagtttgttcgcgctgttcagaaacggtggtcgcgtttcatgtgtacgggctgcgtttattggtgcatgtgaaggcacgtgtctttgagtgtgtctgtggcagcttgggcggttcatccgtggtaaagagggaaggggacggcgtggcattttctggatgcactcgcatttcctcttcgtcgttggccgcgccattccgtgcgatttttgctccgatatcagcggctccattgttttgcccccctgatttggtattgaatcgatgctctttctatctcagtgccgaatctgcatgtctggtgtgatttcttcctccttatacattttctccctggtaatggatggccagttaattggtgttggatgtttgcttgttgttcttcctcacttgtcgctgcatatcagagcatggtacaaatcgttcagggtgcccgctcacaccactcaagatgctctgattgggccattgtggcgtatgccagtcgagtctcgtcgctgcgggaggatcccgccagtgcggccagtgtcaggtgcactcaccaccactcgtcgttcgagggcgggacggagagctcgagcatgcctggtcaatggcagccggtcgtcggggctgcgaggtggttggtggtgtctgtgcgtgttccggcgagtggtcggtcccacggctatagccaatcatgctccgctgctgttcgggccccacgtagtcgtggtccatgccaattgcagttggccgctgtagcaggctccgccgatgtgccctttgtccggcgcagtgttactgctcggcgttcgaggcgaacacggagagctcgaggatggcctccgttagagcactgatgtgttacgtcgtatgctgtggctgaccgatggccctgtcatctgtggggtcctattgacagcctctgagtatgttgttttttatgttacatatttttttgttttgtttaccagtataagtagctcattgcctgccaatcttctctttcccttctgctttttcaccatttcctttgcattgccttttggtgcccgttcgctgtttttcttgtcgtctgttctagcccattctccgctgttgtgctttcttcgttcgatcatggaccctggggggtgaacgcgtgtgctggtgggttttctgtatctggcctagctgccttcctttctgtctgtgccgtgtgtttcctttttatcctgtaattaggcttggtgcatttcaggtagccatgtattggcctgtttgttgcacgggacttactgtcacagagtttttaggttttaggcgattttccccgtgttcatgtttcccttttgacagtggatcattgcttatctctgttgttcttctttcagtatatacttctttcagtaaatagatggtggctattacatagatgaagcacacggtcgttagttaatgacaaatatcattgttttttttattcctggttctgattcattattggatcatgtttcaccattcagagtgtgtcccgtggtgttttcttttcgtgcagaaccatgtggttcatttgtatttttgagtctttccttaagtgcatctctgtacgtttacatgtttttttttttgtcccttcatatcgattttttttggcgcaggtgcttattgtcgcggtcaggtccgtgcgatacgtttgttgctgttgtgctgctgttccctttaccatcagctcctgttcaggtgagctttgtttctttgctatttctttgggctgacatcctttttgttttttagtttatttgtgccttgtggtttggtgtatgttctttcttttatctgatatctagcttaaattacattcttattccctgcaggttgcggaccgcatcttctgtgcctgtacatgtcagctaaggtataacaattggcctctgatttcaccgccgtttgggatcgcgtccctgacgcgggagtagccctccgtcttgagcaggtgctgcccgctctcggtgccggcaacgacggcggaggctgaccgcagaggtggcctacggctgccgccggtggtggacatggcctggccggagtcgatcgttctctgttcgttcactgaatgtacctgggaaaattggcagattgttttcacgcctgaagtgaacgttgctttaatttatttcttaaagtaaaatgcaaatagcgatgaattacgataggtatcaatgcaatcatgcatatactccctccttttgtttcatattataagtcgcttttatttttatcctaatcaaaccattttaggtttaaccaaatttatagaaaaataaaacaatattttcaatacaaaataaatatattattaaaatatattcaatgtaatgaaactaatttgatattataaattgttggtaatttttctgtaaatttgattaaacttaaatatgtttgaataggataaagtcaaaacgacttataatatgaaatgcagagagtaaatttgaggtgtaagttcgaccaaccatcaaagacaaaaaaaaaatccactatgaacaatatttgcactttttatcaccatgttttatatatatttgtcttttactttgtaggtcaagtttaaatttaaaatttaggggagtgaatgtctgcgatcgtttctccaacaactcttgaatgaaattttggatacttgtggcacgtttttttcaaaatgctaaacgatatgtttcgtgtgaaaaatttctatatgaaagtttctctaaaatatcatattaatccatttttcaagtatataataattaaaactcaattaatcgcacgttattaccacctcgttttacgtgaaacacttaatgtttatcttcatcttcatgagattcaaacatgcatgtgctctacgtttccctttttttctgtatttttcattgccttttggattgcatttgtgaagtaaaggtacgcaaaagattatccttctagggatgaaaacaaaatggaataaaattacctggccgaatgtttcggctaggccctgttaaaaaatggagcaattagtttgtattttccccaacattttggcaaattgaccgttcaaaaaactaattgcaaaacatatcgtaccaaaatctacctgaaaaatagattgtttgcgcagtacaaactttgatgaatctgagctataatattttagcaatattaacattggcactaaggtattatttgaggtggcacgactttacagtatactgatttagcaccaactgccatcacattggtgctgctcgcagccttctatggacagctaccgtcacattcggttcaaaacccctggtccatagttttttttttttcacttacccggtttttagcttgttctttaaggtttttttaaaataaaaaaaatcacatattctcaaaaaatcattttattttcaaattggaagttgaacttaacttatataatatttgtattttttttgttttttctctaatttttttaaatcacgtgttttattttggtgtctattgaaggacacgcatttatctggtggcatcatttttccaaaatgatccaagctcattgccaccacaactctacccactcgaataaatgtgtgtccttttaatataaaaaaacatgtgattttttatctcatagctagataaaatgaatcttttgcatcaaaactaaaaggataaaatgaattctgaaaacatgtgatttttttagtacatactccctctatcctacaataaatcaaaccctagcttcccaatgtagaattagtgagaaagataatggaccaaaatatccctaattaatagagaagttagtcaaacctagcttcccaatgtagaattagtgagaaagataatggaccaaatatccctaattaatagagaagttaggtgaggggtattaaaggaacaaaatttctcgatctacggtctgacggtagataagaaggtaggagttgatttattttagtacaaattcaaactttagaagttgatttattttgtaatggagggagtctatgtttgtgatgattctaccgaaatgggatgtgcaagctgccatagcatgcagcggctgcagcagttcaaactagctgcaattgacaaccatttacaaatgcagtagctgcagcggttgtgacagttcgcatagcggaacatgcccagtaattgcaatactttcatggaatacaatacaatataaatgaattaggaaccctaacaataaacctactcatcaccctatgccattactgcacccagcataacaaaatgtatatattctatcaggctgaatcattggcatatataaatgattttcagtcagtatacacatttagcagacccaattggtgtaaagtacaaacaaacaaagaaaagatttgcacacctgaaggaccctaatcggatcagctcagagatagtatggttagcttagccggagataaatcagactgttgtggcagggttattagcagagaaccagacacatttatacaggacacgagttagaaaaagaaagaagagacgaacaccaagacaggatcacaggatgtgtgtccagtcattgcctggcttatttgccacaaaaaattctccagatttcttgcacgctaccgtctatatcgtgcaaaatgaacgcatctgaacgtactccctcccacaagtatgtatgtaacccaaggaagagagagctagtaccaaaggcaaattcttggaaaccatgcaacaactgcaagcctgcaaaatcctttgctcccgataacggggtcctcatcaatcgaatattcatgccaaacttggcagctcagctaggccacatggaaaaacccaattttcacaagaatcggaaaaaagaaactagacccccagcctttttttcttttagagcaagtttaatagtaatatggataaaatcccttatatatatatattttaggatggaggtagtaatgtttttgtaaaaaggtaaattcctgatttagactagaaccctgaagtccgaacctatccgcttccactaagatttgatattcacttacatgcatcaatccgtttttaaaaaaagtcgacggtagtgtaaaaaaagaagtcgatgattcagaacagtttagttttatctcgatgatcagttgccttatttaattaggacaaaatatatgtgcaacaaccttttacaactcaacagatttatttatactggacatgttatctctactacttaaaaagttcgtagtggtggtcttgattcctgacacagcagacgcatgtgacagacacgcctaatctcaaccatccgtttgccatatccaatgatcgatctcctccccacgctcgctcctctctcgatccaagagatcactccccacgcccactcctccttctcccacgccgccttctcgccgcctttttcgccctcctccctgtatcgcgccagcgctgcgtcgcctcctcatctcgcggctgcgtcgcctcctcacctcgccgcaaacgccgccgccgtcgactccgctccagatccccgcgtcgcctcctcacctcgccaccaacgccgccgccgtcgactccgcaccaaatccccgcgacctcgccccatccgccccagccggcggcggccgactgccagatccccgcatcgcctcctcacctcgccgccaacgccgccgccggcgacgttgccgctgcccacccgccccagccggcgacgctgccgctgcccacccacaagtaagtctgttctgtaccagtacactgcaagtaagcattgctgaatcaaaagaggtcaaaaacatggttgtcaataccagacagttgtttttctttctcttcttccgttggggtgggaaataaatttattcaaaaagaaataaatttaatgttatgcattatgtgggggaatagggcaattgacagtttactctaccgaggtgctgctgctgaatttgtaaactaccgtggtgctgctgctgaattttattttgaaagcactttgcaatctgtgagatggggaaggaggttagcctagatcttactcataaagacgacttctctaacccaacaattaggagttactacaaagtttttgttgaggtaattatcccctgcatgaaatgactgacaagtagtacttgcattatacacataacataatttgaacataatgtatccttgtatttgataaacttaggttcggctgtaaatactgaataattgatgcaattttcgattggatgaaattgaatgtaccatgcactcctgctcactatcgcgactgagtatttcttcgcagttataatgacattgcaatcaagtagaaatatccattagttaaatattgacttagctgcctccctaatttgtttccaacatgcattatccaccaaatttaaattacaaatctgactaggtagattacaagtttttatgctttctagctttgcactcccaaaggaaaatctccgattggctatcaaggacccatgttagtatgcaaatgtaaaactgcaatcgattccgattaaatccaatgattttctactatgcgtgtagggggttatttttgcccttttttttaatcttccttcctcttttcctctttgtgtaaaaatataagatacgtctcaaaatatattgttttttttttgtcatcagtcattccttgtttgctaaacgaatagtatgtcatcgacctcgccgtgtcatctcgatgacttgcatatatagaggatgcaggaagggcctgtaactaactataggggtgccatgcataattggattggatttcttttacctttacagaacaatatttttgaacaaaaggaatattactttattttgatatcatcttttcttgtattgcaggttttggattcttaaactcgtagcgtttgctgtctatgtttagatggtatattactgatttgcagtatgagctaagcatcggtcatcttttcatttcattcttgcctctgaagataggtactgtgccattgaagatacatgtttgtgtgcaagctaaatcacacttatgcatttatgcatggttaattacattgtttgctctgttaatctacacaacatgatggcgttctctgcaatcttaagggatttatagttttatgcatgattatgcttttcaggtctttagtaaaaaaatggtggtcagggatttagtaagaaatgctggagcactaattgatcctctgctcaaattgatcaaatagtactgtccatttatgcctactcttttctgatcacatggtattgtgtcaaataaatttgatatttagctttggtgtccttaaatggcatggttgttttataagaccctgtgattttctacatgtcaccttaacaatcagtaggctctgttggatttgtgtggactcataaagaagaggtgcttgtgtttgctggttcatcaaacagctccatcaaagcggtagggcgtgggagaagccaaaggtttggctgtgctgctactactactagcatccattcacattcattactctgtagatcaatagtaccatttttatttgcggatcagcagtagggttctggacttacattgccgatcaaatgatttgcggatgcaaataatgaatttccatatgtacacctgtagtgggccgtatgataataatatatctggtacattgcagaaatggctttgtagtccaaaattgctcatataattaagttgtcaaattatgtgcacggacaatgcacctgatttgtctgcgataacaggtaatgacgtgccaaattgctcttcagcttctgcatccgatgtaatcacgtttctgtcaagtgacatttgatacttagatgctaataaactaaatctgtatgacaacagttacgggttgaatcaactaattttctgacagtacatgtgcttaagtgcacaacctaaaatttctttaattcagaagaacatgtaaccacattaggtataaaatttgcaagatatcgatcttaatggcctggtgctgctaggtgtatgcattaattctggtgcgctagatatagtttgcttgcctccaggattatatgataagttagatgtattttgttggcctgctggatgtatgcattcagctcctgacttattcttgatttatttgtgcatgccggatccatggaagaatcaacccactaaagtctgaactctgaaataaggcttttggtatactgtggcctatatattctgcacgtcatatagctttcatgtcacagtatatgtacaggttagcactggatggaaattaatacctcatttgttttctatcttttcaagaactttgctcagggttggtataaatcaccacttaagtaactttgtgatggcatccatctagccctatggccatttacatagagcaataactatgcatttatccgcttttcttcttatgtaagtgaaatgatctggtggtatatgattctgttattctctaagtcaatatcttggatgatcttatactgctttttgtctgcaggcttcggggaaggttgagtattcaagccttggtcaagagttttttttttcttatatggtttgacaaaatagatatttggttgtatcgctgacaaaaatgtttgatatagcatattcttgattcatgtagattgacaaatgatttcacaagcaaatgaaagagtatgtgttttagacatttagtacacacgctattatctactgatgtcacgggcaaggatgttggtggaaggattgcggcgaagcgagtatttgaaggacgttgcaggacgtggccctggacctcgtcggcgcggcagagccgtgatcggcgacgcaccagcgaggcagggagataaactagattggactcaaaattgattgctctatttcctggcctcaatcggcttaaataatacatgaactgtaatgctaacaaactcaagagattaagatgctaacaaactcaggataaagcctaataacaaactctagaaaagaactcaatcctaacaactgttggtcgcccagttgttgccgccgcgcggcacctcgcctccttgcatacgtgagtccccacatgacaactgaggagctgttttcacagcttatctacaatgagtcaaaatttaaagtcaacatcatagctacaatgctagattaaatagggttatgaatatctgctcagaaatatttttgtatactcgtttttattttatgccaaaaattttgtattgatgtctcattgaaattgtttatatataggaatcatatgtttattttcactatgaattccctgatttatcctgcactttcttcagaaatttgggtgtaatactctaatttcttttgaatcctattgttacttgggcactgttgaggaaggagggtgttggaactgccacggaggccgagctccaagtggtctacgcgtattcattggcaagatcggtctcaagctgcaattctggaggtttacatattaactaccatcctacgggcttgttgacttggtgttgtatcatattctgttatcaatatttttttaattaacctataagtcaagactgattgattatgtaaaactaaattatttctagctttgttttgtcggtgctaaatatggtgattaatgcgatccgtaactttggtcattgcaatgtaagatagcaacagatatatggagacaatatataatgcatatataaaattagatttcagctatttggtccttgacatctgatgcttttgtttggaaaaaaaaaagaaagattaactataactggcaactaatcaatatggcattcttgcttaaaaaatcacaaaagcaaacctgaattaaataaactgaatatattttaatgaaatgaatacttttttaataacatgggttctacatatcgccgtagcgttagcacgggcaaattactggtataagagaagtcgttaaccagcaaatataaaattaccaccgggcacaactacggttttgtagcaaacatggcaattagatccttcaaaacaaaggggtagcttttcgtcagatgctcaagaccttcagtctccacgatgttcctcaaatttgctggatcttcgagtagctgcaagcacttcttctcaagctcggggcattggtgttccccagcaaacgccaacatggctgccacggttctcacagttacatactcacatagcttatcttcacagaccaaccttagtctctccatcttatacctgttagccgccgcgaccaggtctgggagcatcgccactgcgtctccacctttcatctccggcaacgagtcggtgtatatgaagtggagcagagcctcgaagtcctgcgcctccatgtcgtcgacgcgtatgatgacaccggcaccgccagtcgcggcattccccttctccgttagggagaaaagctcttggtggaacactggggatcgggccgcgagcacattccgatgcgccaagaacgtcttgccgtcgacctcgaacgtcacgtcggcgcccactccggtggcgaggaggccgccgaggtgccgggccaggtccgacggtggcagggttacccgcctgccgccagtgtcctttgcctcgggattcttcatgaccgtgatgtcacacctgatcgtgaagcggttgtcccggaggtactccgatctctccagtacggccttctggatgaaacgcagagatccccgatagcggccgtagccatcgaaaatttgcaacccatggctgtagatgtaggatgtcactggctcccgttcttggtcgagtaagctcaacgtgagctctgctctcacgattgagcgaccgtaatagtagtcgtgggcctcgtggccgtccaagacgaggtagatggatatgcaatcggaaacgttcgagttgaagccgttggggtagtagcggatgtaccaatcgtggccgccaacgcggaaatgccgagactggacgcagttgccgatggagacggcgtccttgatgctggagtagccgttgatctcgagcaggtgctggccgctctccgtgccgcctacaatcgcagaggcggaacgcagcagtttgccgccggcgacggtgggcgcggtggccattggcatatatatggctttaatttgggacggacaaatagtatcgagctgcagaatttcagataacaggagttttgacatcagtggtcgttattcggttaaagctgaatggaatcatcaagtgaggctgtgtttagttcagcgcaaagtttgcattttggttgaaattggagatgatgtgactgaaaagttgtgtgtgtatgacagattgatgtgatggaaaaggactgaagtttggatctaaactttggatctaaacacagcctgaatacatgagagagaatatacggccgagcttaagtcggtcaaaacctctctcatttttatacgcacgtttttcaaactgctaaacgatatatattgttttttaaaaaaacaatcatagaaaaattgttttagaaaatcatattaatccattttcaaattttttaaactaatacttaattaatcatgcgctaatatattgtttcattttgcgtgtcaaggggaaaggttcctaacatagaaaaattatgtagcacaagcacatatatagtaaaaatctagaaaataccgttggattcaaaaatagacctttgagatttgttcatgtcactaagattaaaaaatttactcgtatattctaccatgagagaaaattttattgcgagtaaaattttactcttgatgtcgtggataaatcttacacgttcatttttcaatccaatgatagttttcagatttcactacatatgtgatttgcactatttatttcccactatcatagcctatcaatcacaacatctgttccaccgtgaaatgagcagaggcagagtctcacactgtttgaaagttgaggggtaccagtttcattcaattttgatttgaggattaaagagctgaggaacgagaaataaaaattttcataattcttagcacaatatgttattagtggacatcgctagtccctcaggtattgagagatacggagtactgaacatacatcaaagatataggagtgaaaaatgaacatccgattagatgcattgtaaaatttgtcgagtaccaacctaacaaatacttttctcaagaatagaacaaacttcgtcctaagtcctaactttacgttgaggttcctcacttgaaatctattcagggaactccatttttccaatttagagatatgttcgagtagtgatcgattctacgtactgaaaaagtatttctttagggaagaattaagattataccaaaagagtgtttgcaacacctcatgtaacagattcactaataaaaaaacttcacgaaataaattgttttaaataaagggaaccttcaacaatgtgagtccgttgctctatcagactcagtttgctatgggaaactatgatggataaccccgataatgtcttgggatcaactatatatcttgaacatgaatatcttagcatattgaaatagtataaacaacacgatcaactcacctagatcaatcgaatcagcttatagagctgagctggagatcatatggtagatgatttgacaaaagatcacaatgatatgcatgagcgaggttgcgagtagctacacatatatttatacttggttccagaaaggccttgataatgtaaggagaaagacctgaaggtgggaaccacttatctggtagaggtgtggtgcatgatttcattcattagggtttgaagtcttatgtcatctttgttgtgtaaaacttctacctatgtggctggcaaattttaccaaccgagaggctaggttattagttcatgccataattgtgacataccgacttcctagcttggcaatgagtccactcgctataaacacatttctttgtcacaaattgtcacatttaataagttgttagtcgaatgtaagtggagcaggtaagcaggtttttttttatcataattttatttaatatttttcttcacaattttatactagcaaatggaaatgaaccatgaagtgggtttttatgagagttattaagcatgaaacacttggcaaagatttttatggtgaattccacacactgccaaatattttaaggcaaagtatgaaaggcaaaaaaaatattttacaaagtgtggatgatatccaacagttcattaatgcttttatttgcactctctgagttccttctagtaaatcttttgtaagattaaggatttattaaaaggataccttgtagcagtacacacagtcatgtacatgtgtggtggtatttgcgtcttttcgcagtggaaagataaaagtcataggctgtgtttagttccctttaaacttccaaaaattccgtcacatcaaacgtttggacacatgcatggagcattaaatgtagacgaaaaaaagaaccaattgtacagtttgcatgtaaattgcgagacgaatcttttgagcctacttacgccatgatttgacaatgttgtgctacagtaaatatttgctaatgacggattaattaggcttaattgattcgtctcgcagtttacaggtagaatctgtaatttgttttgttattagtctatgtttaatactttaaatatatgtctaatatatctaatataacaatcaaatctaaaaattttcctcaactaaaccaggcttaagtataaccacgtatctctagttgcctacggtgcgccgtctcttcattgggccaacataattttttcatttcagcccttgttatatataatttgttttactggttagatcttttacggaaagaaccactgcgtttttaagtgactacgtatgaatagacttccctctattctatgctagggaattctatgctatagcagtagatagttggttttaatattatatttcttactattaaatttgagttttaacattcgggttgactaaatgtatttaagaaaaatatagatcacacatattataggcagcgaggtctagaatatatctactctatttttattgattgataggtaagtacgtataacaaattgcgttagatgtgaaccaattaaaacaaggaataaaacacatctattagcagtaacctttatttagatttgttaaaaataagagcccaaaacattcaattaaaaagaaaaacaataccttactttttaatttagacttaaaatttaaacctaaagatttacgtcttcttaaatgattttttttacgtgaaacagcaggagcaggagaggctcctactgcgctatattaataataaataaaaggtttacaatatttacaaaaatacaaaacaattaagagagagagaatcaatccatgattgcaggatgggtttgtctgcttttttactctgtgcatatgcagagcaaaatccttcttgaactctgatttcccttgactaaactgatagtcacattgttgaaaataaaatcattccttctacaccagatgtgccaacaaccaatcgcctgagcttcaaagaagaagttgagatgaaaagatacttagctgttgtaatcatgttcatgagctccagcgctagatttcactgaatg

SEQ ID NO: 8434 - DNA, 25545 bp, Oryza sativa
taaatccccatcctctctctctctctctctctctctctctctctctctctctgctgcagcgagcggcggcggccagccggcaaggcgcgcacggcggcgcgccctctctctcctcccttcctttgctgcggcgagcggcggtggctgacggcccagcaccgcacgatagtggtgcttccgcggcgccctggtccggtcgctgcccgggcggctgctcgccgccatcgccgtcgtcttctctgaccggttcaccttggccctcttcgacggcggcggtgtcgttgcagcggcggcacctcgctttgacgatagccgccccacgcttctcttcggcgtggctagtgagctggtgagggaagggagcaaagagagagagtgggattagggatagagagatagagaggtggcgaactgacaggtgggcccaccgattttttattaaaagaattgctgactgtactaccatgtagaacaaaaccaccgcggattgggtcgaggggggtaatttttccggtttgcatagttgggggtgaagaatgtccggttttgtggtttaggggggtaattcggtcgaccgcgatagttcggggggataattcgtacttttttcttcttttttttgcggggtacttttttccaaattttaaaagtgatggatgtgtttagtttaaaactttactaaaatttggtacaatttttgagaatggaaacttctggaattgtcaaagtttggtagggtgatattggcaagtatatatgtttagtttgttgtaatttggtgctttcaaaatttgataagattgaaactagcgataaagtgaaaaagttattaataagcccataaatgccattacgccattgccacgaaacacaaaatccccgtgcaacgaggcccgaacgggggcgaatgggcgatcgatctcatcgcccgctctgcgccaagcaaacaacaggcaaagccgcggggacgacgttacgttacgttgttgtttagtcccataccggggagctaagcccaagcgctacgggtgataagaggggtggaccgaatgggaggcgtgcccaatgcaggcacacccggatacacacgagacgactactcgtgctgtggtgggaccacgtgtggaatgcacgtgtagccgaaatcattcaggaattcaaaaatccaccggcgagtgacggtgcgagcgcatgacacatgcgcttaagcgatctccatactttttttaaatttttttttgggtccatcaatagatggtttccatgcttgtttcatcaatgtcgtttcaaggccatgcttgtttcatttcatcaatgtcgtgcacagttatcttggccatttctgttcgttcaattaattggattcggtttatttaaggacatgtccagcgcagcgaaatcgatctgattttgccacggctccagatccaggctagtggcccaaccgttgtggcctggtgggctcgtcgcacacacgggtgcagatggaccgacctgatatgatcgggcccaaagaagagaacacatgtgatatataaaaggaaaatgaacaggacgaaatggcaacatctgagtgaatcaaatcaaatcaaatccactgtataagcagaagagttgttcatgtttggctctttgccatggatgaccaaccatgatttattgcaccttttccccttcgtacaaaacgcgacaaccatacggcggctgcacgcgctccgggatgaccaaattatctgagaaaaaggggctctcctgatcgacttcttctacctatacttggctggtgtacagagcgcaatgcataccagccagtgagacagatcgcatcacaagattaggacaacagtaagaagcttgatgccttgattagcttccattttcaaacctacaaaaatgcccagatcaaacaatctgcaagtatacgaacctctcgggagagaaatgccagaccactctattcgtaatgccacgggacacgcacagtactccaccctgcagcaaagcaaagccagcaacgacggggaggagaatgtttagtcccgtaccggggagcttggcgcgtgcgctccgggtgataagagggcctgaccgagtgggaggagtgccaggatgaaggcggcacacccggatacacacgaggtgagtcctcgtgctgtggtgggatcacgtgcggtatgcacgtgtagcaacaaaaaaatcttggtcatgacgaatcaatccacccagaggtgcgattgactgcgcgggcgcatgacacatgcgctttggcaatctccccccaaccctttttatttttcccctttttgggtatacattcccggttcgaacaaaggtactggaggaaatggcaacacgtatcagtgaatcaaatcttttttttttcagcttctcagttcgaacaaaaagatggaatcaaaccatatactgatatgctaaacccataacgttggacgtcaaacaaaaatgaaaaagaaatggagggagtatttttgactctttttctatgaatcaccagccttttattgcatcttccccttcgtacaacatgtgacaaccgaatggctgcaacaatgaaattatagaaccctctctgtaacgaccaaataatcggagagaaaaaaaaaaggctcctcatttctactacctacttgactgatgtacatgtacagagcgcaacgcatgcccacgtcgccaccacaagttttaggacaacagcaagaagcctagcttccatttacaacctacaaacaatgcccacatcaaacaatcggacaggtcacaggcgtcgtctggtgttttgctcttgtcggctgctgtgcagtgcggtgcagtgcagtgcagtgcagtgctattcttgttgtgccttgtcaagatcagatttggttagaggtgaggtggactgctctttgtctttgtcttttgcatttgccggccggttactctggttgacaaggtggtgaagccagacaaccaggtccagaatgtagtcctcggtcttcgccttgtccgcatggtagagcgtctcgaccacgtccggttggcctggcctccttccaaccctctcagtcctgaatgaaaacagcatacgaaaccaaaaatgtaaatgccatgtgtgaaggaaatcttagtttgcacaacgaactcgtagggcattcgataatgtagttcttaccctgatctcgcccattcgctaaaccgcaagaagcctcgggcactggagttcaattaaagaattcatgcaaacagagcataaaagtagttataatcctgaacgctcgaaaagctaaaattcaatgaagcttaagacattcattactacgtaacaaagcacagtaccacgtggtattgatggccattggaacaagccatttcaatgttttatccattgtagccctaatttgatcaatattgagctgcaacagaaaatcaggatttcagaatacaaatttttatataaccatagttctgtcattgtgtagtggtatcacctcctgaggcactgacgaagttcttaatctattaggtagtgccgatctcactcttggtggcaatccttggtagagagcatctcttgtatttggtggtatatatcctgatcgagaaaccttaaacagacaaaatttagtaaaatagctacatgcaaatactagctagtgggctttgctgaaaataccaattacgctctttggtgctctgccactcttatgttaagtgggtacaatatacatatgctaaacctacagacaaatgtgtagtagtttccaattgatctatgataagatagccaaatcatgccaaatcttgggcagacgtcgcaggcaaaatctgagggaacttacaacgctatagatctgtatgataatatttgcatagtgtaatgcaagtccggcaggtcctagtctctgacagtcttcagtagattcagaactcaattcaccttcatctacaaatatattacaaggatcagtggatagtcctgtatgatcgattctaacatgagaagtaggaccatgaaagtaccagaagatccaaaagaagcgttgatctcaaaatgcaagtactgcacgatgtctacaagcttctcaacaatctataaaaagaaatgaatcttatatgttataaacaaaaggaaaggtcaacagagaatataaagggaattccacagtaaattgttctcacatcttccaatgtcttggaccacaaagatcttttcttcaagcttttcacatagttcctttgactcttcaattctattctcacgacctcaatattttctcctggaagattatctggacacagtgccgaaattccaaaagattaaaagtggcattgctctgacaacttaactgaaatagatatggatattgaaaatacaaagaaataacatttttcccttagcttgagcaatccacataagtcatttgtttgggtcatgaatatcatttggttaggtaatgggcacagaactattgacacaaatatttgtcactctgtccaagaaatagctagaggattttgtaaaataggtatcatacctttctgatatgaatttccctttaccgtcagcttgcagcgataatcttgctcaaatctatccaacgcatgcagctcgtgatacaaatcctggaaaaaaacagccaaaatgagcaaaacctagattaatcaaatgatatattgaactacagcacaatgcttacagttgtacgatgaacaagatccatcaacttttgcatctctgcaactgctgtttcttttagctgcttctgtggtggattttccgattctagcctagattccgaagtaacaagtatgattaaggtctaatctttataacgattgccacatgcaaaaacatgaaaactcttacttgacaaaatagcggtccaggttatgccattggggatctttacaacggttgccaaatctgacaatctcttgtgaaaatattttcagctcttccctgcaaatattagccagagtgcacaaaacagttattgggttgtcagatggtaacaatgaaacattgagaacaaccatcaatcatctcttcaaccttttgtcattggctacaatccgcatcaacacactcatgtcactggaaattaaattctgcacgccttcagaaggaagcaccacttgtttgaagtatgtaacagtgtcttccgaaagagattgcataatagtagcacctttcaatatcgtgtttgcaacctcaaaagcaagaattgatatcggacatcctttggttttagccctggaaataaagccgccatctgtgctaaggcttgttgttaccaagcagcctatagtgtctaaaatatcaactgccttcccaaatccagccatgccggctgttccaagcactcttagtctgggaacctgcaaggaaatgtcggggatttaaggatatcgtaatttctactaagaaagttaaacatttcaggaattgtacatttcattttgtaatgctcttaaggtaaaacaagcaagatataaaagttagcatagtatttatgaacagagacaaacaagatataaaaagttacccactagttcaagaaaacacaactgcttgtgaaaggaaaattgccttcacttttgtccacaacttaccctgcttgatccattgcttccaggcctgtctgttgtcgactcgggcaatccctgtttcccaggcaaatctatatcttctgatgcggaaattcccagcttactgctcccggaaagaagaaaatcatcactattggagaagagattggattgactatccaattccagcttccccagcatggcttcctcggcaccagtgaccatctgtttgtgtgcagcggcgctcatcgcgtcggggaatccgctgatgccatccgcaccatcatccacggaccacgcatcggcgacaccaacgagccttcttgatttcagcactgccaaacagaaaccaaaccaaccgtgagcacagagcggaatcctccacctccaatcctatagcagcagcaagatccaaaaagaagagcacgtagacgcgtactgtagcaatccatccgcaagctgaggcccgtgcccgcaaggacggcatgaaagggtggctcccaacaaacccaattaacgccgccacccaacaaccgcccccccgctcggccgctcccctccccagcccacaacagctcgagccgcacggaaggtgctcgacgaaatgctcccctcccccaacaagaagtcaagaacacgaaatggggacgcagtcacacaatccggccaaagaacaactagaaacctcagcaagcgcagcagctaaccaacccaaccagcagaaacccaaaaaaatctctcacgcagcagacgcgcccaccaagaacggggagaaaaacacaccacagcggaaaagaaaaaacgaaaccgatttctccgacgcgggatgagcaggcgacgcgaggaggagagtagccgcgcttgtagcttgcttgaggatggagatcgggaggggaatggagtggatcaatcggtcgcccgccccagctgcggatggagatgggagcgatcgatttctttttcagctctactttttctttctttcttttttttttcctgggagccagcgagacagcgccgagtccacgcgctgaccctgtcttttgcgggggtttttttccagggggttgtcgtttggttgccggcgccaggattcgttctctgcgattggccggccgtcattgcttcgaatttttaaaatttttaattttaaaaagaaactattccaaaaacttagaccctgtttagatcccccacaccctaaaatttttcaatacatcacatcgaacgtttgaacacctgcataaagtattaaatataggctaaaaaataactaattgcacatattgcgactaatttgcgagacgaatcttttaagcctaattgctacatgattttgaaatgtggtgctacagtaaacatatgctaataacagattaattatgcttaataaattcgtctcgcggtttattaacggattctataattaattttttttattagtgcccgaacacccaccctatataataactgatatgacaagccaaaactttacaccccctgatctaaacacccccttatttatagaatctgatcatttgggctatgtacagtccatctaacgtggcaaaataacaccgacacgtcgcacacagggggagtgacagttttgtcttatcatgctagctagggtgtcatggtcaaatacgctgccacgtcagtcagaatgtgcgtggcactgttattttgccactctgttcaaatattgaaaataggttttaaaaagatttgtttttgaatttaaaaattcagaaagataaaaaaaatacgattgcgtcggaggctggatcaaccgcgtttttggtgatcatagggtatttgtttaccagctggtgatgagtacactccagatgcagagtgatggtcgtcacgttctttcaccgatcctctttcccgatgcgtacacatggatgcagttttatttttgttgatttgtctatatcgatatgtaagggcgtaaagattgtgtttggtccccagttcatttttttggtctggctcgactgttttttttctcttttctggttcgaaacgtagaaaggcttcagtctgcatcgatgcatcagttttcggcactgctgatcctggccctgctgccctgaggcccctgactcctcaaactgatctgcggccgtttgccgactgtgactcgggccgggattcccagtggggccacgcaggagaaaacggacaagtggaatcgtcacgcagggcttacaagttagtacaagttactcctacatccctgtagatgtagtataacctgtgaatattctggcagctcgcaagtcgcaaacgagcagcatccttttgtctcagttctcacaacaacaacagcaagaaaacaaagctccacgttccgaccagcgcgtcccgtcaagcccgtcgctgcgaccgcgagagcgagagcgagacgtggtggtggtggtggtggaaccgtacgtgagcgcgacgacctacctgcaccgcgcgatcccgacgcatcagctcggctcgggctcgcaggttggcgacgcggcagccaccccggccacccgcacgcacgccttcggcgtacgacccgcaagcctcggcgtacgaggcggatgtgggtggatcgcgggggtcgccgcgccgtgacggcgtcgttgggtggctcgcgcgaggaagcggtacaggttggttttccttgcgcgggcggaggaaataatcgagccggacgaccgtgcgaagtgctcatgtggtggtggttggtcgggtactcggggttggttttggtccttcctttcgattatgatatatgtggacagagacatctgtcctcacaccacatatgccacctgggggatgttgaatctgagccgcgcatatcagttgactttaacaaaatcgttgatcgaacagggagtgtagccataattttcttaggactcaacttgcataaattacgtaattttgcctatatctttcgtattttttgcatttatcttttatatcttggggttttgacacgtaatttttactccctccgtaatataaaaacatagaatgagataggactgaaacgagtgctacgaatctagacataagagtctcatttggtttagacggagaaaataatatatatttaggcttaggagtatggttataactctagctgccttacttctattttcaccacggttccttaatccatattgataatttgattaacacaataaattaatatttttaatataaactttgtaaatactagcttgtaattagttgaatgcttgtgctttgctacgggtaatagaaagtatattagaatatcatctaaaataaattaaaatatgttttatattgattatgttaactatcctttgccatagggaatactgagcgtaatttgatcttattcgtgggcatcatttagattcattgccaccaccattagcttcttttaaagaagtatagagatctttcgagaaaccatgggctgatttggtttgaagccttaccaaaatgttggtagtaaattttggcactaccaaatttgatagagtagatttattattagttaggcaaaaaatagtcacaatccaaatgttatcaaagtactatttaaagctaccaaaatattggcatggtacaaattggcactaatctaaatatgcctcatatttttgaaagcgtggagcaaatacaaggtggaagaggtacggaaaccagccaggtttgctttgtcaactcgtgcctggcgccgacacttctacgggactactgcgcgagaacatttctcctgtgctacaactccctacccatatagaaaaagaaaaactatagaagattggttgtccacgtaacaaggtcaaatctaaacttgatttagaaaacaaaatcagttgaaaaagaaataataaaccctatataggaaggaattttcatgactttctaaaggcactttcgcagcaacgttttaccgacgattgtactgccagctctcatcgtaacttcatcgaatttcattataaatggccaatttgtttgcgggtggatgaggcgtgatctgagcaaatcctgacagaactgcaattttaatgaccaccttcagaaaactccatctgaaacagcaaatggagaaaatgtacacttacgagatgtcgagatccctatataagctaaattagagcaattggtcagacagtagaaggattctgcacgattgagtaaaacgacagagatttgaacttcttcaatgggtcatccgtgacgtcagcgctcaaactgaaaggtggagctagaaatgtatgtacccacgtctggtctcatgatgatgcagcatgcttcaagattcagagacaaatagtgctactgagtgaacaaacaaataaggcaacgcttctacttgaccacaaacaaatcgtaattcgtttttcggctcaatggtcgaagatggcaatagaatcaagcccacaggccacagtacattgtacaaggctctcatcaacatcagaataaaaaaacaagcgtaaggctcatctataaataatcaacttacagcagtactaggacctttcgatgtccacttcctgaagctgttgacatcaaaatttgccatagtaatatcatgttagttacatgcgctacgggaactatactgaaaaggactactaccatatatgttcagaagcaacctaacatgtggtctggttggtgccatcttacaagtagttggcccaaggcctacataaagctcaatggggttagcctaggatcctacttaatgcatataaattcttcacataaattagaaactactagggggtgttaaccctaggctattctggcggactgccacgcaggtaaaaccctaccagaagccacaggcttttgtacactgtatggcacttcattgacttgttcacaaccatctagctcaagatctatgtagcggacgtcctggacgatgctggcagcatcagatatttcctgccttgtacgtgtctttgcagcgcgtttcttggactggaccgtgcgttcctcaaagtcgtcacagttggtagaggtgttggtgacggagaagcctcttcgcttcttgaccgcctcgctgtgctcgttgctgccgccgctgctggttttcctggtcgcatttggatatctggcgaggaaatcctctatggttgcaagcacacggtccccgtacttgttcagcttgttcctggatgaaaagcatgtgaaaaacaaatataattcttgctctacttctgaaaactgcttgtcaaaattacattgtgccatggggtagagtcattacttgccgatgccatttatctccacaagttcctctttcgttcttggcattcggttgctgatttccttcaatgtctcgtttctgtaggttaaaaaataagaaccacgttataagtcagtgagttctgtgccacaacaaaatgcataacatataacttacttaaatatgtggtatgccaataattgtggattttcatccattatctgagtcctaaggcattgcaaagcttcataaagctcggctgcaaggctctgcaattaatgaaaatagccattatagcataacaaaaacaattactgacaaaaatactgaagtagtagcttttataactaaagagccacagccactaccccgtccacttgactctgttgattagtcttattaattcgtggaactgacgattcatcgagtacacccatcttaggagccttctcaggagtggggaacctgcaagataagaggataaagaaattactctaaaaaaagtagattgtagtttacaaactattttttggtcacccagaatgcaaaattgtattcgttaaataacacaagggaacaacaccctgcatcatggaaacataagcaactctagagacttttatacacacactttcccttgtgaatttgcaacagtaatcagttaggcaacaagataactatatcattcaatgagggcaagtggaataaatatatggctgcttgtattgaagaccccaaagcagtcaaaattgcaaaaccataatgaactcggatgttcaaacctaggatgaactaggaaagctcctaatactatctccagtcataaataagtgatgttttggaatgtgttaacatgtttaaactttgacaatcaattgcgcttttaaatactttgattcaacttttgaaaatgtttttgttatattcatcttcaaaatttgtttcaaaacattatacctttgatatattttttcataagttttaaactagtaattagtaatagaagtgtattagtgaccgtgccattgtccaaaacaacacttatttgtggccctggcgggagtaacagtcaaaacaactctttaccagtatcaagctgtacatctaattttttttaaaaaaaaataacatgggattaaattccaacagattttagatgtgaagttcatatgcaaaagaaagatgtgattaaaaaaggataattttcagcaatatgtgtcgagcaaaatgagaaaaggacaaacaattttcagtaatatgttttaggaagaaaacaaacttgaggacaacgttgtgcttgccagagagaagatcaccacttttcttatgattagtctgcttaacaaacattcacaaaagaaaactatgtattagaccaaggtagagactagaagattaaagaaaaggaaaaacctagtaaatttgtctcaaagtaaaccattataggtgcagggtatatttcacctttaagacagatgatacagatccatagttttcgctctttttgacatcctcaatgagtatttcctcaattactagatggcgcaatattctcgctgcttcacctttagctagatgctttccagctccatgaagactcaaagtatcatggcggtgcttcttgacctgattagtagtaacagataaatttcaaataatggactagtatgtggttttccctgccaacatgacatatccggcagtaaaccaagatgtgttgtggaccatggagatatttccatggcactaaaagtagcctctggtgatgttatcataacaatgaacctcagaaccaaatgacattaattacttgcataatacatacattttggtttactgaacctctgtatacttcgagaatatgagtagttgaatatgtttgctttgtcatcattaccagatcaacctaaagaaacaatgtgagaatgtcagtttcagacaaaggtctgtgcatgtgttaggttgtttagaaggggcacagagctcagctgaccacataccaattgtctagcaatgttggtcacatctttttcgacccatctcaactctttcaagcaattatcacatgtttttgcacaacatgaaggattaaacatctctccaaagtggatcagctgtagtagacgtctgcagtccacatcattttcgcagtaactaacctacagacagaatatggcattgttatgatggcttccaaacttcaagcatgcagaagcatctgtaagatatgatagataccattcgcaggagattttccttatgcgtttcaagcgcttgttcctgcgaagaacctcctcgtggtgctgatgttccttgctccgcaaatccttgggtaaccatgtgtttgagacgaatctagaaaattttacgaggaaaatacttattaatggttagatatgaaaatagtgaaatactgataataaaaagaatctcttaactcacataatcagaataattgtagaacaggacacaagttgaaagctgactgtcacgaccagcacgtccacactcctaaaaggataacagtcatcaaacacagctaagtttatgccattttgatgtgcacacattggcgaaacttatgtcattgaaaatacctgatgatatccttcaattgatttgggcagggaatgatggataacaaaacggacatcaggtttattaatacctgcaatcctgcacaattagcacgaggcaccaataaacaacaaatatatgtgcacactatgaaaatcaagttacccatcccaaatgcaactgtagcacatattatgttgatcctatccttgctccactgtttctggatatttgctctatcctcaggatccatgctaccatgataatgtgatgccgtgtgcccatattcctgggtagaaaagcagtaaacagtcagaagttacagtggcacaggtctatagttccatggtgcatgaaattcaaactaagcacttgcaattacttagccatcaaagtcccataatctgatcaaatccaaatccaaacacatcacccaacaatctattcaacatgtccattattttggaacatcaagaattaaaacaactgccagtgtaggcggctaacaagactaggatacaaaaccgtaaactttatgcctgcacccactggcttaggtttcaagcaaccattgatttagtattgctttctcctaatttgattcaacgctctatttctcttaactccaaacaacagactaggaaatactacccaatcaagaaatggaaccctagaacatgtgagtatgggtacagccgtacaggaccactattacccataagtaaaactggtaaccaactggttactacccttgttatcaagcccgtacatctagtcacgactagtcatcagctagtcggccagggagcatgactcgatttgttggcggcagcagacacaataaaacaaagaaaacaacaatgaaccacctcggaggtctggtccatcaggcattattactgggtgaaagggagatggaggagagctccaccaggtccatcaagcacagcatgacgcagcagactagcagtaaaagcaactgctatgtaataatagtctgatagactagtcaactcaatgagtagtcttcaactagttgcgactagtcgccaagtcactagatggtaactcaagtagactttacaacttaaaaactatggtcactgctgcaatcttaaaccctaaatgggaccatgacacacaaatgggataacatacaatttcctaaatactcaaaacttctattaccaactagtatcatgtagtaaccaaaccttctatttacccacttgcttccttgtctcttttcgccttctattttttgtacttgtattcttcacagtattgattaaggatgattgaagagattacacattacaggcaaactaaattcaacaggtacatagtagttaatgttttgcaatattctaaacataagtagctaaaggttggcacataagtagtaattttagtcaagaaacttgagtaatacagaaacaagtaatatgttcttatattaccaaactgcaactttattacatatggggggctctgcttaattaaccagcatgtggaagtagtgcagaataacttcatttgagaaattccagataaaaaagaggaatggccctaattagatttaaaattatatcctagaacaatacttcctccgccccagaatgtaaccatttttggggtaggcacgggtattaagaaaatactgtagaaatgattgaagtagtattgtcattggtgaagaagagaaagtaggtgaagagaatagttgtgattgattgagatgaaagggtaggtggagaaatagcttcattttgggacaagttactgtgttagaaatagctacattttggaacggaggtagtacatctagattctgacagtattgaggactaagttaattcacagaataagataagaattttaatgcttaaacattgaaaagtacagcaggcttgaacaatttatagtttcaagaactaacccttaatttagcagccactttctcacaatccatcctcgaaaggcaatatatgatgccgcattctttattatgatttgcatgtataaagttatggatatcctcgaggcacttctttgtcttgggccatacaaaatacctgcaaaagttgggctgagatggtctggtgcaattggagttgaatgtcaatgtcttctgaattctgatagacttacctcagatttggacgattaaaactttgtctgaaaataatgcagtttgcaaggcctagaacttgcacgacatcttccttgacacttgcagttgctgttgcagtcaaggccaggactggcgtctgcgggaacttctgttttaaaatgcctagatgctgatggataaagaactggattaaaaggttgtcaattatttaacatgaaaatctgcttcctgacagaaagtacctggtaatcaggtcggaaatcatgaccccactggctaacacagtgggcttcatcaatgacaattctagagagatggcctcgcgaatataaattttccaattgtctcaacagagcatcactcctgtactcaggaaattaatgtgagttaggcacatgaattggcaaagcacacgtcacaaaagaaaggactaattgtgtgagaagctaatacaagctaaaggtgttgaatcttcataaagaaaaacaaagaaatgtaaccaatagtccaatactagtgatctggaaatgcgaactgctgcatagtgacagcaggtcattatgagcttacttatactatatcagaaaagactacctttcaaatagtcaagaaatcatataacatgactacgaatcaacagcagaattccacttacttggctatcttttcaggcgtaacatacagtaacttgtacgtgcatgtaggagacattaattctcttaatatctcctgctgttctgaccactccatgctggcgctaaggtaagctgcagaaatatttgcctgtgataaacaacacgtgagcaattagaaaatcatcaagaaataagtagaaggaaacaaaacaaccctttacctgcaataaatgcatgatctggtcttggatgagcgatacgagaggagaaactaccaatgtaacgccattacaaatgagtgctggaagctgcaaagtaattgatgagttttttttttctttttggacgaaaaagctgtatgaaaggatcctacggtatatactcatatattaagtaatgtacatatttacatgaaaaaccaaaacaatgactctttctaattcctgtccatccacttcttaataagaggacaatacctctctctctctctctcttgctctatggataaccatggcaattgaaatctaaagaaagcacgggaaaacttgtagtatgggattgacatctctgaagattttattatttcttataatccagatgctccaaggtaacacaagcaatagaatcttaaatattaacatagtactacatccgtcccaaagtatagctatttctagcacagtgacttgtcccaaaatgaagctatttctgcacctaccacctcctttcaaccaatcacaaccattcttcatttaatttcttcacctactttttcttctcaaccaatcataaccttcctccaatcatttctacctactctcttaataccggtgcccacctcaaaaatactaacattttgggactgaggaatcccaacaagtacagattgaaagcagtatggcttgttacctgatatgtcaaactttttccaccaccagttggcatcaaaacaaaaacatcattcccactcattgtggcgttgattatttctcgttgatttgggcgaaaagaacggtttccaaatactcttttgttgttggcctgatgaggcagcaagacaagtcattctcacaaacaaatgatgtttgaaataattacagttgattttgaagaaaataacctcgagttccttagtccatgcaaagtgtgtactactccactgtttatcaccagaaccttcagtgtaactgatatcaatagcccttggagtgtaatctctctgaacagacggtaatggcatgcttaaaccatccatataggaatatggagcagaagaaaagcataaaccactttccccaggttcattcctggtgtaaatcggtgattggaatatattggtatcctttacaaaagagctacttaggatgctagtggggtgatggccctgatgagctgttgtggaggccatagaatgagattgctgtcgctcttcatcttgggttaacctcgccgtatactccccaagcagctcaatctgcttctttaggagtgctctgcagagtgtaacagtaacattgcatcagaactgctggtagtcaaaaggagctaccaaatgcacgttgcaagagtcaaacttcatattttgaaccagaaatgccatcgttgggttcataatacggtcaagattatgtagttttcctccttttttattggaattgtgagcaatacattgtgagagaaattagctgtcaaagctcaagtttggagatcacaccgaatcaaattagatgtcaatggtgtaaggaaatattagttagtcagaccagaaaacaaacctcttttgatgaagatcatcagattgttgagggctgagttgaccgtcaataagctcatgggatattgcaagcaagttatccttcatttcaagcaaatgagacttcgcctctgggcaaaaagctagctatacaagtatagtagcaagtagcaactagtgagcttacatgctgaaatagctactagtctaaagaacaatgatgatgatttaattgctgcttggcttaccttgctaccgtggtcacacattatagagagttcttgtggtaaattattctcatcaaatccattgaagttgcacttctctaatggagatttggatgaccctctgggtgtatttgttgcttgataatgttccatgactattcggtccacatcaatactctgaaacgtaaaccaagagttaaaaattcaaagaagagaagtggatccattacaattatgacatagtagttataataattgcagacctgcagttgataagataaaaaatcatgaggcgaaagcacataccgctagaagctcatcctcatccatggcatctaatttagcatcatcacacatgttgtcaataaaaggagcagtcttgaataattcaggaccagttcttgcaagactttgatttgttgttgtaatggtatctgcctgcaccacatgattgttcaggtaagtccttgtacaggacttggtgcctgcaggcagatggctactgttcttctccatagtaccactttcagtcgtctgatgcatactttcctgggtgggattcctatttctggacacactgtccattttgttaacattatatgaagaacttgtcccataagtatgagcatggtcgctatcacaatctttcacttttccagataaaccaggtcttaaataattcttccgtgcaacctgagtgttgcgtagagaacgccaggcctgccataagaatgttcttagaataccaaaaagctcacagaagtaaacaagaatgtattaaaaacagtgagttttaggttaatgctttcttaacaaaggggtaaagataaaagaatgagaccaactaggatttgagttttctgataacgcgtcaagggttaactggacctattatatggaatgttagatgatacacctttggtggacagtttacaaggttataatgcaattatcctacctgatagctccagattggagttaggggaacccatcttttcaacaggatttattatgatggagcacatatatggttgcaaaggaaactgaataattagctaaacttacaagttcaaatgataagtgactatgcaactatctcatttttatgcaagtgatgacaaataccatgtacagtattactgtcgtaactcataccttctcaatggatggagcttgaagacgctctaggccttgaattctgcaagcagcagacctgaaatatataggtaatgatttgccattattctggtaaacaagtatcttttgctagaagaataccaaaggttacgaacaacaaagggtgaatagctaatttagtccttcaagtttcaccaaaggctcaatttggtccttcacgtttcattttgtccacatagctcctctaaatatttgttttggcttgacatcatccttgggcccacttaatatgccatatggctatttttagtcaatatttctattagaaaatgtcccttttacccttaatttatatacaactatatataaaaaggagaaatcaagattaataaataacattgcagatatactttccattatttcaacatgtgcacatgaaacttaagcaattgctatcgtatatacttgccagtacataatttattttcgttttacataatttactatacattatctataaaaaaattcaagcatacaatttttctcttatatatgtgaatgatgggggtataagtgtcatttatcaagagagttgttggttcaaggataagtttgaactaaaatgaaaacttgaaggaccaatatggatagattgaaacatcaaggactaaactgagcctcagatgaaacttagaggaccactttagctattcacccaacaacaaaatactctattgtataagaaagtagactgtaccttaaaggaagcattcccgtacaatctgcttcctgattaggcctttgtgttggtaaagagaacaaaaaacttgaactcaggaattcatctttgatacaggagctttgaacagcatttgcatgatccgaccagttgacccttggctttatcatggcaggtggacccaacggtgaggctatttctcccttgcatccaccatggcaacaattaacacatgcgaacctgttgaatgttggttcttgatgacctcgcgagctggatcaagaatgaggcatgtaccgggactgtaatctctgcgatgagagtgataagtctcagcatggttcaaatgaggaactattgaaagcttaactatgaataacacaagtgacagacatatacatatacacataataagttgacaaccgcacgcagtttagaagtagaaataatcgtgtgtttaatgtacaagttatgtactctctggcatctatttgaacaaaaattgtacagttcaccaaaacagaaaaggaatagtgagatttgcggataaccacctttcagttagacagcataatgggctttcactaggaaaaagaaaactcaaggccatgttcggttaatcccaagtgggactgggagggattggagggaatttgttccatgcctattgcggtgtggaacgattccccctcaatccccttcaattctcttcaatccccaccaaaccgaacaagacctaagggggtgaagcaaccaaatgtcagtagttgattgtgcaaatgctgacggctgccccttcgcggctgtgaactgtaagactgaactcgctgctcctcggttggagcaacgccctcatcaccgcggccacctgcctcacgccctcgccaccgcgcgctcccagaccctagaccgccccccccccccgatcccccgcccatctcactgaaaccccgcttcacgcattccgccgaacaccctacccctaacccccaacatcccacgcaaccatccgaagacaactcaccctcgaccctcgccggcaccccctccgcgctagggcacaaggccaaaacgtcccacagaattagcctcgaaaaatcacccaaaaaacaaaaaaccccagccatcaagggcgcgccgcgactggaccagagactagggaatcacctgagagaccgaccaagctggcgccgccgggaggaggacgcccgcgcggcagccgccgcagcagcagagacgcggcggtggccggcgaggaagacggggagttggggtttggggattttgggggtttctgcggaaatggacgaggccaatattattttggttcgtgagcgggagaggaggggattaaaacttgaaaaaacccccgcttggagggaaaccaatcgcggtttcgggctgatcagggagccggccgtcggatctgcctcgagattcgcgccgggtcttcccaaatcgcaacaagagccccgccctccccctccaacgggtagaaagaacagtggaagtggcaggtcgccctttttggttccacgtggcccgtgggccatggcacacttttcattcagaaccaaaagttttgcttcttttgggttttacgtatagttgtcgtagtagtctctttcttttttttcttggtttttcttgtttttctcttttctctcttcatttggtataaatcggtttggttaattatgttgtgtaaataaactctcttctcctttcatctaatattgacgtgcaattctttttcgctttcgcgaaaaaaaaaagttttggagttttgaatcccttcgaaatagcactcgcatcctttgtaacggaaagaatttgactgcttttttttacaggatctgagctgaaatcctgcaaaattcatgcaagagtcatgcaagagaagcattgctcggaccctgtttagatgggactatccctatcacatcggatgtttggaaattaattataaatattaaacgtagactattaataaaacacatccataattttggactaattcgcgagacgaatctattgagcctaattattccatgattagcctatgtgatactacagtaaacattctctaattatagattaattatgcttaaaaattttgtctcgcaaattagctttaatttatgtaattagttttgtaagtagtttatttttaatactctaaattaatgtctaaatataaagaataaagttaagtccatggatccaaacaccaccttggtctccggtcattcatgtcagttaccagtaggaaatctgagacagattcaggacattcaagaatgttcagcgacaccgagtcaacattgagaagttcaggttctcgtcggcgacagtagatcagagttcacagacggcgcactagtcgctaacggccactagcatccaacaggcctttcatacaaggtactagctgaatttacagtagttttgccaagacgacgacgattttcacaggacgaattgatcttcaaactccgcagctcgtcggcgaggctgtccactgcacaagaaaccggcgagcgatcctcaaacggcctctgctgtccagcatccgcagccgtcaccgccaccgaccgatcgacgaacgcgagattctccttgctaccaccaccaccaccaccaccacccgctgtgattcatctcatttggcaaatgtcatgttcagaattaccgtcgcggtttttcctggcagagcgtgagtaaactttgaagggttcagggtttcgcagctcacccgcattggtgcccggacactcgtacaggttcctcttcagtagaacggtccccgggaccgacaccagcctcagcctgctgagattcttcctgtcgaggtcgtctatcggtacgaacccgaacgccatcgtccatgtgtcgactaggctaggtatcgcggatagaagaagcatctctaccttcagagatttcagcatctgttgagaaaacatcaggtaggtttaagttctagagtggcaaatatcttaactagtagtaagtggtacacatgaagcatagaaatagtctgcacacgataagcaatgatgcaaaataacattctcttcgcttagaatttgtcccaaactataacaatttctccactaacattctcttctcaaccaatcacaacccttcaccgttcactttttccacacacctccacttctcaaccaatcacaacatctccccgtttaattctacctatttttttaataaacgtgtctaactctaaaacttcttatattctgggatggatggagtattattgtgtgataaattattgattggttcttaatttccaagctcagttttatatacaagcatgttaatctacctttgatctaaagaaaattccaagctcagacatgtacttcaagaggagaagactgaatcgattgttaagtttgaacaggatataggctagagagtaagtcggatgcagatagcaaatatttggtagaaatacaggtggaaattttcaggtccttaagaaggatacggtggggaataagtcagatactcggtgactcggatatgatgcttagggagtaagcatgacatgattctttgggtgatctttttaataaagaatccaaagtagactacaaaagcatcagtatccagctatctactacctgttcaatgtaatccatgagacgcctgcacatcccttgttgacgattctcaaggcaagtagctattagaggcatctccgccacaactgtaccatgtaacctgcataaaaatctgtgttaatcccagagtctgaaatattagataatctgaccaattttagggtgttgatttcgaacatacgaaaattgaactccgtaagtgtcagaacttttgaacgtgcagtacctgatggatgccacagaaatgatcctgtcatcattttccaatactacagtatagaaccccttgtaatccaaatgaacaaagtcagacctggaaaagaaatacaaaggaataaatgagtgcctgaaaatacatggaactaaaaaaaagagagataaaagcaaatattcgttaataacattaagaggacaactgattaatttggaaaggaaatagtcggtctcacctccaattatatagtataggtgggataatatctattcctgttcgtgcgtctattataggtaagaagcattcttccattatactcaaggcaatcactaatttcatgttgcactcagcgaggattgcaatatctgcagctgtagagacccgttgatcaccgttgttccggagaacagtgcaagagaagccatcaattgtgtgaatggggatcccaacacgagatcgcaaattcatataaatctgccaatatcagagcacagtgagttaggcataagccagtctggctgatggctgattgctttgtgtaacaaaaactcttttcctgctaatatattgacgtgcaatccttttgcgcgttcgcaaaaaatcagagcacagtgaggctgcttcaagtaaacattttcgctgtctctgttaaatatatggctagcattagtgaaggtcgaattttaggattatacctgctggcatcttcttccacaaaaccaggcacaaggtccaccttcctcgttgcacaaaagtttaccatatatgcattttgcatgatctggagagaaacaatgtaatgaacgagcatgtggcataagatttcaagcaatgctaaatcttgcggtggatttgggcaatataaggagctcagaaactgtgataagaagcatcacaaaatcaaagagtgaattatagttgaattaacagatctccttataagggtaaacattgcatgtaactgcattaacatatgcacaactactagagtaaattaaattgctaaaatgttctatgctatacaaacaaacaatcataagtgtgcgtggtaagttatgaaactagagcacaggaatagtgtgctgttaaaacaagaagcagcaatttatatggaaggtctaaagacaaatcttgctagcaaataaccagacatggtacggtggcaatgaagatgtgaagtgagacattacattggcgttcacactgtgcgcattctaaagcaggcagggaacttctgagctccttcaaatttatcacttccccacatatatcgcaaaggcatctatagcaataccagctgccatctggaatatcctgaaaaggtagaaagtgaatcagtaacatgaatgcaaacattgctgttgaagatgtcaagattgacggtctgaaacgttagctttacagcagtagaaataaaatgaagtagaggttgataaacaaatggcaagatcagttgttctgtaacgctggtgcaaaagatgaccaccctaactgataaaatgctatgtcatctccacagtaaaactacatagcaactcttaactaagcagtgtaatgcacacatgattaaacagatgcggtaatgactgcattttgctgtgagttattctggaagcagcatggcacagcacaa

SEQ ID NO: 8435 - DNA, 25120 bp, Oryza sativa
atttatgcacaattgcacagttccatgaaatccaaagataccgttaatgaatgtttctagattaggtatcgggactgtaaaccctgcctataagtagtcttggttatgcttatgccaaacttgtaatcagcgaggcctgtgtcctttgttcagtgtgatttggtcaaggcacaccacaacagtgtagctgtagcgaagcagtgccactagtagacgtccttctatgcctcctaacaaaactaagtaatctcaatcggtccgaagtttcacccgattgagatatggtcgcactgccatggtagatcggcataaaactagagcccgtcacggataacacttatctgtgacgggccatagttgagccccgatggagatgagggttccatatctcaatcggaacctaaaagtagcccgtcacaaatgacaatcatctgtgacgggctccaactaaagtctcgattgagataagtttaatgcccgtcacagatgacactcttctttgacgggcttttattaaggcccgatagagatacttgtatactcgtcacggttgattgttttagggccattacagatatttgttgcacagtataaataccccccaccacctagtgtaattgtatcccactatttactattttggtgggaggctgtagggggcgattttctgtcttttttccaaggaaaacagaaaattcctaaaagtgatcaaaatggagcaataaagtgagtaatattaatcattaattgagcaatttcatcacgtcttattttagcaatactgatcttataagatgtgcctgtaattttttttttttttgcaattgatcgaagttccgtaaacaaggaaaaaaaactgaacaactccttagttacggtttactgtttaccttacataaaaaaaactgccactcttctcacatataattataattgaatgggttatgtttcatttgtattattttcttaattcttacacacaagtatatttatacaattagactcattaagaattcatattcccaaggggcctctgaatctcttatgtttacgaagaaaaatatggactgcatgtgtttgtgatccctttcttctcatgggctcataccatcaatcacacacattcaccttcatccttttaactcaaccaaaaagatctaaagcctctatttgagattattgagcgaattattactactgattatctatttataaatttaatattttgacaaatacatttaacaagatagctcaaactgcacggtttaagcaatactatatttcgaaacgtggtagtacaaataatccgtttcagtaatccgatcaataagcttaccaaatcatccttctcaaacggttcaagataagggaggaggtccatggccggagagagcagctgctgtactgatgacgccaactggcaatcaatcaaccaatcaccagcttacaattcggccacacataaactcgattcggactaaagacgccttgagaaaaaatccgctttccttactcgttggcgcataagagataaatacgccttcttcctcgtctcatagtagtatacacaaccaatcatcgcgatccgccctcgcaaacaaaaagaaaaaagaaaaaagaaaagaaaaacgaaacgaaagcttcttcttcctcctcccatggagtcgcttgcgtcgcaagcgaagccggcggccgtgctctggctcgccggcttcctccaggccgcgcgcctccaccgcgtcgtctccttctgcgccaggtttcgcccgctcccttctcttctcgccccacccccaccactgcttccccatctcgaattctcgattcttggcgcgtcgagatggggggattttgtggtggtggtgggggagtttttcctcctcctctcgattcgctgctcggttgctaacgcttttgtcgtgtgtggatgcagctcgaggcctctgtcggccaggatcgcgcagtgcttctgctcaacgggttcatctcctggggaggtacagtttgctcgtaattgaggttgaaatctcggctaaatttgtgcttgtttttttttcgaaatttattatgaaagggggcggccaaaattcaatttgcgtgagtgacacagtagttgggggtataatttgccttgtgaagcaatttagcctggggttagcgtgcaatcggcccattgcagtaaagaccaaagaggctagcaaattagcgaatcgtattatatgtctgagtctctgagaatgtttagcctgggatgctgtagggtctctgatggtgtagacaaatatgctctccgttttggaattattcagggcagtagggcacaatgagcacttgatttttgatatttctcttctctagatgagtctaagcggtctgtcactttgtttactcaagttcttccacctcgggattaggggatttatatgcaatgtcatgatcttgttctcaatattactagcatggctgtttttctgttccatctgattagtaccctttctaaaataactcttacactttatagcttgttaaccctaaaatcggtggtcattccaatcctttcgtggatactgcctggggattgcagtcagttgcaagggcagcatctgtgtgatcacacagtagctgtagcgacctattcatttctacgctctgttcttattcaaatattctatgtaagttcttctctttatgcattgaaatatattaaggatactgattgtgttgctttttttcaaataaatgtataattattatttaacttctgctgagactagaaggttatcaattactccctcagtcccaaaatataagaagttttagagttggacacggttattaagaaagtaggtagaagtgaatggtggagggttgtaattggatgagtagtggaggtaggtgggaaaaatgaatggtggagggttgtgattggttgggaggagaatgttggtggagaagttgttatattttgggacaaatcctgagggttaaaagttgttatattttgggacggagggagtagaaaatagcaattgaatgatacaccatggtaacttgtcttttcagtagtgcacttaaactttaatattataacttcagtaggtggttgcagaactcatgacttctgttacaatgatggttaaaaaggccggaagcctcaattatatttcccaatgacatcttgatgctttatatgaaaactcctagatgcaaaataagagtagtttttttcccctgattccctggaaataacttgtgttttctgtcaatttacctccccaccatgaccttcagtactttatatagtttagtaccttaatttatatattttcattattacatacttgacaaataaaaaggagaaaatcaaagtgttgtatatttctgttaaatgtgggtttcttataacagaatatccttttcaggtattatggttttatccactttacatcttcagcttcgtgttgagtacactttggtacgtttagtctctgtccacactggatatcttacttcccttgttgaccatactagtggtttacttttcctttaaagagcaaacacatggtttgagttgataacagaattacctagcagcacttgatatagtatatatttttatagtaagtaaatagagaaagacagaatgatcataacaatggtactatgcatgtatgagcctatcataccacaattaaatcagtgaatttctgttgaactttagtgcttctaaatgtcagtattacaatatttggttcagaagttacccattttcaatttgtggtatgctctgggattatgagctcaaacataaaatatttcagtaagccttctcagggcattatcataaattgcaaaactttctgttggatatacgacgacacccactttctgtttcttttatcacctcattgatggtgttttgcatagtttcatttggtaaaacccacctgtcttgtaagatgttactgcagaattaagaatcactgagtaatcaaatcaaaagtgttactgtaatcttgtatagacatttgtattagcaacatagcttgaaaatatttagatgggtttgtaactcctatatttttgcaacatgcagatgtaattactctctttatgctttcatttctctaaatcttaagtgagttctctgtgttgcagtccttgggtttcaacactaaattgtgatgaataaaatctaaacttcgatttactcataggcacatatttacaatttctctatggaaagctcaattcttgattttttttttctgcattgttacattattacaggtatggactattgttttaccatcctcaagattcccgtatttcatatactaaacagtggtgggcccaattgtaccttttgtaacattggccatctcacgtcaggtataatgacattgctaagcatgctttggatgttgtgaaaagaaagagcctagatgcaactaaagcattggatgctcacaccatatctgaatcaacagagaaacctgaagggtttgatgagtaggttcacatgaaaactcgttgattgcttgttgtttttacatgttctgcatgttgacatgctattgttagggttgcaattggtattggagaacaggtctattcaattcttcttttaactattttctttattgaggtatgtttctttgctcatgtttttccatttgtcatgactcacttcacatctaatttcacagaacatgttttgttggcacctcatgctcatttaagcttatctagtgctattcttttatgctatctttttccactgatatttaagttgatgctgtacaggtttcagtaattggttacataccttactttgggaagcctatgaatttcctgctattatctttgatgtatgcctactactgcttcgagtatgtacatcttaatgtctttaagcattctttcaactccctatgtcttatacatttgccaggttacgttattgttgtaaatttattgaactattcttgtcaggtacaagtggaacttctttgcagtgagcctgaatgagcggcttgatttctttgagtcaaattgggccttttttgctggattcggtatgttgataatcattcattgcatatggtgcaaaatatatgcttttgccttcttaggccatgatgccctgcctgtttcagctttggactgtaatgcaaagtgattttgcattttaaagttttgatttttaagaataattttaggtagatttttacttgtattcttagcaatctcgagaagagaactggacaaaagtcacaaagagaactcctaaaatccttatggttatgcaaatgtaattgttggaaagtaatctaaactataaacctttttgtttcttgtgcatatgttcttggcaagaaatacatgcatctctaatcgtctttatggaaagtgttggtacttatgggatcttaattctctcaacttgtggtcatcatgcttggcagttagcagataagtcatctattggaagtaatcctgtaccaagctgaacgttgagcattttcttgtaattttcatggacaaatatatctcggataggttctcaggcagtcctagctatttgcggcatgcatgttccttataaagtttgcaggatcctatataactgacagttgttgatctgttttgatgtacctttataaatggcatatgttactatgtaattctgtttctgtacattcttcgacttactccgtgtatgctagcatttatgtgattgacatgttctttgataccatttttatataggtagtccatgtgtacttccaattttcttcttctctcctcttacaagttatggtgtaatggcaatactttatccactggtatggagaaacactcactagcagcattttttgtttccatttaaacagcatgcagacatacttgctcttgtaaaataggcatagaagctagacatggaaaatcccttaaaagcactaactcataatgccattcccaattcttatttgggccaatttgtttggttccatcacaaaaaacacaagagttggaaaataccgtcgcacgtgtcattgacaggtgggtccagacaccacatgtcaattgtcattcttacatatgatgttaaattttaactcatttatctctacgatggtatttttccaaattctcttattaaaaagaactcaatccgcaattctacatccagtccttttctccaccgaaactggtgtggaaactggatgagaaaaaacagtatcttcctttgttcccttccatctaataatatttcccatccaacatattctgagtgcagttatgcaatgttgtctgttgcagtttgtattgactgctgcaggtacccaagcagaaaaagtaattgatcaactgaaaccttcgcatggagggaaactgcagagaatacctgttttcttcatagctaagcgactaacgtaagcactcatcatatcactcattcaagaaaattgcattgttatatcattcaaggcttcacaggaatcatgccattttcttgtatagaattagctaccggtgctaatgatgtgagaatagttaattgctattgtttgatatattatcttttaaccatatccttccaagtaaaaattggtattggttatttaattcttattttcatcttcttatagtcttaatctgaattagaattcagtacagtatgctgagtgctagtattcagaatttcagattaatttccttttagggattatcacagttttcctgcaccactgctactttgcttcccttgggtgcactataatgtattgaaacttgtctgaacctgtatgtgcaggactcaagtgctgcaattgtttccagaggtacacaaagaacaatgaaaggatccacataaccatagcaaaggaaacaaacgctgtgctgggctttatcacagtgctgctgttgaagttacacccgaagggtgtataaccagaactgtaaaactgtaaatattccgccattgcgattgtatatatggggataaagggaattaaaaaaaaaactatacttgtgcaatgatgtcattcatatttgtgtacataagtacataacaacagcaacatctctttgttctacgaaatgttatagccagcagaaaggttaatgccattactagtgctaacttctaaagtgattctcgttggttctacccttgtaggtttctaggttcactttgtgtattcgagatttgcatgaacgcgtggcacatttgacatgaacacagcccaagtcgttaggaatttaagacgtcaactaatactttgacatattcatgtatacctctttttttttcctttttggcaatgatatattgcgtaattcaggacccgggaatacgccgtgtacctgcttgacttgcgtgtacatactccatgaaagcgagcgtgcgtattttgtgttaaccactgtagcttaagactgtttatcactagtactatttattaagccgaattgccgaattgacgtgtaaaggctaaccatgttcattaattcatggattatctaaccacgtgagtcgtgactaggtctcacacgaatattgagcgcatttttttttcacatcagaaatttcaattgacccgaacgatttctctatgtacaagagccaataccaagatgtaatattaatattagtattagcttaaaaatatgaacatcattagcctatttttttcatggaagcagcctttaagattgtatgagaccggttttgtacttttgtaaggtgctagacaaatttccatgatttcatcggcgcagcattattagctggtagtttgtcctcttgtaattcttttctcagtacatgaccatccataccctcatgtcttctccattttgaattagcatattagcatgcagtcatgtacacaatagtacaatacagctagatgtgtacaatgacaattctaaatactagagtactattactactatcattgcttagaaacgaccaaaacaaaggcagctgaaccccgatcagcgactaacttgccatcaacaataatcaactatattttctcccccaatcaaagcatgcatggtagtctgctttcttcctggcaattttgtctgccatcttccttcagtttctatcatgaatattatacataaagcattttcctacaaatgtgtaaacatttttttatatgaaaatgattggatggtgcagatgaactggactttcatgataataattcacatctcacacaaggacgaaaaagttggtactttatgagttacacctccgtaaaaaaaataatacagaaggcaacttaaaaataatttataggtaatttttatatatatttatattgttcgtagcttaaaagctagtgttgaaaaatataccgccatataacagaaaaaatactaaaattaaattaatgttttaaaatttaaattttggttgtggctgataaaccaccgagcatttgtgttttcttttaattaatgcattctgtggccggtgatcggattgaacagtctttatttaatgcatcccctgtttcaactaagaagagttggctgctatgagctgcaccctaaattttgtatggcaactggagcagttccaattcttccttgtggatttgcacaattctcccatttcgtgcatgagtgcctgtcatccttgcacagcatcattgcttgatgttgtgttgccacctaactcattagcataaacaaaaggatgaacaggagctaagcatcttacccactataggagcattacttgatgccattgccatgtactccattactacaccaatgcaaatacaaagaacataagtactcagtttcatcatgattactaaattttctgtggtgtctctggccaaaatttaccgtcagctatgatttgccaaaatttggtacaccctctgaatgtttgctgtctctttacaagaactcttctgtgttacttagtgatagatattgagtttattggcattgtaggggatgtaataatcgttaatgattaatcattatatatggttcatataataccagacgaatgagcattaattggtcgttattacgaacccctcgagctaatcaatatctcagatgcaacttagatctcatgatggattggtggagccgaagctgcagtggatgtagctctcagcttcctggaccagtactaccactgcccttgtgctgggttcactgatccttttaagaatgttgagctagctagctagttcatcttggcaagcaacaacttcatcttcaatgcacttgcattacttgcattgtgttatgatctcttgtctttttggcaagcttgttggtgcgaaggtgaccggccctgtcgtccggtgcgtgtatcatcaccattccatcgaatccatgttatgatgtgaagtcaacttaggcaaaaaaatagggtcatttggacatgcttatgtttgatgagatgtcttgttgcaaagtaggccaccttcatgtcaagatatatatttacagtgtaaatggcaagattcccagtattatggtagaggaagtttgcctcagatgaacttgaatgttacaatgattttcgaagaaattgttggtttcccttttcgccgcgtttggaacgagggaatttcttctgtgttttattgcgggaattgaaccttttttcctatgaaatctattcaatactttcaccaagcattactctacaagagagatgcaatcaaatatatggtagtacatattaacaggcagaccttttttcctgttggttgtcaacattattgttttgattccgtcgacccacaaattaatcaatttcttgcttttcttgaagactaaaatttcttgctcattatgatgctggttgaaaacccctgtttgcgcaactaacccatagcgtatatgttatcccaatcggtgttaggatgagcgtctacatccattaccaagtaaaaggatcattccccaattggatacaggtaaaataaaggaaatattactgaccgaataataagcaatgcaattaagcaaatataatttctgttataattcctgttactttcttgcagtggcactgctcatcatcagtgcaatggttgtagtgctgtactaggcttgtgtaaagcgccgaaatgcagctgtgttcctcttcttctttttcagacaacagaagctctgtctcctcgccgtgccggtttgtccctcttttccactcgtgcatgcatgtactagaaaagatggaatcatggaacaatatggtacaattaattaaacttatactaactcttacaattattgtgccttttctatcaaaaaaagataggagtatattcaatctacagaaagttactgaaagccgaatattattagcctagaattcagcgaagaagctccaccacgaaactcctacatttattcgaaatggcttttttcaaatttgcctcgcttttgcagatcaatgattcgaagaggagaatttgtcacgaacttttccttgggatttccctttcgtttctttcttccagaggtcgtactggcgatgtgtgcgcgcgtgcgcgcactctcctctcctttcgctttggcttccgggtgattgtctccgcgatacctacgctggctttcggctatctcctcctccattgaaggtaacagattaaccgatcagtgcgcattgcaccacggaaaaaccaaaggaatcggaaaaaaaattctatgaaaattccttctttttagcttctgcaaagggaatgaattgcaattaagaaaggtttttcctttttctttgagataatggaataaaacttcagcctttactcaacgagttacagccaattattacataaatttacccgataacgagcacacaccagaaagtccataaaagcacacccaaatactagcaaacacaaactaatatgcaccaacactagataaagatctcacaattattgaatcttatttgtgaaccttcgttcgaagttgacgaaaaactgcatgatcattgactcaaattaagagatgcagtatttattaactcgatgttttcattacaccttcttagccattacattgccctgaaaattatatgtatatgtatgtttttttaatatgatttgccctaaaaattaagaaaggtttggagtgagctagctagaaatcgatctgttgataattggtcgattcgtacaatttgattaggacttaggagttttgatgatgctctgtgttgttgcacagtgcactagtggaagccggcacagtggcgtctctgtgactggcacgttgatgacatggcacctactgcgtgtgtgccatggctgcctttgatttgtttctggccagtggtaatcagtgcatgcgtggttgctttggattgaatatgatgcttaatttggtgtagagcaattaagcaagcctagttgacatctcagttggtgcatgtaatgtactatagtacagtatactttcgtgtgcttaatcagtactacgcctggccagttgaatttattctggtttatgcatgcaaaaaacaaaaaccaagggtccttgaatttgagcacagaaatggaattttcgctctatgactccttccttttgaaccaggacatgatttccaaacttttgaactgctcagttttttaagaacctttttgagcatttaatttttccaagttttaaatagttaatccattcgtttgcatgctcaaatattatcacgaaatcagataatgcatcactcgttctaaacaaaagaattgagcatatagtggaattttcgtactattcatgtcaaatatatataatttgatgaaatggcactgaccccacaatgtggaaattcatgtaagtagcactttacggatttttctatgattggcatagtgaaatgacactatcacaccaacccctcgtacgtggtgtggtaatgttaattcggtacaccagtatgccaatcagatcgatatcaaaagttcaccgcgctagttagattagcgtggcaagacaatactgttgaaagatgttgcaggtggcgtgacaatgttttttcatcgtgtcagagaaatgccaaggggtttttcagctagttacataagatggtaggctagacaacctgagttcgaagccttacctcttctaattatttgatattagatctttccctaatattcgcgtctttttaaattggcgtgataaaagattcagatgtaaaaatattttttaggagtatttacttttaaaacttaaaaagttttattaaaatttcgcagcttgcaacactgatgaccatacaagttagaatcagcataaatcgtaattacgagatggttggttgttagagtagctggaacagatgattagatgcaacaataggcatgtaatccgacaaatcaaccgatcatttgcgacctttgcgtcgtaaacaaacggtgtgaattggccaggggtcaatcggcggcgggttagtgcgtccaaatctccgtttataaaatagtcatgagaaaatcatactgtttttcatccgtatcaactgatggtttcgatcgaccaaaaaagacaagaagtactggagtttgaaggacgctggagggtgccaactctgttttacttggttccgtcgttacctccccgtgtctaatccacatctaatttattgacaaatgtttttttatagtacatcaagttggtaactaaagtttcctggaattgaaattggcttatgcatgcatatgttccatttgatatgacaaatgcgtttatttctcgtgtcaactggtatttacgttaaaaggagaactaaattttcagttgaatatatggcctcagctcattgagatatcctcttctaactgtagttgtttctttccgtatattttgaattcagtcccatcattttttcctacagctgactataggccgtaacacttattagggaacaagaaataatttataggtaattttatatgtgatgttattagtgacttaaaagctagtgatgaaaaataaattacaacaagaaacattaaaatcaactataaaattaaatttttggtagcggttgataagcttatagagtattaatcatcatataaagtttttcattaggaacaagaaagacttaactaccgtatattttatttaatatgagtatgtggtaagaaagaatcaataaacattctccatatacacaggaaacaagtgtttaactacttctaaatgcatagattacgataatgttgcacatcaaaataaaggattaaggttatatgatatgataatcagtatggaacggagcgagtagtatataatttgatacctcatgataacggcgtactaataatcggcaaattttgctacaaaacaccacgaacccactttaaaaatatgcctaataaaactggacactcttcattggtatacacgcttgaaagattcacatatgtttacctatgctgcgaaggattacattaccatctcaagtgacagatcctcatactcctctgctgacgtgtacagagcatgccagctcagcatccacgtcacgcaactccccgatcccacgtggtcaccgcgacctctctactcgactactccataaaaacccaagcgaactcacgcctacgcctccaaaactccacccacccacccacaccgtcgccatgcccaccgacgccgccgccgccgccgccgcctcgtcgccgtcgccgctccttcctccggcgccaccttccgccgctcgccgccggcgccgtcgcctcctcacgtccccgaacccctcggtctcctcgacctcgacgtcgtcgtcatcgtcgtcgtcgtcgtcgtcgtcgtccagcctctccttcccgttcgctcccttctcgccggcgccctcgccgttccaccaccgcttcctctccccgctccgcgcctccgccgtgcccttctcctgggagcaccgcccaggcatccccaagacgcccgcgcgccagcaccagcaccaccgcggcggctgcggcggcgggaaggtctactccacgccgctgcccctcccgccgtccctcctctccagcaaggtggtggtcgccgacgaagaccgcggcggcgccgaccgcctcgccgtctccgacgacgacgacgacgcgaaggccgcgaggaggaggagtcggcggcggcataggcggaggctgctgcagcggccgcggcggccggcggcgctggccgccgccctgacggactggctcgccgtgctgagcctgtaccggtcgtgcacgaggtccgtcgactgcctcgccgacgccggccagccgccgacgacgacgacgacgacgccggcggcgaaggccgggtgagaattgagatacgtactttgcgttgcgtggacgggtgggtgcgattaagagtgtgatttgcggcggattaatcaataatcacgtcgatttgtgcgacactgtaattaattaaggtgggttttcttttcttgtctgtgtgcatgtgcttgctccaacataattagtggatggattaattcgacacgattagtacagtaggctgctaaatgactgtatgtattagtgctgctgctgttgcgattggtccatttttcttctttttcttcttcttttcctttttaagaaatgtaatttggtcagtttggtcgctcatgtcatgctaatagtaatccattctgctcaatgtgtggtgttgcacgtttactattactccaagcctgtttggagaagtttctaaccgtttaaattttaactcaggtttttagaagttgtagttgtagaagccaagagttgggttttccggcttctccagattttcaccaactgtttttcataattttaaactcccctaatggggcctctgttagtatggactgtggttaaggtacatctgccactggctggtgggttcactaagggcctgttaactttgatgccaaaaaaaaccttaccaaattttagcaattttgacaactatgccaaaattttggtaggatttcttacatagttatcaaaatttagcagcaaattaaatgtagccacttttttagcaattttaccaatatttggtaaggttgaaaatgacatcaaagtgaacaggccctgaatataattttctcctcgcactctaaaataaacattacaatatgtgtttttttacaaagacatgcataaaataattcacattttctttgataattaagttcacatattggacctaccaacatagatactgcttggttctcgttttacaattctaaacgatttaaatttttaagttagattttaaagaagaattatatatgaagatattttacttgagctatgcaatgaaagtgacagaaaaaacatcttaatgtcgtccgaaattcaggtgctttggatttcgattataatataaagatttaccatgcaggacctagagttattcaccaaggatatataaaaaaatgtaaatatttttttaattatctaaccaaactatatatatgaccaacagttcagctgagatctctagcgaatggaatagaaatgttccatgcatttttttttttcttctacatttggtcactggctcactgctaattatgcaagcattagtttaggttggctgatcagcacatgcagtcggcggtttgaaacaggctgcagctctgcataaaaggataattaatttgtgcaaaaaaattcctcccacgtgcaaatatgtatactacttatttcgttcgtattataaattgctttgacttttataaagttaaattcttttgattaagtttatataaaaatatactataaacatttatagcactaaattagttttattaaatctaatatttaatatattttgatagtctctttttctatattgaaaatattgtttttttatgaacttgtcaaagtttaagaattttgaaaaaaaaagatcaaaacaacttattgtatggattatataaaacgtggtactagtaccgcagtatgggatgttccaatgttttatagtttccccttaacgtgacaatgcacgaataagcttgttgacttgacagcatattaatcaaatggatgtccaaatctagtcaccaaacattcaaaataattacaaataagcagtatcatggcccgggttataagcacaatttacatacaccctaaattgcaaatcctaaaaatactagctctgtgcctagctatgtaaactggtacggttcaaaattaatttacggcaaattatttttaaagaaaaacaatcgtcaccagttaagttattttgaatacatgcgtgcgcacaaagaatggaaggcaagtagtagagatattttgatgaaattatattttgtatagtttgaccatgagaatgtgctgtacttcacgctcgtctatcggactatcggaggctcggagcgaccattttcaaggttcaaatcaaaatctccaacaactcacatgtttacaatgaaccttcgactgtgaccaaaactgtaatttaaaccaaaaatatgataaaccgcaagacaaagataactagataagcataaaaatgttttttttttgacaaactcatacaaacaaaaaaaaactaaccaaataaacagttgtaataaaacaatactaaacttcacaacaatcttgaataaccgacaagtagaaaagaaaagtagtagcaaaaaaacaaaaccagtgttttctactgtgtcactaattttgttttaaccggacgattacatacaaaccaaacctcgtttttgtcaagtactcatcgcaatcaattagtgagtgcgaggtttaagaaaaaaaaaggattagccagtacgatattaatgtctcgatcagacgatcagctcactaatcactcagccttatgtcacagagtataaaaatgcaaattataataagctgcttccttcgtttaaaaatgtttgacaccgttgactttttagcatatgtttgaccgttcggtttattccaaaaaatttgtgaaatatgtaaaactatacgtgtacataaaagtatatttaataatgaatcaaatgatatgaaaagaataaataattatttaaattttttgaataagacgaatgatcaaacacgtactaaaaagttaacggtgtcaaatattttgaaacggagggagtactactaccagcaattgcaagatgcacagtaaacaggcaaagctagctgtagcattagcactagcagcagtggatgcagagacagcgagacagggcgttcgttgggtcgcgtccctcgctcgtcttgaccacgaaagagccttccattggcagatgctgctggtacaaccgcatgctaattggagtaattaaagtcatctgcaagaactagctactcagctggttgatgttgaattcgagctgaatttcctattaaattcctgtgaatttggtgtttaactccagcaacagtgcagagctcgcctggttagagcatccgcaatggtaaagtaaggtgctctctataaaatatgtatatcttagcaatagactagattaatagtaaaccacctcaataatatgtctacatgggtatctatagctctctcatgtattgcctcgtttttctctatagactatctctaaattagtagatagctttgctctctctctcttcatttaatatcttccatgtaggaaaatatgctgacatggatctcttgtagagagtctatagataaccattgtgggtgcccttaggttaggtgatgatgaacattggacagggctatgtagccatttgtgccactcaaagtcaaatcgcgatcgggaaagtaggttaaggctatgtttagttcaacacaaagtttgaattttggttgaaattgaagatgatgtgactgaaaagttgtgtgtgtatgacaggttgatgtgatggagaaggactgaagtttggatccaaactttgcatctaaacacagcctaagcagcatcggtgcaggtgtgacactgtttctaccaaatcgctctcagatctgcgtgagtaaccaaattgatcgatcggcgtcagatctgggcagatggactgatggatagcaaccactctgacatcatggtcttcagtaattcagggagtatactgtactgtacttctgctgaattggatcaatcggaagaggtaacttgacgctaaagctactactactgctgatgagctacagcttcgtcaaccacgcatgcgttatttaccttggccgaggtgaaagtgaattcctcgtttgactgtaacaaagagttaatcctgcttggagtgcaagggaattcatggcagaatgcagattaatcgatactactagtcactgatccagtagtcgacactggtttccaaaagtcagcgcaaagtctctctctttctttctctctctctcgtattttgtccgtttcatataaaaaacctattatcaaatatgagatatcttaatattataaatctgaatagaaatagcttatattcagattcgtaataccaagttagtaatcctgagttagtgtaatagtttgattttctggggacgaagagagcaagctagcaaccctacatgtgcaatatgcacatgtgcaatcgatcgatgagtgcttgttgccgtcacgtcgggctgtcgctgattgatccatactatgcctgtctggataaaagcttttcaacgcagaactgtgcatgtgtttgcaaatgtcatgggtgaataatgctgccatgtcattgccggggctgggtcccgggaagaactgcactgactgcgttcttgcgttagtggcttcatgcctgtttcgcgaaaaaagaatttctagttgtcacattggatgtttgacctgatgtcggaagggattcttagatacgagtaaaaaaaactaatttaataactcgtctggaaaccgcgagacgaatctttagagcctaattaaactgtcattagcacatgtggattaatgtagcacttatggctattatggactaattaggcttaaaagatttgtctcgtgatttccatgtaaactgtacaatagttttttgtttttatctatatttaatgcttcatacatgtgtccaaagattccatgtgacgttttgaaaaaaaaattggaaactaaaccaagcctcagataacaataaatagccaataattggaggaccttttctcctgtaagagcaggtgcaatagcagattttgaaccagctataaacacattccgatgagataaaagatgagagagaagagtagcgggctataaattcttagtcagctgcagcatggactccaagatacatgtgtgtatgataagtgggaccagatattaattgtgtagtatatatttataggtaactattggctattaagttgactatagatgatttggagccagcgattggctattaaacttgctctaagagcaagtttaatagtatagcccactactggctccaatttatctatagccaattcatacaatagttgcttactatactattaatatatggtcccacatgtcatacacacattgcgtcttggagtccgtgctatagctggctataaatctgtagcccgctgctcttctctcttatcgtttatctcattaaaatatgtttatagctaactaatagcctgctattgtacatgctctaagagctctgaagatagccgggccctgtttagatgggactaaaacttttaagtccctatcacatcggatgtttgaatattaattataaatattaaacgtagactattaataaaacccatccataatcttggactaattcgcgagacgaatctattgagcctaactaatccatgattagcctatgtgatgctacagtaaacattctctaattatggattaattaggcttaaaaaatttgtctcgtgaattagctttcatttatgtaattaattttttaagtagtctatatttaatactctaaattagtgtctaaagacagggactaaagttaactccctgatccaaacatcacctaagactgtgagattttgtgtcatcgatttgagtagtagtactagatgatatgtcttgagatttgagagttgacattgttcctaattcgcttttgttaatcgaagtgtggctcgtgagatcgatcgacggttgcattggcagcgtgtgcaagctcaatagtggttgccaattataaggctgagtttccttttttcacttttccaactcatatctctcatttttcatgtgcatgcttttaaaactattaaaacggcatgttttttaaaagaaaaaatatacaaaggttacttaaaatatatattgatttatttttaaactttttaagttaatatttaattaattatgcgctaataggaacaatgtttttcgtgcgggagataactccacctcccttacacagcctaagggcaggatctaacacgagtactctttcatcctaacataaattagatttacgtgttagatttatttatttggggataaagagagtatgtatatcgacatgtttttttttagaacgtggaaatttggtattaattgtttggtctcttcgtgcacttatctgaagctagcttcatactccttccatcatattttaagtgcagccatactttttcgtgctcaattttgatcgtctatctgaaaaaaatttaaaaacataagtcgcgcataaagtactattcatattttatcatctcataacaacaaaaatactattataaaaaaaatttaaataagacgaacgattaaagttagatagggaaactcatgatctcaatggatggagtaccagcgaggcgtattttatcgtttgttttcctcgagttatctgaagattttaggtacggtcaagtgggtcatacagtatgtactagtagtacaatctgctggtggcgtcagtagagatactcagcagagcagagcagagcggtgcagtaaattggctacaggttgggccggcagttctacgtacggtgtgctatctgtctaaacggctgtttgtctgcagcaaactaatcaatcagggttctggtataagatggaggcaataatccgatgaatgatccagtttggccggtctataaactactccctccgtccaaaaaaaggcaaaccataggtttccgtgtccaactttgactgtccgtcttatatgaattttttttataatttgtattttcattgttgctagatgataaaacatgattaatattttatgcgtgatttgtctttttaatttttttcgtatttttttcaaataagacgaacggtcaaatattggacacggaaaccagggtttgtctttttttttttgacgaagggagtaaatggtaagaccggtttattgtcgtccttgtcaaattttatttttattttttacgattacacgacagacgcaggcctacacatatataccactctatactcacaccgacgaatacgtccccacatattccgagagatgaaaactaccggcacatctctcattccgggaatgcgccctcaccaatttgttacatggttgatcgatcgcggccatatataaccaaacatgcattcagcaaagctagtataaaagacacaaccaggatcgatcacgtacggtgccggccggtcacgagcgccatcgccaaataataatgcgcctaattcgatagctgcgtgctgtagctacacattcattcgcctcgcatgcaggcgtacgtggctggctcgattatattgaccgtgcggttgagggcggccaccacgtacgatgataagaagaagatgcacggatgcaatgcatatgcagctgcaggtgttgattcgaccgaccagatcgacgacgatgtaatggatcatgtatggataagtcatcatccgaatcgatcgatgatcgatccccacatgacatgcatgatcctgcaatttcctgccgaccattttgccctaccccactatcaattacgggtggtcgatcaaatgaaatctttctcgcgctccctcgacctagtttaagagcatacttgcatgcatgaaaggtttcttctaattttcagtttggacaagaacaataaaaatgagcgatttgaacagcttgaaaactaacattccaaaaacggaacgaaacattagcatataattaattaagtagtacagtattagctactacctccgttttttaataaatgacgccgttgactttttctcacatatttgaccattcgtcttattcaaaaaatttacgtaattataatttattttgttatgagttattttatcactcataatactttaagtgtgattaatatcttatatatttgcataaaatttttgaataagacgaatggtcaaacatgtgagaaaaagtcaacggcgtcatctattaaaaaatagagggagtaatttttttaaaaaaattaatataacatttttaaaacaactttagtacgataacttttttaaaaaaattcaccgtttaaccgtttgaaaaacttgggttggaaaactcagctgcggaacacaggctgagtagtaatatctgtctaggccctttaatttcacgcttcatatgcatatgtatagcctcttattcttctttttttttttttgagaatttgtatagcctcttcgatcgtataattaaccagcgttgcgtttggagaacggccgagcacacaagagtgtgtcctagcctgccgtggccgtgcgtacgcacgtatacacgtacacatgcgtgtgcgtgcacgctgctgggtggtggtggtggtatatagtggatacatcagccggccacgtacgaaacacgactactgccctccaggtagctagctgaaattgcgacgacgacgacaccaattaattcgcatcgcacccgtacgtacgcgagcaatcgcaattcgcaatcgacgacatacatccaacactggtcgcgcgcgctactgatgcaacggcgcgatagcacgtacgtacatacgtcggtacgtgcgagatttatttcttcgacgtacggcgcgtgttaattaattttgctgtgtacatatagcagtacacagcttacgtgcattatcattccgttctttttctccaacaaaaattaaatgaagattaaagttttcgttctttttctccaacaaaagttaaatgaagattaaaatttttgtggcacgttttctaaactgctaaacggtgcgtttcgtacgaaaactttctatataaaagttactctaaaatactatattaatctatttttcaagtttgtaataattaaaactcaatcaatcatacgttaataccattttattttacgtaaaaaacttaatttttctctttatttttatctttaggagaaaatagcatcaccgtatatgacagtagtggtgtatctgcagtgccgtgtcggactcatcatcgtcgacctgaagggcccatatatgtgtagtgcagatgtatggctacaaggcccatggaagcgaaactttcactagcgtttttttagtcccacctcggggagcctagcgcacgggcgcggggtaataacatctccagggcgagctggtggcgtgcccaaatgaaggcacacccggcgcaaccatgcgcggtatgcgcatttagcaattgaaaatgctacgcatacgatcttgttacgataagacgcaacggcacggacggcaacagcaaaacgtcacgcacggcgcagtctaagcgtacttatgagccctaaagcccagttcacctctaaacctaactttacgttcactactccaaaccctaaatctgactttcatgttctgatctaatctgcaagtgtgaaactaatccaatagcatacgcatcgaagacgaaggtatggcatcttatttacttgattttctttagcttcacaatcatctttttttttacattattctctctttcttttttttcaaggaacatatttgtatgcgtaatttgcttaaccatgccacatgataaattcaatgttgagtgctaagtacaattactatatacagtaagatattaagaagaggattgcttaagatatgattgaaaagaaaattgctttggttggctcattggctctccaagcaagccaaccagatagcaggccaggacgtcaagagcttgggcttggatataggatcaactgaggcctgagggatccgtttgattgtacaaccatcgtacgaaataattcgtacgtatagcagcgctgggtatgaaggcacacccggcgcaaccatgcgcggtatgcgcatttagcaatacctaaaccaaagttaagtaattggagtcgctgcagggtgacagtgcgagcgtatgacacatacgcttagcaaaaagtaacaacttttttattgagatttcttttccgcattagcactcggggctggttcactttgtagctattttgaactctactaaaatttagacaaattttgatatattttggcattaccaatttttttacgaattacacccccccgaactatcgcggtcaaccgaattacccccataaaccacaaaaccggatattcttcaccctcaactatgtaaaccggacgaattaccaccctcgacccaatccacggtggttttggtctatatagcgtacgcgtggcagtccagtcagcattctatattaaaaaaaacatgagacccacctatcatactcctcttcctctctctctccctctctcccagcattctatattaaaaaactatgagacccacctatcatactcctcttcctctctctctctctcacgggtcagcggcaagcggggacacagagcggcagcagtggctaagggcggcggcctcggcgcggagctgcgcgttggcgaggcggacgaggcccacgcggtcgcgggtggcgtgcccgcgcgccgcgagctcgcggttgcagcgtcagagctgcccagcgcgtgtgcggagctcgtcgaggtgccgctgtttgcgcgcggactcctggttggagatcttccggcggaggcgccgctcgtcggcgtcggcatcggccttcctctccggcggctgggtcatcatcacgcggtggctgcagcggtggcgccgtcgaaagcgagggcgacacgcgggaggtccatgaagtcttgccgacgccgacacttcctaaatccccatcctctctctctctctctctct

SEQ ID NO: 8436 - DNA, 26602 bp, Oryza sativa
aaacgccagccgggaggcggagctgaaagaaaagctcgacgccgcccagggagtccttgactccgccgctgcccgagagcggcgggtaacagagactgaggcggcgtcccggcggcgcgaggagtcccttgaggcccgtgctatggcgctggaagaacacgccggcgccgtggagaaaggcttgacgggccgcgaggccgccgctactctccgggaggcgacgctggcggcgcacgaggccgcctgcgccgaggaggagtgcgcgctccgcctccgcgaggacgcactcgctgagcgggagcgagctctcgaggaggctgaggctacgaccaaacggctggcggacaacctgtcccttcgcgaggcggcgccggaggagcaggcgcgccgcaatcttgaatgcgtccgcgccgagagagccgcactggagcagcgggctgctgacctcgaggcgcgggaaaaggagctggacgcgagggcgcatatcggtggggcggccgcgggcgaaagcgacttagccgcccgcctcgcagctgccgaacacaccgtcgccgatatgcagcgagcgccattctccaccggggaggccgaggcccttcgcttggcgggcgagattgggcccgacatgctttgggatgcggtctcccgcctgaagcgcgccggtcggcaagcgggcctctggaaaggccagacgacggtgccccccaccaatctggaaggcctcgctccgcacctcaacaggatggcctgggttctcgaacaactccccgaggagcttgagaagaccatcaagtcatcctcgagggacctcgcgcggggagcggtcgaactcgtgctggcgagttaccaggcccgggaccccaacttctctccatggatggcgctggaggagttccctcccgggaccgaggacgacgcgcgcgcgcgggtcggggatgctgccgaccacatcgtcaacggcttcgagggctcggcccctcggctcgcgttcgcccccagctccgacgaggagggcgacgccagcggcgaggacgacggtggcgacgaggccggcgacccgggcgcattgggatgagcccccaggcccccgccaatctccaattttttctttttctttcttctttttgtatagatcaacttaatctgcaaaaatgatgaaaaatttctatgttaactttattttgctatgcatatgagttgaggatgatttgtgccgtggtccttttgcattttaacttgatttaagggctcgtgctcaagtcccgatcctcaaatggctcgggtcggggctagtgcctggggagatccacatgtcgagactggccaggccgggaacatggtgaccgagggttatgggtgacccgattgtgggtttttgccgattcccccccggagttcaccacgccccggggcacggctcggttctgggccccgcttggcgatttttgctgaccgaaccgagcccccgagggcaaggttgagcacgagtgaccttatttcaagttaagattcttcagaaggaaaaacggcacagacacaacctttaggaaattgaaactgcttttattgaaatgctgaaataagaaaagtaaagctgtgcatgtgtggtagcccccggctaaccctgcacacccgaggggggtgcggggttagcccgagcccgaaacctgacacccgacccccccccccccttcaggggtagaagcgacgaaggtgttcgatgttccacgggtttggcagctcagtgccgtcgcccgtggccagccgtacggagcccggccgggggacgccgatcactcgatacggaccctcccacattggtgagagcttgctcagtccagcacgcgtttggacgcggcgtaggacgaggtcgtcgacgcagagtgatcgggcccggacgtggcgctgatggtagcgccgcaggctctgctggtagcgcgcggctcgaagggtcgcgcgccgccttcgctcttccaagtagtcgaggtcatctctacgaagctgatcttgatcagcctcgcagtacatggtggcccgaggagacctcagggtgagctcagatgggagaaccgcttctgcgccgtagacgaggaagaaaggcgtttccccggtcgctcggcttggtgtggttcggtttgcccagagcaccgctgacaactcctcgatccatgaatcgccgtgcttcttgagaatattgaaggtcttggttttaaggcctttgaggatttctgcattggcgcgctccacttggccattgcttctggggtgggcaggtgaggcgaagcagagcttgatgcccatgtcttcgcagtagtcgccgaagagttcactagtgaattgggtgccattatccgtaataatacggttaggcactccaaaacgggccgtgatgcccttaatgaatttaagagcagagtgcttatcgatcttgacaaccggataagcctcgggccatttagtgaacttgtcgatcgcaacatacagatactcaaacccgcccggggcccgtttgaatggtcccaggatatcaagcccccagacagcaaatggccatgacaatggtatgatctgcagggcctgggccggctgatggatttgcttggcgtggaactgacacgctctgcatcgccggaccagatcgactgcatcattgagagctgtcggccaataaaatccttgacgaaaggccttgccaaccagggtacgtgaggcggaatgggctccgcactcgccctcatggatgtcagcaagaagctcaacgccttgtccctgaggaatgcacttcaggaggattccgttagccgcgcgccgatagagggtcccttctaccaacacgtagcgtttggaaatgcgttgtacgcgttcactcccttcgcggtcctcaggtagagtcttatctgtgaggtatgtttggatctcagagatccaagcaatcaatctaagggagcttggagcgctcccttcgggtcccgtggcctggactccgacgggcctcgggggccggtcaggcgcatccgtctcccctaaggggtcgggtcgcgccgacggctgggtaagcctttcttcaaaggcgcccggtggggtctgggctcgcgaagacgcgagccgtgagagttcgtcggcaaccatattatcccgtctgggcacatgccgaagctctatcccgtcaaaatggcgctccatacgccgtacttggcgcacgtaggcgtccatctgcgggtcagagcaccgatactccttacagacttggttaacaaccagctgagagtcgcctaacaccaggaggcggcggatccccagcccggccgccattctgagtccggcaaggagtccctcgtactctgccatattattagtcgctcgaaagtcgagacggaccaagtatctgaggacgtctccgtttggagaggtcaacgtgacccccgcaccggcgccctggagagacagagaaccgtcgaactgcatcacccagtgggtggtgcgaggcagctgagaggggtccgtgctggcctcgggtattgagacggtctctggagccggggtccactctgccacaaaatcggcgagggcctggctcttgatagcgtggcgtggttcaaagtgcagatcgaactcagaaagctcgattgcccattttaccactcgtcctgtaccctctcgattatgcaagatttgcccgagggggtaagacgtaaccacagtgacccgatgcgcctggaaataatggcgcagtttcctcgaggccatcagaatagcgtaaagcatcttctgggcctgagggtatcgggtcttggcgtcccggagggcctcactaacaaaatagacaggccgctgcacctttcggcggggccgatccccttcgctaggggccgtatccccggggcgttcttcgtccaagtggcctcttggggggcacttgtcttctgtgccgatgacctcggggtcggaggatgaaaggggcggccttccctcagtggcctcggggccgtcctgagggtcgggggctcctggcatcgtcggacaagcgggcaaagggccaactccggtcgtcaggggcctctggcctccgttcggctcgggggcctcttctccctgctctttcccgggtcgagtcagcacagggttagcctcggggtcagaaggcgttaagtgcggccttcccgcagtggcctcggggccctcctgagggtcgggggcacctagcaccgtctgacaagcgggcagagggccggctccggtcgtcaggggccgtaggccaccgtccgactcgggggcctctcctccccgctcgctcccgggccaagttagcacagaatgggggtgcacaaaatgaggattgtcttcatcgcgctccacaaccaacgctgcactaactacttggggggtcgccgctaagtaaagtagcaggggctcatttggctccggggcgactagaaccgggggagagctgagatatgcctttaactgagtaagggcatgttcagcttcctccgtccaagtaaacggccccgagcgcttgaggagcttaaacaagggtagcgccttctctcccagccttgatatgaaacgacttagggcggccacgcaaccggtgacgcattgcacatccctaagtttgctgggggggcgcatccgctcgatagctcgaatcttctcggggttggcctcaatgcctcgggcagagaccaagaacccgagaagcttgcccgcaggtacaccaaacacacacttatcggggttcagctttatgcgggcggagcggaggttctcaaaagtttccgctagatctgaaagtaaagtttcttggttgcgcgtttttacaaccaagtcatcgacataagcctcaacattacgtcctatttggctacccaaagaaattcgagtagtacgttgaaaagtaggaactgcattctttaacccgaagggcattgatgtataacaataggttcctacgggggtaatgaacgcagttttctcctcatcctccctagccatgcgaatctgatggtaaccagagtatgcatctagaaaacacaaaaggtcgcaccccgcagtggagtcgacgatctgatctatgcgaggcagggggtaaggatccttaggacatgccttgttaaggtcggtgtagtcgatgcacatccgaagcttgccgttcgccttgggaacgaccaccgggttcgccagccactccggatggatgacttcacggatgaatccggcctccagaagcctcgccacctcctcgcggatgaaggcttgacgttccggggcctgccgccgcactttctgccggaccggccttgcgcccggccgcacggcgagacggtgctcaatcacctccctggggaccccgggcatgtccgctggtctccatgcgaagacgtcagcgtttgcccgcaggaaggagacgagcgcgtcttcctatttgccatccagaagaccaccgatccgtgtggtcttggatgggccgtcgcccaaggcaacctccttgaccgggacctcgtcgcatgtggcaatccgctgcctcggggcggtgggggcagaggggccaagcctctcgtcaccaccctcgggcttggacgcagcagcgaggcggtcggcgcgctgctccatgcaagcgagcgcgactttaagatcgccatggacagagatggggccaccggggcccggcatcttcatctggaggtaggcgtagtggaccgccgccatgaacttcaccaacgcgggcctccctaggaccgcgttgtagggcagactgaggtccgccacatcgaagctcacccgctccgtgcggaagttggcgggtccaccgaaggtgaccggtaggtcgatgtgacctaatggccacgtgtgccccggcgtcacaccgataatcggctgggacggtcggagcaccatccccggggccttgatggcatcaaaagccgcgggggaaaggatgttgagggccgctcctccatctatgaggacacgtcccaacttcacgttgcagatggtgggggaaaccaccatcgcaacctgccctccccgggcaatgcacggtgggtggtcggtctggtcgaaagtgagagcaacctccgaccaccgcgcccgacgcatcgcctcatgagtaggggccatggccagaagctctcgcttcatagccttgaagctccggcgagagacgtgagcacacgctcctccatcgacggtggcaatggtggccccaggttcttggaaacctaggtcatcatcaccatcatcgatgtcaacagcgggggccttctgcttggcctcacttcgccgtttgccggaaggaaccgccggggacttgccctcacggcgttcctgcctcctgtcctcctcccacttcctcgttcgctcagccaggtttttgactgcacgacagtccgcgagatcgtggagggaggtgttgtggacggagcaccacctgccggcggggcgctccctgctgggagtaccagcctctttctttttgtcgctcgcaggcctcccctttcgagtggcccgcggagcgccctcgacggcgaggacatgaccctcgtcgccggaacggtccgacctcttcttcctcctcctgtcacgccgccctgtctgagcggcggatccgggggcggccgaagctgccactccggaaccggaggagttccatgtccacgcttcctccttacgagccactcggtccgcgagctgaaaaagctccgcggtagtctggggctctttggaagcgatcttttcgagcatgcggttgtgccgcacgccccccctgaacgcgtagatcaccgcgtgtgcagggatgcatggtatagtattgcggacttggcaaaaccgctgaatgtacgagcgaagcgactcatcatcgcctcgctgtactgcgtgcaagtccgcttcttcgcctgggcgcggatatgtgccttggaagttcatggtgaactgttggcacaaatcttcccaggagtggaccgacgcgggtggcaggttcattagccaaccccgcgcctgtccttttagggccatgggaaagaagttcgccatgaccctgtcgtcacccccagcggcctcgatcccggtcgtatagacctggagaaactcggtggggttgacgctcccatcgtacttctcggtgatggtgggccggaaccttgggggccaacggacattccgaagactcgccacaaaggctctacagccaacaccaccggccgggggcacggagggctgatcctcacgtccatgtcgaggtgacactctggacgaagaggcgccctccgttgcgcggggagtacgccggttattacgccggcgctcgatgtcgatgcgggcatccggctctccatgctgatcctcccgagttggaggtgtcgacgagggagtggcggccgaatggcgcgcagcagccgccgctcgccgcgccctccgccttgacgacacggagccggtggtagcggcgccggaggtcttggtggtggcggaccgtccaccagcacccaggcgctgctgtgccgtcatgaccaagttggccacgtcttccagccatcgttgggctggagactccgggtcatggacgacaggcgggtgtcgtaggagcgcaccagcagcctgaagcgcaccctgaggcgtgctgccgtcgccgtagacgaggaggcgacgctccccatctcgccgttctcctgcatcacctgcgactggtgatgccacggacttgtcgaccctctcaagcgcctccccctgcttagggctttggcgcggaggaggtgggggagtacgagctcgacggcgtggattcggctccccgtcgtcgccgctcacactcggagagaggtcgtgcgcttttccttgctcggccattaggctgaacaagaaaaacttggcgcacacggaagagtctgagagctcagaaagcacacactgagccccctacctggcgcgccagatgacggagctcgtggcccctcaccgggagaccgcgcaggcccccctttgccagttcggccgggggcttagggtgagatctcaagctctctctgtatctctctgtatgtggaaagatcacccgcccgcaagacacacgagacacggacgatgtatacaggttcgggccgctgcgaagcgtaataccctactcctgtgtttttgtggatttgtgtatggacaagttacaaaggattaacttcctttcccctcagccttctcccagggaaaagtcccccctctaaatgggcaaggtcctccttttatatctcaaggggataccacatgcacctttctctttccaaactggactgttctttttctctttaatgggcggagatcggtacggtttccatccgggagcccttctgatgggacagcccacacctacccccacctcccccgaagacagagatgacgcgggaccgtggctgtctgtcgatgacgcgaccagtgccagaccggtcattcttgtccaccacgcgtcagcttaacaacgtgcatgtttgcccttcttcgtgtaacaccttgcctgtaatggttaggatgaagcctggtataaatctgaccagggctaacgtgccatctctaagagataacacgctagctccggcttgagacgagtgcctagaggctttcgtcttgacgggatggggcaaggcgtgcgtcagaccgccagtcgccacctaacccgtgatctgaccggtctgtgactggtcacagaccgaataaaggaacgcgctgtactgcgttgcatgcagcgtgacacgcttgaccagactgcaataaatgctgttaggtgagcacagctgtgctcacttatcccatatatgtggcgcagacttccttaaggggtcggggtgcctcggccctcggggccggggcaagcgcaacccgacccccccctcgggggaaatcaggaggagggcggacacctcaccctcgggcccgacgtccccgaaggtgccaggccacgtgggcgattgtgtctgcctcaagcctctggtcatgatactcccggtcccatatcaccgacaagccgctatgtaggattcctacaaacgctcctaaaccgccacatggcgctctaataaattttgagaaaaaagaaaaatatctaaccgtttatttttatttaaaacggtggacccgataatactaaccattagattaaatccaccgaccataatttgttacgataaaaattattagatctatttttaagtggaactttaatttatatatgaatgatcttggtgacataaataaacaattacttttttagccgatctacacatttaatttaagacacgcttaagcgaagccatccatgataaatcatttgtgataggtctcatcacggatcaaaacatagcatgtttgaaatatgtctgtagggataatccatcatagaagtaagatcatctatgacaggcgtagttttgacgaattatgcatatgaactaactgatgataagtctccgctttccacttcctctctcagttttatagcaaatgagataaaaaaaataattagatggctaaatatttttttaacatatttgatttttagtttgatccatattgaccatgttttggtatgtaagattatacactaaaagtctatgaaaattcctacaaatgcttctcagctgccatgtgtaccctataaatgctcctaagccgccgcttggcactttgttagattaaagaaattcttaaaaattctaagaaaaaaacaaaacatctaaccattgattttcatttaatccgatggacccaataattttaaccattatatcaatctctaaaagacaagtgcgtgggccgcggttgaagaacgagacatggggcctcttctgctctgcgcaccacatgggcagctgtcggatgggagccacggcgggcgacggcgccgtcgatgtccgctgcgagagctaggaggcggggtggctgtacgtgtgcaacagctggctgtacgtgtgcaacagctgcgtgctgcccaccacggtgggcgtaaaccccatgatcaccatacagtcagtgcgtgtattgcgtcgccaatagcatcgctgactccctgtccggtaaaacgaatttctgtttggatcattagtccctggtggaagattgagaaggaaaatacctcactttaataattcaaacaagaagggaaataccatccctttaattaagaagggaaatacttcactttaatttaaattcattttgttagacctgttttcgaaacgtgcccgcgtgaatgagcgggctaccttcctagttgaagttaaaacactcataagttgaaaaataaaatctgtttccaaaacgtgcaattgtttactctaattatcactagtttataaagtcacgcgttcgcgcgactataattttcctatttatttagatgtgtgtatatgttatttaattagtttaaataagtatttatgaaacatgctttgcaataattgtagctataacataatagatttatcttgattcttttgttaatagtattattataaaaataaataacttaccagatttttatgaacgtatcatttgcagtaagtagacttgtaatctgaaatgccaattcttctttcggctttcagtggtgagtgtaaaggctagggttaatttctattcatctccaccattgtttgtaattacattttattgtaggactgcaaaaaggtaattacatctatcgtcacctctcctaccctccacacttccgcagttctccttttcattttcgttgctgtagcttttttttctctcccactaatcctctgtttgattgccttcctctttttacatattcatataatttagaatgtaggttgtccttctgctcattcatctgcacactatacacatttgagaagaaaccacgtggtaccgcgaacgatcgctaatttataatcgcactatccatcaactgcttaatagttgcggcaatttcggtagcagcccaagtcgttattgttgattagcacaagaagtgtccaaattattttccagtctgcctttttagctaatctgttccggacacggctcgccatacaaattggacacaagatcgcttaaattactactcgtttttttcccagttgagatttacaatttttcgtcgaccgaagagctcgatcgatcggtcgatcgaccacagatcatggattcccgtaacctatctcgtcgcaagcagagagctcgcctggaacataagacggccgacggcgacgagcgagagaggagcgaggaagggcgccgccagatcgccgtgcggttagccgcggtggtctccgggtccctgatgctcgccgccgccgtgctgctggagatgcacatgttgatgggtggtctccgggagctcgacgccatgagcttctcgggcttcgtcatgcagcacgtcgtcgtcgtgctcgccgccgccggcctcctcctcgtggcgttggctggctgcccgccgtgggacgacgagcggcggcgctgacggcgcatctatagctctctgatggcgatagcttcgaaaaaaaaaggttaattggatcatgctattataaattcttcagttttaaaatataccatttcaactatttaaaggtatgccattataatttttcgggtattgaaaatataccattacataccctttggatgtgtttaataaaaattttggaccaaattgtcctcgtcttcttcctttgcctcctcccatttctctctgttgttcatcttcttccttccattgcttgctgctagaagacgtaccgttggttggttgcttgcttgctaccgggcagaagctagtggaatgtattttggatgtttgactaactcgattcggctcagaaaaaaaaagattttcagattgagattaggagtacacagtaacgatcgctttgttttgatcatgcacagggcgcgctcgtcgacgagcacgtaatcggtggaccacgccatgctggccgagaaaggagatggggaggaagaatactagttgccagatccaaaagggaaagaaatacatactgtgtgtccaccctcatcttctcccttcgtcttctcccttcgtcttcatcttctcccttcgtcttcctttcccttctcccctctccctccctagatgcagctgcctgcaacacacagtatgttggtgttgcccacattcgcgaagagcctggctgaaccgctgccccagccatgtgcgtaaccacgacgcgcgcggtcgaccattctcagctgcccgaggaagttgacgtacgtccatagcatgccacgtggcagacctcgtgcggccaatgccagcaccattactcttgacttaagatcaactggacaaaaggtcacaatttagacctccattacgagtttcaaagttagacgacctgtatcattttctccaaatgcttcacactttagtttcactgcaatagaataggtcgctttgcagtgacatggaattgatcaggaagataaagaagaggatgtattggtaccttactgcttgaaatcgtcccaactatcactgaatgtcaacaatgcatcaacaaaagccatccctgcaattgccttcgcttgttggcaatgttctttggaattggaggtctttagaattggaggtcccgcgtaggcaatgcgatagtgaaaaccggcttcctctccgccagcgtcgagctccctcttcagcccttcctcatcggtgggccaccgccgttgcctattggagccgctcctccacttggcagtggtgttgtttgagtggctgtcacatgggccatacatattttgttttcatttatcttttcatttgattgatatatggatcctatattttctgtttcatttcttaattttctaatttttgcttctagtgacaagtcaacgtcatgtgggacaaggaccaagtcaatccagccacgtaggcgtcacgttagccgaaaattatcttgagacctcgtttgcattgattttgggagttgagggcacgttatatccgatattaccgtccaaggatattatttaaacttgatgttaaaagataagtgacctaaagtgaacttgttcctcaaccttttcatccctttagtctgatactgaagcacctatccatgtgcacccaggcttcaattgagcccatcagcccttccccggttttcgtttgcagctcaaatgctcgtactattgtagattttatttgaaactgttctattaaaacccatatcaacgcacatgatattattcagtttcagtaaatgatgaattgtggtaagtcttgcatttgtaagatgatttgtacttagaaccgccacaaccgtacgcattcgaaaagttattttcgtaacagtacgtgttagaaattatcgtcgatattaaaactagacaggttcctacgaagttcaatagtgtacgaacatacggggaaacgatatttttttttgtgctttttgcaaatgcgtgaagccgtgaatggatattcgatatataactcggaggcaaaactcgtacgttgcccaaagccccaaactcacaaatccatacagtataattctttcagaagacgaaaacgtagagatgtcttgctagctagctaaaatttacaattgatattaacagattatcaaagcgtacatatataaacaattgcaaagaggctattaagcgagccattcatcatgcatgcctagaaacaccaacacgtagacgtagttcatgagatcaacaacttggaggagattgtgcaacgggcggctgcggcggcggcggcgcggcgaggcgggcggtgccggcgatgaggatgtagaggggaccgggcgggtaggtggcgccgaagaggcggaacccctgctgcttgaaggcccagacatggacgacgtccttctccttgatgccgcaccgggcgatgaagtcgaggtagccttcccccttgatgatggcggcgccgctgctgtcccaccgcgtcagcagcagccgcttcatgccgccgcgcaggtgcaccagcgtcaccggcagcccgccgtgcgacctccccttcttcttcttcttcttcctcccgcccggccccgccgtctcctcctcctcctgctgctgctgctgctccgcgacggcgacggcggtgtcgctctccggttgcggcggagttgttactgcagcttcctcctcctcctcctcctgctgctgctccacgacgacggcggtgttgttctcctccggttgcggcggagttaatcctgcagcttgagcttcatcctcctccttgcgcaggaagctggcagcgatggcctcgcggcgggtgagcatggggatgaggctgcggccgacgccgccgcacgcgaggcggaaccgattctggtgcgagtcgaggtcggtgcgggtcaccgttttctcctcgatgaacaccagcggcaggtcgtacgggagccccagccggtagaacactatcttccgtatccacgacggctcgttcggcacttcccccgccgccagcgacgacgacgacgccggcgccacggcggcgagcgggaccgcatcgatgggcgcagacgcgaaagccgccgccacgtacggcaccagagcgccggccgccgcccgcttcttcccccgtagacgatcttcctcccccgccccgccggcgacgagaagccgcttgcggccaacgacgcggtggctgttgccgttgccgttgccccccgccggcgccatcgtaggctgtgcacccccttgctttttgccggagcacatggccgccggtgaggtcgtcgtcgatcggagatggatcgatcgacttgagctgtgtcgcgaattcgaccgagatctctctagcaatggagacgcggggttgtggatggctctcatcccgcaatgcgcagcgctggatttatagcggcggggaatgctcgtcgactcctactcggactccttcccctacgcctatctgatctgatgcattcgtcgtgttcgtcacggaatgggaaatgcagttcgtgtaaaccgacttggaaaccgatggcccactagatcgcatgggtgatttgggcttaggcccactcgctggtattgctcatcgagtccgagtcggactccaaattgtctaatgggctaccggcccaaaagtacgcgtccactttagtatgggcctcgtgtccacagaagcaacaccacaccaccacgcacgcctccgccgccgctccatggacgccggcgacacatccgccgccgccgctgtagcccctaccccggcgcggctgcgggaagcgctcgccgccctctccaaggtaatcgcgcaagctgagccctaggatctccttctgccgtgtaccctagctaaaccctaggatctccttctgctccaggcgttcgagtccggggattgctccgatggatccgccgcggcggccgtctccgacctcctcaacgccgccgccgatgcagctgatgcggaggccgacgccgaagacgaggcggcggccggggtcgtcgaggagatgctccgggaggtgcacgcgttcctctcgtccccgtcctcgaatcaggttcgatatcctgtgcttgcgtgtgattggtctctccgcgtggtgtttcatgttgcgattcgcggggtgggacgggagtaattttggtgatctcctgacattgttgccgtctcgtaatagttggccatagatgctctctcactagagctggtaaaacctgtggcgaagctgggggcactgatgaggaattgctgggacattgccaacgctatcattgaattcttcgtgtcaaactgcaacccgagggacatgctctccatcctatgtgaggtcagtcacgcgtgcgtttattcttgataaatcctggcatttggctttacagttgcgtcttgcaatgttgatgaaattcagaatatagacccatacagaggtaacctgtgtctcctttaactctgaaagatcctgtgattggaaagagttctggtttttattttattgagggatgaaggaaaaagtccatttacaagactgaactatcatcaaaatctgaaattcaactcggaactttgaaatgtgacactattctttaccctttcaaatagatctggataagttttatagttttttaaatatgaactgatgttccattgtttatttgttgcatccagtccaaacttgcacaatgccagggcactggaatgtccattcataattgagcatattttcattttgcattcaatatttccagacgacaatatatctctacctccttccctcgcttctgctctctgggttcctatggtatattgctcacctttttgtcatgacattatgttgctttaatacaggcagtagatgcaccattggcatcaaatggctcagtgtactttgttcttctattcaaggagctagccaaaggtatatgtttttatatgaagatttccacagccatctctctgctcatcgtttggaaattttggtttctaatggatgaatttccagataggaattgagatacttaatgctctatgcctatatatatataagtttagatatattcgcttgacatatgttacacaccttgtgtgaatattaactggttaacatttgtattattaaatatgttttttttctattcttcctagctaattgtgctttgggctagtgcttgttttgattcagaggaggcatactgagcaagtaaaagtcacacttcctgctgtccttcgagttatgaatgctgttataccagaatgtgacgaggaacatggaaagatcatcgttgatatgtacaatgcagcacttagaattggcaatgccattcaagaaatgtgcaaaaaaatggtttgttgagttaaaatgccattcaagttgaccctgtgtcctaaacaatatgcggtcgccttttcatttgtcttttctgattaattttgcattattgtttccatcaccaaaaggtaaaccagacgaatgaagaactctgttctgtacttagtctatactcccttcagaacatagtaagtacaaaactgtgttatttatatatgttattttcaattagatttagaaagatttattttcttaatatgttattaattattatacactcctatcttgcaggctcttgtatcaagatgcaaacaacagcatattctctctgcttgtggttcagttgttcttcagcattcaaaaattctgacattttgtgggttcacttatttgggtcttttgactggtaatgatgtcacctcagccaccgataagatttcaaaaggtgtttaacttttccaaattatttttcacttggaaatattgtattctgtttgcttgattgtcaactgatgcatttgtttgcaaagtgatgtagatgaagatgcggatttgctcgagtgcttttcttttgcaatgaatggtgcaaatcttgcaggtttgatgatcattttgactacactttcattggacaatgcatgttgtttagataccacttggtcacatgcttgagctttttgcagttatctggacctatatggatgatgaaatctcaaaatatgctggcgctgagctggaatcagcgctgaaagatgttaagggcaaccatacgaggatgtggcaagcaattaacattcttagatatgtgttgtcttcaactcattacccatgggtaataaaatcccacagtttggacttactgctgactatagctaatgaaagtcgtattgaggaaatcaatgatcatgtagatgtttcatcttctggtcctcaaatttttgcaacactcaaggtaatgttacgctttacttatatatttaaaaatatgtcccaatctactatatcaacaatttaagaacattcacaggccattgaaagtgtcatgatttccgccccagatgcattaatgcggaagaaagcttttgctactttgaaacaggcaagtatcatatatactgttgggttttttctttctctttgttttaacaattgtcatgaatatatttttgacttgtgtttgtatatgtctgtaagataatatgggcaggatggtaacatgttccttcttcagtctgtactgtggcatttcttctttttcattttgaatgtcacttctttataacgctgaaattttatcaggttatttcaatggtgccatcctctcagagattcaacatcttacaggctcttataaagaacagcatcttcccttcattggtaagaactaagaacacaatctctgcatgcagtttaaatggtattctctctatcccaaaatatagcaaccaagtactagattagatgtctcgtagcactagtggtgtctaatcttgtactaggttgctatattttgggacggatggagcaagtaagagcatcctgttgatgcccaatatacatatagggaaagaaaggaccatacaatggatctcagattttcagttaccgccacctaacattttctggtgtatgatgtgcttggattgatagaaacatgcagttttatgatttttaacttcatttttcaactccatcctttaaatcgtgaattatgttttttcttctagactgcacttctcctagatctggtgaaggatgaagtttcgagagagattcgtcgagctgatcaggatattgttgaatcggatcaattacaagatggtggcgaatggccaccaccttggttttctcatgcacttgagttggtggagctgatcttgaagcctccagaaggtggccctccttgtcttcctgatcatggtgaacaggtaccctctttttatgtcactactcatgaggagcataaatatctgttggaagaactcaggcaacagcaacatagatggaatagcattagttgatacaagatgcctgtttccgtattaaaataaaaggaggatgactgttgggcaggaatagatctagataagacagacatgaacttggagacttgtctaaatccacagaaggacgtcaaggactaggagagttctgttcatctttaccttattaaatctcagtgaaccagctgtgtcatcttaggctcttgagaaattagcgaatgattataacaaatggcttcaatacttataaagatactcttaacaactgaataaaatatagaataattaaagtctcaactccaatccaaaacattgaatatcgatctatcatttttcctttttcttttcgacttaatttgtcagactctcgtaatctcatttttgtaacttttaacattgaatgaatttatactagtaaattgagatgagaaatgcatgtaaattttgtgggaatatttcatgttaaatttgatgtataaatcaaagctggattgcgtgaatatctggattcaccttatatgttgcccacttgtgttgtgcttcgttattcttatgtgtcctgctaaagtggtaattttgttttacatcattttatggcttatgcctagaaaataatctgccatggttcacttttttttatttgtatgcaggtattatcagctttgaatttgctgcgatttgttctgataatagattcaagaggtaatctacaaaaaacctgtgcttaaaattatatgtacttaactgaactgtaacaataattgcatggatttgctattgcaaaactaatgctacatgatcacaccatctataagactataatctgcaagtttctctgtggctctcgaagcttaatgttttcataaattaaatatttgattaaacataattttggttatcaacgtgctggtgcatggttctaatgttcatttatctaaccaatagttgtctaaaacactttcttctttttcattcttccaaatgtcctttaataaagagctgtaacattgaaactctgttaatgtgaacctatatagtgtactaatcccaagtaatgtgttgaaaaaattgcatatgtcctttttagtttccaagcttgtaaacccatagaatcaaagatggctcgagacataaaaagaagtggttgcatcttatttgaacaaaagatgcatggtgttcgacttcatgaatggattaaggctcatgtgatttagtcctgggattaatgtgaatcgtcagtttgatatatttttcccattttgtccaggatcaagatcaagaaaaatgtttggggaagagactatgaggaaggtgtactcagagtggctgatgccattaagaccaattgttgcaggaattcaatcagaaagtgaagaggatggtagcgacgttgcaaatcatatcatgtgctcgttaaatcctgttcaattagtattgtaccgctgcattgagctggcagaggaaaagatgaaaggtttctaacgttttcagttcactggtttttgtacaatatactgctgtctcgaggcaaaacatgaacaagttgtgaatattatcccaatgatttgaagttgcgtttttttatgttgtacagtgatactgtcgtccttcataattcattttgctggatggtctcgttcgctttttgcaaagctgcaccggccgagccgtgcccgcgcgccacgcatggccgccacacggctccggccgatccgtgcccgcacgccgtccacgcgccgcatggccgccgccgccgcgcatggccgccgaccgggcgcgccattgacggggagaagaaaaggagagggaaaagaaggaaagaggaagaagaaagaaggaaagaaattagcggctttgcaaaagagccgctggattttttggaaatcacgcgcataactcccagcatggaaactttttgcgcataggaccctagcatttcggaaactcccatttctaaccatcgactgcatggaaacttagaaataggcccttaaactttgcagatttcgcttatatttcattttggagcatattatgtcttagtgcaaattttgaatttaaatttattaaggcattatttactgttaatgaatattttgaatttttcgttttcagtatttatatgaatatatgcaactttttcaccctttttctatgtatgtatttgtacgcatttttaatatgaactctagtatttctttattgaatatttcacatttcttattcgcattgcctatgaataaaaatattggaaaaaccatgaaatatttgcattcatatttgcgactatgttactagaagtaacttatgaatattttgtcactttttgccacagaatgttaggaatcacgaataaggagttcgccaaactggcccagcatggccagaactacctgacttgagcatccaatgtctagatcgtccttggggccaagaagctccgccagacgattgggatgggcaccccgcaggaccgtgcgcctacccctgatgagaatgatcaggcgctgcacttcctgcggcaccacctctgcaccacgctcaagaatgagtacatgggatttaggagcccactcactctttgggccgcactcaagaagtggttcaagaagttgaagtacaccatcctaccccaagcagagcaggactaggttcgtcgacttcaaaagtgtctccgagtacaattccgcgatgcaccggatctgtaccaacctctccctctatggtaaggttatcacggacgcggaaaagatcgaaaagatgctctccaccttccaccctagcgtcgcttagagcacttgtaactacaggcaagtgtcatacaaggagtatgacgagatgatcgacatcatacaggtgctcgagtctcatgatgaggttcttcgcaagaactttgtctcccagacgcctagcaagagtgttggccttgaagttaatgcttaattagtgttgactcgacacacgtgcatatcccacaaccataagggctccctccgaaaaaaatggaaatttttagcagaggtacaagtgtagcctaaattccttgacaataagaaggattatttccagtcattcaggggaagagaaataacccttaaatgatactccctccgtcccaatatatagcaacctaggaccggatttgacatatcctaggactatcaaatccggtcctcggttgctatatattgggacggagggagtaaatgttaggaaaaatggtcaaacaaaggatgcacattttaccaagcaccagcgaatgcaaagtatgaaaagcacacatgagaattagataactgcctatcacttttgtgattcggagagcatgaccaagttgcattactcgaatataatacactggaggagggtgaaataccgaagaatgcaaaggtatacctcatcttgtctagaggcctcgaaaaaaaataggacaagaactctggctccttaaatctctaaagtaactggagacgtttggtgaaaacgggacgaaaatgaactctcaagctcatagtcactaaaagtaaccccagaatttgagggggagccagttcagagctggcaaatagtatgaaacctcaaaacatgcataccacatcttcccatcaaggaagaaacccagcagtcggagtgcacaccaacactggtaaaatgaaatagtcatgcccatatcaaagaatagaagcataaaaaaattgcatatccccatatatccatggatactcgcataagtgtcacatacaagtatacaaaccaataagaattggtaatgagacatgctatggacaatattctcttcatatagcaaatcagtggcagtcaacccagagttgaaaatcaactaaaagatcaaccggcaacgctgacctatagttgacaatgaatggctaaagaaattttggattgggcactgcatacaagcattaaaagtcccaaactaagttgataatccgaatatcatcacataaagaaagaaagctcattctttccgaacgagtttgagataaataggtagaaacctatgttgctttggcccgtaagcctacaacacatgaagaagcgaaccatagtatatcagaatgtgaaaatacataggttccttggatatagttcaccatttttagcaagtaacacggttcgagctttgtccaaaccccaaaatcattatcaaaaagataatgatatgtgcatcgcaccaacactaatagactatacaaacactataagttatgggaaaatcatgcaatatttaaccattagagcatcactcgaactatcttttgaaaagatacgagcaacgagttttgatggttcacacttaaaagagatacggaattcaaggggagaattttgccagtctattaacaaaagcttgaactgaagagtcaagtacccaaaaccaattaagaaaatcgatacaagaatttggctaggttgtactctttttttccttgcataagttttcatgcagtttcttattaaggtttttaatgaggcaatctatgcgacatatctgcttatgctatatactatttctccaatttttcccactgggtttttatgaagttttaacaaggcatggacatcacatggtgagtgtccaatgggagtgttaagaaactttgggctcggcccacgaaggcctggcccaaatacacttgggcctatcaccgaaactttcatatttaggattgcactatataaagagaggagggggctactcttttacagttgatcgaagaattggaataagaaaaaaagtctcacctcaactatgtgtcttcactttatattcttagaattatacaactccgttggactaccccgtagcaagaggttgtataataaatttaactgtcacgagtacacgccaacatgtttcgtgagtacacatgctaattatgctaacgaccgatttaaccatcttgatgtccaagcttaaagacctaaacttcggatccgtctccagtctccgccgatctcgacaccaccacgccctcgacgcgtcgcccctctcgacctcccactcctcgatccaatcctcgccgtccatccttccctgcgtccaatccccaccctccattcgacctccttcttaactttcagcgccgcccaccgttccacatcgaacctccgccatgagaccaccaccaccccacctcctcctcctcctcccccgccgccgccgccacgcctcctcctcctccgccgccgccgccgccgccggagagctcgtcggcgccctctccgccttgccctcccccgactcggcgcgacacctcgacgccctcctccgtcgcatcggcggcggtggcctcgccgccgtcctctcgtccctgccctcccctctccccgcggcctccgccctccgcctcctcctccacctcctctccaggacctcctccacctcctcccgctccgaggatgacctcctcaccccgcgcgtctcggcgctcctcctgccctccctcatcgccgatcgcaccgccatccggacggcgcgccgcctcctctcacgactcctccacgtccacccgctccgcaccgccgcggaggcggtcgagacgccgcctccaccccctcctcggacttcctcatccacaccttcatcacctccccggcccaaggctccctctgcagggccgccgacgcgttccgcgttctctcctcgcgcggcgcgccgccctccatcaagacctgcaatgcgttcctcgaagcccttgttcgtgcaggtcagctcgatgccgcccgcgaggtgttcgacgaaatgcgtgaaagcaggaacgtcgctctgaatgagtactcgtataccgccatgatcaaggcgctctgcaaggctggaaaggtggatgctggttttgagatgcttgcagagttatggcgggctgggcttcagccaacggttgtgacgtacaatgtgcttatggatgcactgtgtaagagtgggagggtggaggaggcctttcgattgaaagggaggatggaacagggagggatgacaccaagcgtggtcacattcggtatattgatcaatggtcttgcaaggggcgagcggtttggggaggttggcattgtattgcaggagatggaacagttaggggtttcccccaatgaggttatttacaatgagcttattggttggcattgtaggaagggccattgctcacaggcactcaggttgtttgatgaaatggttttaaagaagatgaagccaacagccgtgacttataacttgattgcaaaggcactgtgcaaggaaggggagatggagcgggctgagaggatattggaggatatgttgtcaattggaatgacagttcattgtggtttgttcaatacagtggttgcatggcttcttcaaagaaccagaagattggagtcagtggtaagcattacaaatgaaatggttacacgaggtatgcgcccaaatgatcctctgatgacagcttgtatgagggagctttgcaagggagggaaacatcaagaagcagttgggatttggttcaagacattgaacaaaggtttaggtgttaatcttgcaacttccaatgcgctaattcatggtctttgtgaaggtaagtacatgaaagaagctacaaaggttatacagaccatgttaaataagggaattgaattggatagcatcacatataacattatgattcgaggttgctgcaaagacagtaaaatggaggaagctattaaactccatggcgacatgaccagaagagggtttaagcctgatcttttcacatttaatactttattgcatgcttattgcaatttgggtaaaatggaggaaacctttcatctgttggatcagatgaaaactgagggccttcagcctgatatagtgtcatatggcactataatagatggtcattgtaaagcaaaggatattcgtaaagcaaaagaatatttgactgaattgatggatcgtggacttaaacctaatgtgttcatttataatgcacttattggtggttatggtaggaatggtgacatctctggtgcaattgatgctgttgagactatgaagtctaatggcatacaaccaactaatgtgacttatggtagtcttatgtactggatgtgtcatgctggtctagttgaagaggccaagaccattttttcacaagccagggaaaacaatgttgacctgggagtaattggttacacaattatgattcaaggttactgcaaactaggaaaaatggttgaagctgttgcatactttgaggagatgcgttccaggggtatatctccaaataagcttacttacactactcttatgtatgcttactctaaatctggtaacagtgaagaagcttccaagcttttcgatgagatggtgggctcaggtgttattcctgacaatattacttatggtacactaattgcaaggtgttctgaggtaaattcattggataaggatataggacatactgctgaattgtcctcaggcgctttaacaaaagatgatcgtatgtataacatattatctaatggaattaatgctccttggtgccagaaagaagctgcttccagtgttgaatgatgtgtggtcaaggaaccttagggcacaccttctttgttctgacaagaaccgtccaagaatgaacagggagtagggagaacatgtggccactgattctgcctttgatcttatgaattttacatctcctaacagttccctccaattcatttggtcatggtcaatctttgggagctatccagcaacagcagaggttgttctgaacatttctgctcaagtttacatgatcatccacctactgtcttgggtggggtatccaacag

SEQ ID NO: 8437 - DNA, 3093 bp, Oryza sativa
gcgggcgaaggagctggacgcgagagcgcacagcggcggggcggccgcgggccagggcgacctagccgcccgcctcgcagccgccgaacacaccatcgccgagccgcagggcgcactggactcgtccgccggggaggtcgaggccctccgcttggcaagcgaggtagggcccggcatgcttcgggatgccgtctcccgtctagaccgtgccgggcggcaggcgggcctctggggcgggcggtacgcgaagtacgccgccaaccaggggggcctcgcccagcgcctctcagagatggccgggaccctcaagcggctccccgaggagctcgaggagacgatcaagtcatcctcgagggacctcgcccggggggcggtggagctcgtactggcaagctaccaggccagggaccctgacttctccccgtgggcagcgctggaagagttccctcccggaaccgaggacggcgcgcgcgcgcaggtccgggacgccgccgaccacatcgtccacagcttcgagggtacggcccctcagctcgcgttcgccctcgactccgacgaggagggcggtgacgatggtgcggacgacagcaacgacgaggccggcgacccgggcgcgtcggagtgagcccccaggcccccgccaatcttaataacttttccttcttcttccgaggccttcgggcccccttcttgtatagactgatttaatctgcaatcaagtaaagaggaaacttctgtgtcagttctatttattgtgtgtatgagacgaggatggtctgtgccgcggtccttctgtgtcttggcttgaacaagggctcgtgcccaggtcccagcctcagacggcgcgggtcggggctagtgcctggggagatccacgtgtcgagactggccaggccgggagcgcggtgaccgagggttatggatgacccgattgtgggcctttgccgattcccccccggagttcaccacgccccggggcacggctcggttctgggccccgtttggcgattttagccggcccgggccaccgagggcagggtcgggcacaagcgtgctaattcaagccaagattcttcaaaaggaaacgatggcacagacacagtcctcaggaaatcgaaaatgcttttattaaaatacggaagagaaaaaaggtaagtatatgcatgtggtagcccccggccaaccctgcacacccgggggggtgcggggttggcccgggcccgagacatgatacccgacccccactaggggtagaagcgacgaaggtgttcgatgttccacgggttaggcagctctgtgccgtcgcccgtggccagccgaacggagcccggccgggggacgccgatcactcgatacggaccctcccacattggtgagagcttgctcagtccagcacgcgtttggacgcggcgtaggacgaggtcgtcgacgcagagtgatcgggcccggacgtggtgctgatggtagcgccgcaggctctgctggtagcgtgcggctcggagggccgcgcgccgccttcgctcttccaaatagtcgaggtcgtctcggcgaagctgatcttgatcagcctcgcaatacatggtgacccgaggggacctcagggtgagctcagatgggaggaccacctccgcgccgtagacgaggaagaaaggcgttttcccggttgctcggcttggcgtggttcggttcgcccagagcaccgctggcaggccatgaccctgtcgtcacccccggcggcctcgatcccggtcgtgtagatctggagaaactcggcggggttgacgcttccgtcgtatttttcggtgatggtgggccggaaccttgggggccaacggacgttccgaaggctcgccacaaaggctcgacagccggcaccgccaaccggggacacgggaggccggcccccgtgcccggaccgaagtggcgctccggacgaggaagcgccctccgttgcgtgggcggcgcgacgagcatcgcgctggcgctcgatatcgaggcgggcatccggccccccacgcacatcttcttgggtcggaggcgttgacgagggaatggcggacggacggcgggtaacggccgccgctcgccgcgccctccgcctcgacgacatggagccggcggcggcagcgccagaggcctcggtggcggaggaccgcccgccggcgcctaggcgctgctgcgccgtcatgaccaagtcggccacgtcatccagccaacgccgggctggagtctctggatcggggacaacgggcgggtgacgcaggagcgcgcccgcagcctggagcgcgccctggggcgtgctgccatcgccgtagacgaggcggcgacgtgccccgtctcgccatcctcccccgtcgcccgcgggcggcgaagtcgcggatcctccgacctccccgagcgcctccccccgcccaagatttcggcgagagggggacggtggggtgcgagcccgacagcgcgggttctgctccccgtcgtcaccgctagcgctcggagagaggctgtgcgccactgcccgttcggccattgggctgagcgggagaagcttggcgcacacgaaagaggacgagggcttcgaaagacacgcgcgccccctacctggcgcgccagatgacggagcgtggggctcctcaccgggagaccgcgtaggcccccctttgccggttcggccgggggcgctaagtgagattcttcgccctcgatctgaggaacgtcagcgagagaggaagcgcacaagacacgggcgacgtagacaggttcgggccgctgagaagcgtaacaccctactcctgtgttctggtggatctgtgtgtgaaggaatacagagagctcgagagcgagagagagttcaggctcttctctcccaaaaatcccaaatcccctctctcctaggcctgggcctcctttttatctggtcaggggtcaccacatgggcctctcgctgcctaagaaaggaaacatgctttttacaatgagggctagtctacagccggaagtgacctctgacaagcacagcacacgtcttctgctccgctcgtcagctctctcggtggacgcccgtttcaaccttcattcaatggccagcgactttct

SEQ ID NO: 8438 - DNA, 7760 bp, Oryza sativa
cggacgggcgacggcagccaactccggcgggcgcgtagaagggcgacgaaagcgatggccgagcgggggagcagcggcgatgactccggcgggcacgtggacgggagccgacgccggcgggcgcacggacaggcgacgactcaggcaggcgcgcctaagggcaatgaaagcagtggccgagtggggaagcagcggcgacgaacacgcagccgagagaagtcaccctaaactcctaatgtgtgattaaaagcatctaatcattccaaagtgtgattaaaagctaatcaccccaaagtggcatttcattaagaagtatcatctatggagtggcatttttataaggacatcttatgaggtggcatcatgctaaagccacccctatagagtggcataatgttaaatttctcttaaatacattgttcatcctataccacttaacggaagacggctaacggaaccctaacagcaatgacatttttgggataaagtcacttgtacgatggtatttcatgaaacacataattttcgatgatattccttggaatagaacacttgttaatggcgtttcttagattttctctattttttttccaaacctttgtgatgtgtggccgccaaattattagccacgtagttgtcaatgctcatcgacgatttggctaggtttgcaaggatgggtggcaatgctatggagccatctaaacatgccctaataatctaatttgaatttcaactattgaggccaacttgagctgacactcgcagtcgcaactcgcaagtggatgagataggaagatcccacagtgctactactcctgcttcacgtggtgaacagacaacagtgtattgaaagccacattttgtcgcttaatttattaccagaacgcttaaactagcttgaacatgagtattagctgaggttcgtggagtactcctagatgacatagttttgacatatgtatatgtgatagtcccacatgtcatatcgagatggaaacaaaaggattcttttttttctaaagaaaaaaggaaaaattgaagactgatttctagtctacaccaagggatgtacgtaaccatgcattcagatcgagtcactaccacatactcccctccgtaaaaaaaaaatcaaaccctagatttaaatttggacatagggtttgattttttttaacagactagtacttctcaattttggtgaacctttttttttttacctttgaaccaactagctagggatttgattttgatatcttgcaaaaatggctaggtggtgtatactgagtgtgtgtgtagagttctgttattgtattgatatactgtttttgtatttggttaattcctgtaccaggcaagaacgtgcatcagttgattttaattgatcgccttctatgattgaataattaatatcattagaaggctaccttcgacaactcatgcatgtcacccttattttatcctgcactataagaggatatcatagttagctatcttaattaaaccgagaattttctgtttgattgttattcatgatcgcctggcagcagagatgccgagatacgtacttctacttggatgtttatatctatttctaacccagtgatgccggaagaggctgataattggatgcacttatcaagctaagataattatacgtttggtaaaattttacagtaaaagtacgcgaaattattcagactagtaatcatggaattgatcaaacatattgttcttttgcaaatagacaaataaaacaacattaatttgaaacactatttatttgaagcagcgcaaatagataaaaacaagagtaaactttacttgggccacctagcttttattatgaatgttttcacttggattgccctttaaccgatgctttcactttggatcggataatcttacattgtaacacttggatcaccctgactcttttctcaaccatataaggccatcaccaatgcgtgtctttgggttgttccctcgccgacagacgtctgcttttccatccgcgccggctccccacgatggagcgcgtcccccggctgagggacgagtctctcgccacttttcggctgagcgatgcagtcgagggacgcattggggggcgacgggctcctgtagacatcggttccccagctcgtattcctattccaccccttagcagagctagagtcgccgccggccgacgacgacgaagagggagagaggagcttcattgcgaccaccgggaccgggatggcttcctccgcgtcctcccagagcgcggcacagccgggacggcgccgaggcggacccataagagagagagagcggcaagcggcggggccgacgtatccgcggtggtggcgacggcggagtaggcggctctcctcgttgccctcaccaacgaagcttcgtccgtccgcgcggcgctcgccgtccgccgcctcgtccgcctcgcgctcaccgtcagccgcctcgaccaccgcgacccgtgcggcactcgtcaccgtgtcctcgatgtggcgtggccggcgccactccatccaccggggggctagatacggccatggcggcgccggatctaccgcctctggggtcaccgccgccaccttccacgggagaaagaaagggagagcggcgggagaaagcggcaacgggagatgcgggagagatcaaaggtgccccaaagtgaagactaggaaaaaaaagtgacatccatatgaaaagatctatctatttagatcactcgagctagcatcacattgatggtatttgtaactatggtttcttttgtttgtcctttattggaagatattgtttagaaatagctggataaaaccgttagttgctgtaaagttctatattcagcgtctcaaatgtaggtttatctcttactaattagttcaaggcatttatatgttacaagaatgataacaaacaaagcataacactaaaaaggagccatagtaaaagatgcacttttgaatctaataactaatcagctctaatgtggctagccaagtaaagtaatgccttctcttattctgtgcagaaatgccgctacttcaggacttgcagcagagtcagtatctaacaaaactataaaatgattgaaatgctcaagactttatctttggaaagagagagagagaaagaaatgctcgagacatggtatccaccaagtgtatcataagtcatactccctccattaaaaaaaaaccaacctcgcactaaaatatgacacatgctaatatgaggttggtttttttggacggatgtagtagtagagtagaaagcatcgtggccccattcagatgtttgatataaaaaggagaaagaatcaatcaagaagtcagcaatttagcggaaaatgcccaagatcaggggtgccgccaaaagaaccaacgctgatgtggaagtaaatgaaacatatgtatttaactacatgcgtgaatactttctttttttgttgatgtccggaatggtatgcctccacagatccacctaaaacattttgagaaaaaaaaattgcaaagctttgagcttggttttccgaaaggatgtccactggaaaattgttacaacaattttacatcggtaataataaaagagagctacgcacaagattaatttaaaagtgaatggatgcacagaaacaaaagtttaggctgtgtttgggaggtgtagttgggaactccacctcctcgcacggaaaatctaaagcagtccattagtgcataattaattaagtattagttttttaaatggatcaatatgatttttttaaagcaaatttcgtatagaaacctttttaaaaaaaatacaccgttaaaagtttaaaaagtgtgtgtgcgaaaaatgaagggattgagttgggaactcaaagaaacaaattaagcctcgggcaggttcaaactctaacgagaggtaattcgctactcttatcttgatcttggtggattgtatctgacagatgtcattgatacgttgatctagactatagttgtcgtgaatttagtgccactaaggagactccctgcgcatcttatataggtagaggcattgaggggcagggttataaggaggaaaaggtaagatacgactttaatttcctaatttatgcaatgtattattcagttagggctctacaccctgccttgtgtaaggcaacataacattcgagtcatactctattgtatatatcatggtttcggaccaccaccagtaccgtgtggatacttcttacctatttcctccatgcaacctctcctcaaaattgagaaaagaaaggccgtgtttagttgttttggcaaaatattttttgatgtatacgggcacatatttgaagtattaaacgtagactaataacaaaacaaattacagattccgtctgtaaactgtgagacgaatctattaagcctaattaatctgtcattagcaaaagtttactgtagcaccacattgtaaaatcatggcgtaattaggctcaaaaaattcatctcgcaatttacatgcaaactgtacaattgattttttttcgtctatatttagtgctccatgcatatgtccaaataattgatgtgacgaaaaagttgaaagtttgaacgaaacacagccaaagcatacccactggactaatgccatcctccatatggtggagtgcaaacgccaaacgatgctgagttttcgatttgcatttctgaataaaccgatcgtgcctgtcaagttctaaatgaaatgattatgcgtgcggttcatccatattttcaaatttatgttccaaatgatcatgtgatcggcgatccatgtatccctaggttgattctaaaatttaaaattgcctccgacttggctcacacaagcggacctaaagaaggccctgtttgagggagcttatcccagctgcagcttttagaaaaagctacttctgctagaagctactccaaacagtccacagcttctaagaatctatacactggtggagaaaccgtttgtagtcccggttggtaaccccctttagtcccggttgtccaaccgggactacgaatccgggactaaagatagctatctttagtcccgggtgaaataaccgggactaaagatcgatctttagttccggttcgtgttaccaaccgggactaaaaagatcgatcagccacgtggtcggccaaaccatctttagtcccggtttgtgttaccaaccaggactaaagatcggtgcaccattttttttatttgcatggccctgtttgctgcatggttgattttatatatatatatatatatatatattacacacacatatgtacaatttaaagcacttaacattttatgtgcatatatatatgttaccaaaatatatattaacacagaagtaaatgtgtacatatataaatatatatatatatacatgcatatatagtacaattcatttgttcggtagctatagctacgacttcgacgccggcgttgtgtcagaagaggaagaaccgacgttatgaattgtcgatccgtcgtagtagaattcaccgtcgggattaaggacttcttcgttgatgaatcccatcagttgttcttgaacagccgtgataaaatccttgtgtgggagattatccctcatgtgaatacgctatcgtttgaaaaataatgacgtatcaatatatgaaattaataaacaacttaacaaatcaatacacaatgaaattttgaatggtttatgtatacgtacatcgagcactcgtgttgtgcatatttggtttgataggcagtgggcatactcgcatacgtagtagccgcataagttagttccctggtcctgctttgcacactacatgagaaacgatgagagatttaatatactctttatattaaattagagattcaattcaatataattttggatcatgcatgtactcactggaaaatgaaacctccatccaagtttttctttccaagtcccacggaccaattgacggaaccgatcccaagccccacatatgcagttgcaagctatgattaattaattattacctgagatcaacataatagcaatagattccccgcgactttggaatagatggcattatattacctgtctatcagtttgaagaccttgtcaaaaatcttctcctctttattcattgagtcgtatacagtgactctgcatgcgtccaagtcaaagaataacaggacccagtggaatatgaaatatgcgtgagatgagatatatatgatcgaaaatgtacatgctatatgtatgggaataaaatttgttcgaacgacaataaaaactcactctgtgttgtacggcagtagtatgtacgtcttgaaatgctgctgcgttaggagatggacgagattgtcctctgtgtctttctcgtacttgtcgatcatttcggtgttgattttccgagggtcgatgaacccagtatcgtagaccctccgccgtcgggcccattgaatctccattctacaacgatgaaaggaaagtattattgcttatatatatgccaggagctaattattgaacgaaacaaatcgaactcaaagatactcacaaaatccatgcgctcagaagagagacgtcgagggtgtccaactggtacagatcgaagagatccttgaaatggatccagagaacatcttctccttgcaagaagtcggggtttctgatcctcgctccgaacatctctctacccttggcgctcatttccatgtaccgttcatggaatttgtacatctgtgtcgatagggactgcagctgttcaggtttgataagcggtttaccgagttcaaacttgtatgccacttccgccttcgggattggtgcgcctccaaccaactgatccacagttagaccggtgtctgaaatgaattccgttatgccaaaatcttcgctggtcaccaacggctcaacctcttggtttggttgttctccaagctgagggactggtttggacttcttgtgataggctctctgaagtgttcgatcatagtccgatatctgtaacgcttccttgtttgttgtggacattcccttgaagaagttcttcacgctcgggttaataggtatcttcttttcaggactccaaggcttgagttgcctcttcacctctcctgccacataagcatcaagctcctcttgactgcaatcgtacggtggctccttgtttttggtggcgtcaactttcgccatcttcgttgcccttgtgcgggcaggcggtggagcttggcgagaccttgtcttgggaggtgcaggcggacacggtggaggcggaggagccggaggagatggtgcagcaggaggtggcggaggagccggaggagatggtgcaggaggacgtggcggaggaaccggaggagatggtgcaggaggagatggcggagccggaggagatggtgcacgagacgccgcttatcgcccaggaaggatgatgtaccgcttgcgccatagtatgatggcgtggcttgtgtctcgtagatgcgtctcaccgtctcctcctgggtagtccaactcgaggtcctcgtacgcggcttccaccaactcaactacgaccctcgagtatcctgctggaatcggcttgcagtggtaagtcctggaagggtctgttgggatgaccattcccgacgccaccttcacgtgatgagaggttatctattaataatcaacctaagcagcacttgcggaatgtacaagtcaaaaatcatcaaactacgagtataccttgattgataagttcttgaagggaatatgcagctcacatggtgtccgttgc

SEQ ID NO: 8439 - DNA, 1922 bp, Oryza sativa
acactccttagtcaatttcataagcatacgcatctcttgatgcagactactggaaggaggatgtccgtagtgaaatggattccattatcgctaacgggacttgggaggtgacagagcgaccctatgggtgtaaacctgtggggtgcaagtgggtgttcaagaagaagctcaggcctgacggtactattgaaaagtacaaggctcggcttgttgctaagggctatactcagaaagaaggcgaagatttctttgacacttactcacctgttgctagattgaccacaattcgtgtgctactttccctagcagcctcacatggtcttctcattcatcaaatggacgttaagacaacttttcttaatgaagagctggatgaggagatctatatggatcaacctgatgggtttgtagttgaaggtcaagaagacaaagtgtgtaaattgttgaagtctttgtatggtctgaaacaagctcctaagcaatggcatgagaaatttgacaaaacattgacatctgcaggctttgcagtcaatgaggcagataaatatgtgtactatcgccatggtgggggtgagggagttattctgtgcttgtatgttgatgacatactgatatttaggacaaaccttgaggtgataaatgaggttaaatcattcttgtctcaaaattttgatatgaaggatttgggagtagctgatgttatcttaaacattaagctaattagaggtgagaatgggattacactcttgcagtcccattatgtggagaagatcttgaatcgctttgactacattgatagtaagcattctccaacaccttatgatcctagcttgttgcttcgcaagaacaagagaattgcaaggaatcaactggaatactcctaaatcattggctcactgatgtacctggctagtgcaactaggcctgatatctcctttgttgtgagcaagttgagccggtttacctctaatccgggagatgatcactggcgtgcgcttgagcgagtaatgcgctatctgaaaggtactatggaattggggcttcactattctgggtatcctgcggtactggaggaatatagtggttctaactggatctctgatgtggatgagatcaaagccactagtggatatgtcttcacactgggtggtggtgctgtttcgtggaggtcttgcaaacagactattttgatgaggtcaatcatggaagcagaactgacggcactggatactgctactgttgaggcagaatggctgcgtgatctattaatggatctgcctattgttgaaaaaccggtgccggctatccttatgaactgtgacaatcaaacgataattgtcaaaatgaatagttctaaggataatatgaaatcgtctagacatgtgaaaagacgattgaagtttgtcaggaaattgagaaactccggagttataacgttggattatatccaaacagctagaaacctggcaaatcccttcacgaagggactatcacgaaatgtgatagataatgcatcgaaggagatgggtttgagacccatgtgagttatactatggtggtaaacttatctatgtgatcggagatcccgtgaattagaacctgggaagaacaaaccattagtaaactagaggagagtaccaatctataccctttctaagtgaagatgtatgtactctcgtgagctgcaaggcaggttggctatgccttaatgagttctgttggctttaattagcgaagatgatgtcctacagagcattcttgaaagaacttacctttgtaagcttgactgttggtcgcagtctatgaagattttgggtgaatcttctaggaagcttacgaaagacctaggagtatgacttatacgctccacccgaggagtagtctacaaacagtctagtaccagataagactctgagtgaaac

SEQ ID NO: 8440 - DNA, 2578 bp, Oryza sativa
ccggcccggcagcgtgcgggtgcggcggcggcgtgccacggcgacggcgtgggggcccagcggcgtgcgggcgcggcggcggcgtcggggcccggcggcgtgggggcgcggcggcggcgtggcaagctcgaggcggtggcgacggagtggcagtggcgacggcgtggcgttgcggtggcggcggagtggcagtggcgacggcgtggcgtcgcggtggcgtggcgtagcggcccggcggcgtggcgtggcggcgtggcgagcttgaggcgggggcggcggagtggcagtggcgacgatgtcgtcggcggcggcagccgcgtcgaagtcggtcatcggccgtggagagagagagagatatcgagatcgagatcgagagagagaggcagcggcggctctcacccaagagatgcggcggcggcgtctgcggcggaggcggcgaggaccgccaagcgatggcgagagacgacggcggtgtcggcgtggggttgccctaggcacggtggaggcgaaggagaagccgagatcgaaaaacgtctaagtgttggtggagaagacgagggcacaccgggaatatatataccctcggatctttagtcccggttggtgagaacaaccgggagtaaaaatatctttactcccggttcgtaacaacaaccgggactaaattctacgcagaattcaatgacctcctcttttccataccccttggcgatgcttgcctctggacgagcacggttacaaacatacttcttcagaacgcccatgtacctctcgaaaggaaacatgttgtgtaggtacataggacagagaataccgatctctttgacaaggtgacaaagcagatgcgtcattatattgaaaaatgaaggtggaaatatcaactcaaagctgacaagacattgcaccacatcattctgcagggcttctaatctatcaggatcgatgaccttctgcgaaattgcgttcatgaaagcacgtagctttgttattgttgcccggacattgtctgggaggatatcccttattacaactggtagcagctgtgtcatcaacacgtgacagtcatgagactttagatttgtgaacttcttctccttcgtgcttattatttgctttatatttgtggagtatccagacggtaccttgatgctctccaagcattcaaacatactttacttctctgccttgctaatagtgtagctggctggactcaagtaatggcttcctttctcctttggttccgggtgaaggtcaccgcgttgttccatatgcttcagatcattacgtgcttccagtgtatctttcaactttccatatacacctaggaagccaagaaggttcacgcaaagattcttagtgaggtgcatcacgtcgattgcgtggcgaacgtccaagaattcccaatagggtaactcccaaaatatagagttctttttccacatcaccgcgtgaccatcttcgctctctataggctggctgccaggcccctttccaaacactactttaagatctttaaccatagcaaacactgttttcccgctgcgatgtttaggcttcgtacggtggtccgccttatgttcaaagtgcttgcctttcttccgtaccgggtggtttgctgcaaggaatcgacgatgacccatgtacacaaccttcctacagtgcttaagatacgtactttctgattcatccatacagtgagtgcaagcgttgtaccccttgttggactgcccggataggttgctaagtgcaggccaatcgttgatggttacgaacagcagcgctcgtaggttaaactcctcctgtttgtcctcatcccacacggggacaccttccttcttccacaacagtttaagatcttcgaccagtggtcttaggtacacatcgatgtcgttaccaggttgcttggggccttgaattataatcggcatcattatgtacttcctcttcatgcatagccacgggggaggttgtagatacacatcgtaacgggccaagtgctatggccactgctcatctctccaaaagtattcatgccatccgtacttaaaccaaaccgaatgtttcgtgcgtcctttccaaagtctttaaattttctgtcgatgtttcgccactgcgaaccatcggcggggtgtctcagcatcccgtcctgttgacgctcttcagcgtgccatcgcatcattctagcattcaccttgttcctaaataaacgccttagccgtgatattatagggaaataccacatcaccttagcaggaattctcttcttcgttagctgcccgtcaacttctcctggatcatctcgtctaatcttgtatcgtagtgctttgcaaacagagcatgcttctaggttctcgtactcctcaccgcgatataggatacaatcattcggacatgcgtgaatcttctgaacttccagtcctagagggcagactatcttcttagcctcgtacgttgtctcgggcaatttgtttccctccggaagaatgttcttgacgagttacaataaatcgccaaatgccttgtcactaacaccattttttgccttccattgtaagaactccagagtggtatccaactt

SEQ ID NO: 8441 - DNA, 10359 bp, Oryza sativa
cccctcccctccctcttttccccttcttcctcaccgccggtgccggcgccgccgcctccccccgctgccacagcaacggtcaccgcctccgccatctccggcctccacttcgcctcctcgtcgtcatccacagagctgattccctcacctctcatagagagagcctgttcgcgttgctactcgtgtctgatcccccacctcccgagccgctccaagaggtgctcgccactagcgacgtccacgtcgcgctcccctcttcgccgtccccaccactcctccctcccctcttcaccgtcgccgttgcgctcgccgaacacccccgcacccgcctcggcgccgggctgtgtggagccagcgggcgagatgtggcccgccgccgtgtccctccgcctgggagccaacgccggcggaagcgcggacgggcgacggcagccaactccggcgggcgcgtagaagggcgacgaaagcgatggccgagcgggggagcagcggcgatgactccggcgggcacgtggacgggagccgacgccggcgggcgcacggacaggcgacgactcaggcaggcgcgcctaagggcaatgaaagcagtggccgagtggggaagcagcggcgacgaacacgcagccgagagaagtcaccctaaactcctaatgtgtgattaaaagcatctaatcattccaaagtgtgattaaaagctaatcaccccaaagtggcatttcattaagaagtatcatctatggagtggcatttttataaggacatcttatgaggtggcatcatgctaaagccacccctatagagtggcataatgttaaatttctcttaaatacattgttcatcctataccacttaacggaagacggctaacggaaccctaacagcaatgacatttttgggataaagtcacttgtacgatggtatttcatgaaacacataattttcgatgatattccttggaatagaacacttgttaatggcgtttcttagattttctctattttttttccaaacctttgtgatgtgtggccgccaaattattagccacgtagttgtcaatgctcatcgacgatttggctaggtttgcaaggatgggtggcaatgctatggagccatctaaacatgccctaataatctaatttgaatttcaactattgaggccaacttgagctgacactcgcagtcgcaactcgcaagtggatgagataggaagatcccacagtgctactactcctgcttcacgtggtgaacagacaacagtgtattgaaagccacattttgtcgcttaatttattaccagaacgcttaaactagcttgaacatgagtattagctgaggttcgtggagtactcctagatgacatagttttgacatatgtatatgtgatagtcccacatgtcatatcgagatggaaacaaaaggattcttttttttctaaagaaaaaaggaaaaattgaagactgatttctagtctacaccaagggatgtacgtaaccatgcattcagatcgagtcactaccacatactcccctccgtaaaaaaaaaatcaaaccctagatttaaatttggacatagggtttgattttttttaacagactagtacttctcaattttggtgaacctttttttttttacctttgaaccaactagctagggatttgattttgatatcttgcaaaaatggctaggtggtgtatactgagtgtgtgtgtagagttctgttattgtattgatatactgtttttgtatttggttaattcctgtaccaggcaagaacgtgcatcagttgattttaattgatcgccttctatgattgaataattaatatcattagaaggctaccttcgacaactcatgcatgtcacccttattttatcctgcactataagaggatatcatagttagctatcttaattaaaccgagaattttctgtttgattgttattcatgatcgcctggcagcagagatgccgagatacgtacttctacttggatgtttatatctatttctaacccagtgatgccggaagaggctgataattggatgcacttatcaagctaagataattatacgtttggtaaaattttacagtaaaagtacgcgaaattattcagactagtaatcatggaattgatcaaacatattgttcttttgcaaatagacaaataaaacaacattaatttgaaacactatttatttgaagcagcgcaaatagataaaaacaagagtaaactttacttgggccacctagcttttattatgaatgttttcacttggattgccctttaaccgatgctttcactttggatcggataatcttacattgtaacacttggatcaccctgactcttttctcaaccatataaggccatcaccaatgcgtgtctttgggttgttccctcgccgacagacgtctgcttttccatccgcgccggctccccacgatggagcgcgtcccccggctgagggacgagtctctcgccacttttcggctgagcgatgcagtcgagggacgcattggggggcgacgggctcctgtagacatcggttccccagctcgtattcctattccaccccttagcagagctagagtcgccgccggccgacgacgacgaagagggagagaggagcttcattgcgaccaccgggaccgggatggcttcctccgcgtcctcccagagcgcggcacagccgggacggcgccgaggcggacccataagagagagagagcggcaagcggcggggccgacgtatccgcggtggtggcgacggcggagtaggcggctctcctcgttgccctcaccaacgaagcttcgtccgtccgcgcggcgctcgccgtccgccgcctcgtccgcctcgcgctcaccgtcagccgcctcgaccaccgcgacccgtgcggcactcgtcaccgtgtcctcgatgtggcgtggccggcgccactccatccaccggggggctagatacggccatggcggcgccggatctaccgcctctggggtcaccgccgccaccttccacgggagaaagaaagggagagcggcgggagaaagcggcaacgggagatgcgggagagatcaaaggtgccccaaagtgaagactaggaaaaaaaagtgacatccatatgaaaagatctatctatttagatcactcgagctagcatcacattgatggtatttgtaactatggtttcttttgtttgtcctttattggaagatattgtttagaaatagctggataaaaccgttagttgctgtaaagttctatattcagcgtctcaaatgtaggtttatctcttactaattagttcaaggcatttatatgttacaagaatgataacaaacaaagcataacactaaaaaggagccatagtaaaagatgcacttttgaatctaataactaatcagctctaatgtggctagccaagtaaagtaatgccttctcttattctgtgcagaaatgccgctacttcaggacttgcagcagagtcagtatctaacaaaactataaaatgattgaaatgctcaagactttatctttggaaagagagagagagaaagaaatgctcgagacatggtatccaccaagtgtatcataagtcatactccctccattaaaaaaaaaccaacctcgcactaaaatatgacacatgctaatatgaggttggtttttttggacggatgtagtagtagagtagaaagcatcgtggccccattcagatgtttgatataaaaaggagaaagaatcaatcaagaagtcagcaatttagcggaaaatgcccaagatcaggggtgccgccaaaagaaccaacgctgatgtggaagtaaatgaaacatatgtatttaactacatgcgtgaatactttctttttttgttgatgtccggaatggtatgcctccacagatccacctaaaacattttgagaaaaaaaaattgcaaagctttgagcttggttttccgaaaggatgtccactggaaaattgttacaacaattttacatcggtaataataaaagagagctacgcacaagattaatttaaaagtgaatggatgcacagaaacaaaagtttaggctgtgtttgggaggtgtagttgggaactccacctcctcgcacggaaaatctaaagcagtccattagtgcataattaattaagtattagttttttaaatggatcaatatgatttttttaaagcaaatttcgtatagaaacctttttaaaaaaaatacaccgttaaaagtttaaaaagtgtgtgtgcgaaaaatgaagggattgagttgggaactcaaagaaacaaattaagcctcgggcaggttcaaactctaacgagaggtaattcgctactcttatcttgatcttggtggattgtatctgacagatgtcattgatacgttgatctagactatagttgtcgtgaatttagtgccactaaggagactccctgcgcatcttatataggtagaggcattgaggggcagggttataaggaggaaaaggtaagatacgactttaatttcctaatttatgcaatgtattattcagttagggctctacaccctgccttgtgtaaggcaacataacattcgagtcatactctattgtatatatcatggtttcggaccaccaccagtaccgtgtggatacttcttacctatttcctccatgcaacctctcctcaaaattgagaaaagaaaggccgtgtttagttgttttggcaaaatattttttgatgtatacgggcacatatttgaagtattaaacgtagactaataacaaaacaaattacagattccgtctgtaaactgtgagacgaatctattaagcctaattaatctgtcattagcaaaagtttactgtagcaccacattgtaaaatcatggcgtaattaggctcaaaaaattcatctcgcaatttacatgcaaactgtacaattgattttttttcgtctatatttagtgctccatgcatatgtccaaataattgatgtgacgaaaaagttgaaagtttgaacgaaacacagccaaagcatacccactggactaatgccatcctccatatggtggagtgcaaacgccaaacgatgctgagttttcgatttgcatttctgaataaaccgatcgtgcctgtcaagttctaaatgaaatgattatgcgtgcggttcatccatattttcaaatttatgttccaaatgatcatgtgatcggcgatccatgtatccctaggttgattctaaaatttaaaattgcctccgacttggctcacacaagcggacctaaagaaggccctgtttgagggagcttatcccagctgcagcttttagaaaaagctacttctgctagaagctactccaaacagtccacagcttctaagaatctatacactggtggagaaaccgtttgtagtcccggttggtaaccccctttagtcccggttgtccaaccgggactacgaatccgggactaaagatagctatctttagtcccgggtgaaataaccgggactaaagatcgatctttagttccggttcgtgttaccaaccgggactaaaaagatcgatcagccacgtggtcggccaaaccatctttagtcccggtttgtgttaccaaccaggactaaagatcggtgcaccattttttttatttgcatggccctgtttgctgcatggttgattttatatatatatatatatatatatatatatatatatatatatatatatatatatatatatatatatatatatatatattacacacacatatgtacaatttaaagcacttaacattttatgtgcatatatatatgttaccaaaatatatattaacacagaagtaaatgtgtacatatataaatatatatatatatacatgcatatatagtacaattcatttgttcggtagctatagctacgacttcgacgccggcgttgtgtcagaagaggaagaaccgacgttatgaattgtcgatccgtcgtagtagaattcaccgtcgggattaaggacttcttcgttgatgaatcccatcagttgttcttgaacagccgtgataaaatccttgtgtgggagattatccctcatgtgaatacgctatcgtttgaaaaataatgacgtatcaatatatgaaattaataaacaacttaacaaatcaatacacaatgaaattttgaatggtttatgtatacgtacatcgagcactcgtgttgtgcatatttggtttgataggcagtgggcatactcgcatacgtagtagccgcataagttagttccctggtcctgctttgcacactacatgagaaacgatgagagatttaatatactctttatattaaattagagattcaattcaatataattttggatcatgcatgtactcactggaaaatgaaacctccatccaagtttttctttccaagtcccacggaccaattgacggaaccgatcccaagccccacatatgcagttgcaagctatgattaattaattattacctgagatcaacataatagcaatagattccccgcgactttggaatagatggcattatattacctgtctatcagtttgaagaccttgtcaaaaatcttctcctctttattcattgagtcgtatacagtgactctgcatgcgtccaagtcaaagaataacaggacccagtggaatatgaaatatgcgtgagatgagatatatatgatcgaaaatgtacatgctatatgtatgggaataaaatttgttcgaacgacaataaaaactcactctgtgttgtacggcagtagtatgtacgtcttgaaatgctgctgcgttaggagatggacgagattgtcctctgtgtctttctcgtacttgtcgatcatttcggtgttgattttccgagggtcgatgaacccagtatcgtagaccctccgccgtcgggcccattgaatctccattctacaacgatgaaaggaaagtattattgcttatatatatgccaggagctaattattgaacgaaacaaatcgaactcaaagatactcacaaaatccatgcgctcagaagagagacgtcgagggtgtccaactggtacagatcgaagagatccttgaaatggatccagagaacatcttctccttgcaagaagtcggggtttctgatcctcgctccgaacatctctctacccttggcgctcatttccatgtaccgttcatggaatttgtacatctgtgtcgatagggactgcagctgttcaggtttgataagcggtttaccgagttcaaacttgtatgccacttccgccttcgggattggtgcgcctccaaccaactgatccacagttagaccggtgtctgaaatgaattccgttatgccaaaatcttcgctggtcaccaacggctcaacctcttggtttggttgttctccaagctgagggactggtttggacttcttgtgataggctctctgaagtgttcgatcatagtccgatatctgtaacgcttccttgtttgttgtggacattcccttgaagaagttcttcacgctcgggttaataggtatcttcttttcaggactccaaggcttgagttgcctcttcacctctcctgccacataagcatcaagctcctcttgactgcaatcgtacggtggctccttgtttttggtggcgtcaactttcgccatcttcgttgcccttgtgcgggcaggcggtggagcttggcgagaccttgtcttgggaggtgcaggcggacacggtggaggcggaggagccggaggagatggtgcagcaggaggtggcggaggagccggaggagatggtgcaggaggacgtggcggaggaaccggaggagatggtgcaggaggagatggcggagccggaggagatggtgcacgagacgccgcttatcgcccaggaaggatgatgtaccgcttgcgccatagtatgatggcgtggcttgtgtctcgtagatgcgtctcaccgtctcctcctgggtagtccaactcgaggtcctcgtacgcggcttccaccaactcaactacgaccctcgagtatcctgctggaatcggcttgcagtggtaagtcctggaagggtctgttgggatgaccattcccgacgccaccttcacgtgatgagaggttatctattaataatcaacctaagcagcaacttgcggaatgtacaagtcaaaaatcatcaaactacgagtataccttgattgataagttcttgaagggaatatgcagctcacatggtgtccgttgcgtgatctcatcaacggggcaggtggtttcgtcctgggtttgcatggcgtccatgctctgtgatccgacctgccccgttgaggcgcagctgctatgattgcctgatgggctgaccattgcaggatgaatgtacggatggggatcctgggactgatgtgcggccatacgttcatccaccttccttgccacctcctcttgcatgctgagctcgtagcttgataccctgtactcaagatctgcaatcttcgcatcggtatctctcttgctcctcatccgactcctgtacgtgtggatgtcctccttaaatccaatcttccagggaatcatgcctttccctcgtgttcgtcctggatgctcgggagtctgtagggcgagtgacagctcatccttctctctgtcgggtcggaatgtgccctgagaagaggctaccactgcgtccgttagtcgactggcagcctcgcgtatctgatcgctaaagacaagggagccatcaactgggttaagcgttccaccgtgagcatagtaccaaaacttcgatcgatccggccatttagcggtggccggttcgatacccctctcaatcaaacttgcctccatctcctcccacttcggcattgcgacgctatatccgcctgaccccaagtggtgatggtacttcttcttggcggcattgtctttgtttctagccatcatcgcttgccattgttgccctgtcttgtaagcaacgaactcgtcccaatgatcccttagctttgggaatacgtcgaagttcggtgttagtcccttcaggatgtatttcttgtagagatctcccttgaagctctggaactgttctgccattttcttcagagtccagtgtttcactatgttctccgtacccgcgggtagcgtgaacatctcgagcattgtggtccacagcatctctttctctgagtctgggacaaagctatcattatccccgcgtgcccatgttctgcgccagtacaccgtgctgacaggcacgttgtccctcacaacccaaccgttgtggcgtacaaaattcttggctgcttctgccggggcactaggtcggccgtcttcgtccacctcagttatgatgtgccgaccctctatcttcttcgcggcacctcgttgtccgcgtgccctcttctgtccagcggagggatgacttccactagcctcctcctcatcgttcccctcctcgttcccctccgcatccctctctacgttcccctcctcgttcaaatactggtttagatcgtcgttcccctcttcttcgttccagtactggctgcttccctctatgattgtatcgtatagtatctgttcctcatcgcaatcagccatctgtgcatacaaaaaatatttgttaggtatataggatgtatttgctaaccgtaatattaaaactctgctaatcttatattaaatctctaataatcttatattaaatggctactaatctcatattaaaattgtaataatcatatatatatatatatatatatatatatatatatatatatatatatatatatatatatatatatgctaagtctaacaatcttatattaaatctctaataatcttatattaaaattgtaataatcatatatgctaagtctaacaatcttatattaaatcgctactaatctcatattaaaattgtaataatcatatatgtatgctaagtataacaatcttatattaaatcgctactaatcttatattaaatctctactaatctcatattaaatcgctactaatcttatattaaaattgtaataatcatatatatatatatatatatatatatatgctaagtctaacaatcttatattaaatcgctaacaatcatatatgctaagtctaacaaacttatattaaatcgataacaatcttatattaaaattgtaataatcatatatgctaagtctaacaatcttatattaaatatctaacaatcacttctttacatcacttgcctgcgcgaattacttcgatggctagctaccaattcggcttgagggacgacgacgacgtcttctctgcaacattaccaggaaaatgtattactctaaacgggccaagttacatatataatcatatatgtattaccaataaaatgtatt

SEQ ID NO: 8442 - DNA, 6173 bp, Oryza sativa
ttccctgttcaaccgcgacggttcaccttcctctccgctctggtgctgcgcgccttcatcgacgctcacaaccgcaagtagttttgccgagcaaccggtctttccgccacctcggtacgtgttcgacatgttgcgcatatttgatctgttcatgttttactgcttagtttacatgtgtagatctaatgatacgttaatgctattatatatctgtatgtcatgatttatttatggaatatattaaatcattatatgcctatattctcaacattcaaaagacacgagatagaagcttatgaaaagttcaaaagaagtgcagtggggactgcattgtacattcatccctgcctgtcagaaatttcagagggtgatgctgcagatagggcgagcaacttgacagatgccactgttgacagcttgattgagtctatcatcattaaagatggggtgaaagccaagtttttctttaacattatgtctcttgctaactctgcaggagagaagttgcttgccttcagtcaatatatacttcccatgaaatttttggaaaggttgttggttaagaggctgggctggcatgtagggaaggagattttcatgatatctggtgatactagtgcagacgacagagaagtggcgatggatcagtttaacaactctgccgatgcaaaagttttgtttggttccatcaaggcctgtggagagggaatctcccttgttggtgcatctcgagtcatcattctagatgttcatttgaacccatctgtcacccgtcaagcaatcggacgtgcattcaggcccggacagcagaagaaagtgtttgtgtacaggcttgttgctgctgattctccagaggtgaagttccatgaaactgcattcaagaaagaagttatcccaaagctatggtttgaatggagtgagctctgcactactgaagacttcaaactgaatcaagttgatattgatgactctgaagatgaactattggaggctaatgctattcgccaggatatcaaggctttgtatagaaggtcagctatctctttctccccgtgcgcatgtgcaagttaaaccctggagatgctctctctgtcttatccaaaattgtcttgtaggtaacaagttatatgtggctgctgtacaccatgtacataatgcaatgctgatctttctgggtgatcatcgctgtgaagtaaggggatttctcgtgaatcattcttcacgttacaaaatctttgccccttattctgttctgattgtatgaccatcagctttttcgttaaccttcatcatttttcttccttcaggatgttacagtagccccttctaatgccggagttccgttcatgctaggatttatcgttaacctcggtcgtttccctacctatttgaaccactgtccgctttgttaacatgtgccagcttggcgcagcggttcgcgagctgatcctagtcttatttccttctgaagatctccaggactaataactatggtttctgccgttcctgctaacaacttaaataatgccactgtttccttacctgtcttttgtgcacttcaattggtcttcaaatttgccctttttgatagggtaaagatagtttctttctgcgcgtaacggaatgtaggttatccgtcgtgcatttgtgcatctcttttatctcctttgttgcagtacctggtttttgtgtcgaccattctagtttcaattctggctcccatgaaagatgctttaagactcgcaatgccaggatgcatactttttttttatgcatactcgatcgttggctcgttgcactcatcgactccagatcagttgccagcggcaactaatctctcaaaggcctggcggttgtgttcacctggtgctggtgcatccgagggtgacgacaaggacaggggaagaggagctgtttgtacttttgcagggcccgctttttttcagcttagaagcataatatcacctgattgttacgaattatttgcttcatgtttaagaataataatttctcatgaaactttcttttactttattgcccagaccacttgttttaaactacaactatttattatgtttagataatatgcaatatttaatgtattcatattattaatttatctgcaataaaacaaacactagcctagagcgagtaggaagagcgggctgctggagtgcttgcgggaaaggaattgggccgctgtggggttgacgttgacatatgcccactggtaggaataagttcacttcagatccctcgatttgtcacccagtccgatattcatccttgattcgaaaaactagatataactcatcccccaacttacaaaaccatgcaaacaaggtccctcggtagtattctctgattttggctgacgtagcacacacgtggcacctttgactaggtcttcgtctcacgtggcattgacgtggtgcttacgtggtagtttgataaaaaaaagaacaaaaattagaaactaaaaaataaagcaaaatatgcaggacccatatgtcagttaaaaaaagggggactcacatgttagtgggtcccacttcctccatctcaccctcttctcctctcttccaatcctctcattttctccgaggaaccgggcgggagcgggggacgacagggttggcaagggcctgtcggcggcagcggcggcgtcgaagcgggtgaccactggctagggtagtggcgccgccgcatttcctccacgcggcgaggatggaggcagtgggagacggggtcagaaatcgctcaaaatccccccgatttcaccttcgcgtttcccagagatggacgttggcgttggcagcgaagaaggtagtggggcggaagctgggtgggccgaagaagccggtgccacgctccgtcaaggccgggctccagttcctcgtaagccgctacctcgagaacggccggcacgcgcaacgcgtcggcactggcacccccgtctacctcgctgccgtcctcgggtaccttgccgcagaggcagggggttttaactatttgccacttttagatttggcaaataactatttgccacccctatctcaatgacatgtgggtccacatgtgtctatgacatgtggatccaatggcaaaaagttaattgccacatctaaatgtggcaaagccattgtgtttatctcttcctctcccgatccttccaacccactcggtgtgcaagcgtggtttaaccgggatgggatggccgacgggtggcgaggagagggcgttggccggcggggagaagggacggcgcgcggcggccgacgggagaggagcaatgcgggctggtcctgcagcgtagctgtggcggccgcggcgaggaggagggaggggagtagcagcagcgcggggacacccatggctgtcgcggcgacggcggcgaggtggtaggttggatgggattgggtttgtgctctgctctgtctcgtaagagtagaaatggaggtgggcgagccgcccttgcccccatcttgcctcctcgctgccatggtagcgacggcggccaccaccaccgttcacctcgccaagttgctcccgtcccatcccgcctccactccgccatggcaacaggggcggccaccaccaccgctcagctcaccaccctgcccccatctagcctcctcgtggctatctctccccctctctcgccggcaaggcggcgccctctttcccctctcccgccggcgagatcgaccgtctcctccctctcccgccggcacggctgaccccctccgaggatgcgcgcgtgtgttggcgagacacattcatcccaccgccgagatgccgaggtcgatgtcgacgtcgtccacggccaaggtcgcggtggccccgtcgccgccgggatggttcccttctcctcgtagctcctctcccgacggcccgccgtgcgtttccctttctccccgccggcccccgccctctccccgctgtccattgaccgtccaatcaggagagaggagagcggagagagatgaagagaggggagatggggagataggaggggagtgagaatgacatgtggggcccacgtggaacccaccgtttttaattattatttttggtgtaactgatatgtggacccgcgatttttattattttccaaatcaaattgccacgtaagcgtcacgtcaatgtcacgtgagacgaagatcttgtcaaattagccatgtaggtgccatgtcagccaaaacaagaaacaatactaccgaatgaccttatttgcactcgttttgaaagttggggatcctttatatctggtttttgggttaaaggatgaaaattggatttggtgccaaattaagggacctcaaatgaacttattccccaatggtactcttgatcaccacactcaaaagtggaacatagtctgtttcaaaaggagtctgtttcaaaaggagtaaattatgtttgaggtagttgaacttaagagataggtgtattttagctggaattttttaccttttgatccttttagaaaacctattttataaataggcccctaaaaaggtattacagaaatgatccttttcatgggcgctaaacgccattggtaccgtgatccaaatatatttgtaaaaaaaattacaaatatatctttgacgctagtgctattgctgtcaagaactatttgtagatatattttattcaaaataggtcattttctattacaaataggtcttgagcagcatcaatgacttagcttccaccgaggggtaaggggatggcggccgtcatgttggaccacaacgctaataatgtgacgctgcgaaaaggatctatttttggaatgattctttttaggtctatttgtaaaataagtttttcaaaagaattaaaaggtgaaaattccaatgtattttagtgcacgaatatgtaaaacgactattctaatatataaatttatgtggtacatagggaataagatcagaacggtgcaccattttataaagttctgtactatattttgtacccacattgtaaatttatgttccgccaccacaattttctcaaattaatactcttaatcaagactcctataaaataaagtactactccctccgtttcatattgtaagactttctaggattgccatattcatatagatgttaatgaatagatatatatgtgtctagatttattaaaatctatatgaatatagacaatgcttgaaagtcttacattgtgaaatggaggaagtacctgtgtttcttttaattattgttttcaacgtcaacacgatctctaacatacatgcctcctgattaattatatgtttataaaacattaaaaataaaacttttttcatgcaaatctattaatatcgttatcacatattaaattgtgatgttttaatttattaatgatttaagatattgatgtgacaacatcaaaagaatgaaggggtgcttggtttactatcatacgtttcgcacgggtattatatagagtgtcgcatggggttttcgggcactaataaaaaaactaattatagaatccgtcactaaactgcaagacgaatttattaagcttaattaatccgtctttagcatatgtttactgtagcaccacattatcaaatcatggagcaattaggattaaaagattcatctcgtaaagtagtggcaatctgtgcaattagttatttttttagcctatatttaatacttcatgtagatgttcaaacgttcgatgtgacaggatgaaaaattttagagtgagatctaaaccgggcccaaatcatgccacgcttatgtcatatcatagtttttctagctctgggtccacatgccatgtacataatttttttgaaacaatcgaagaaatacatatcattgacaaatacccaaattcaagaaataccatcgatgagtgtgagtatcgtaactaccatcatacaagtgatttttatcaaagaaataccattgtcgttagggttccattcatccgacaccattaaatacatgagaaatttaacaatatgccactccatagaattggctttaacaggatgccaccccatggaatgtccttataaaaataccagtccatagaggatgcttcttaatgaaattccactttggggtgattagagaatctgtgtgacatgtgctgcccgcaaaaaatatccacgtctactcgcccgcgtcctctccccccct

SEQ ID NO: 8443 - DNA, 17795 bp, Oryza sativa
aaactatcttatacttgaagtccctcagtgtgtaaacctcatggtttccttgttgcattgggactaactcttgtcgacctttacctcatatattccaacttcatctccatacgagattacattcatatgtccagccttatttcctcgcttcactaatagcttatcaaccctttgagaccattgcttgccattgttaagtaaattaacaacatttcgccttctctcaacaaaccattctaagcactttgaaaatgtttcctccacaatggctgccaccggtaacctccgagaaaacttaaacacattgttcaatgactcagatccattgcttgtcatcattccccaacaatatcctccatccttgcattgaaataccttctcgggcttttcttgctcatctttatcttcctgcaagtgctttccaacctttttaacatatgttattgcctcaggacaaatatttgcaattgatgacattccttcatcaaattttctaggtttctttttcttcactgtccacttaaatgtcttgagcactatttcattgcgacaaaatttccatagattctcagctacatgctgtgagcaaaggcggtgcacacattcaccggcgctctcattccatccaatgtggggctgcttaaacaaccattttatggctttatgtcgatcagatataacacacagaaacttaactttccatagcctattacctcacttcgtagccatctcataaaccacccccagtttgcactatcttccttttccacaatagcaaatgcaagaggtagtagttgattgttagcatcatatccacaagcaatcaacaatctacccttgtacctccctaacaaaaagcatgcatcaacacttataactggccgtaggtagggaatggcatcgatacaaggtccaaatgcccaagcaacacttttaaatgctcgccgtccttcctgagtcgttggctttgacaaaaggacatactttgtacctgggtttttagcttttatagcttgtaagaaagggatgaggaggccatatgaaccttcccaactaccaaaaagttgtgctattgccttatctctgcctcgccataatttactataagatggcttcacatttctatatctctgttggactagtgacctcacattttttatactcaattccagatcatcccttaatgcatcacgtatcacattagcaatcatagaagatgataactgagcatgatcaaatctatcagccggtgctcgacaggtgtgagcatagggacatttccttatcatccaacctgaacctatctttgtgggagttgcatagagcctccacatgcagctattattcgtgcattcagctacaagtttagactgactacttgtgctatacttgatttctgaatttttacatatatgaaactcacctatagcaatttgtaggtgctcttttgaatcaaaagactttccttctgttagtgggttagaaaattgattcttacgtccaaagaaactctcgtatgctgttgtctccttcaacacagatatatcattaaatgcttttataggattttgtccagatgcacgcataaaaggaaatgcattgacagaatgaacaactcgtggttatgggggctcatcatctgaactattattaagggcaccatcacaatcctgcttgttgtcatcgtctagtccaaatctatcctcaccaacatatgtctcctcaccaacatatgtgtcttctgcagtattgtcatcatctatagttggttgtgtttcggaaaccacattatcctggttgataggtgaagacaactgaactgttgaatgcataccatctgctaaagtgggtacaacctttgcttgtgaatgaactgtacctggctccaaagaaacacctgagccattcctttccgaatgcctagttgatgcaaccaaggttgtactattaacctgacttaatcttgcttccgtataggcgcattcaacataaagctcaacaacctgcccacatgtcttctcaaatatcatcctccatcccctgtcttcataaataggaatcaattgaaaatattgtggcccaggatttccgatatcaaaccgagcttggatattcattgcacaatgatcctcaatgtatccaagggcctgaaaaatttcttttttgacttcctcaaaggtcgtagcctccactgccggaaaagttatttttggaggaatattatattctgcacccttagctccatattgtattctcccatcaacatatactagaacaataatcattttttctcagtcaactctgcaaaacaaactaaacaagttagcaaaacaagttatataattaactttaagttagataataatctgctgatatatcctttcaagttttaaaaaatgttgttttgcttattaaaaatgtcaatgaacaatagtcattttatttcctggttgtgtcttccaaacgaactcaacaattaacaaaggcatggtatatgtctactagttggataataatctatacatatattcaataaaacactaatgtcatatatcaagtataggtatgaacaatgtagtacatatcaattaatgctaattagatgagggtgagcagagacatgctataagtgaaaagacatgcatgcatgatataaattgcagggcaaacctattgctcacgacgagagagctgccaatgcacacggcgccgtggctggattgcaggattggtggcgccgtaaaacacggacaaatcgaaggccccggcgtcgacgacgagagtggcttggacgacgaagcggatggatcaaagtcgtagagagggtgaactcgtatatgagttacgacgatgcgtggccggttgccggcatgcgcgatcgagcgctcatcgctagagttagggttttcttttgattgtcagggttttcttttgattgttctcactctattcgtggcttggctgcaccagggaggtggacgctggttccaacagcgtccaagtatggacgttgtttacaacggcgtccaattatggacgctttctatattagcgtccatcctactcctataaatccccccaacgatttactaattgtttaatttaagggtaattatttattataaataaaaaattcgggacctatattgtgtttgttttaacggttaatggacctattatatagttatttcggttcaatgacgaaaatcaaactcactttcaagttaagagatctaaaatggacttattcctttccctgcaatcaacaattaatgggatggccgaccggtgtggttgtattgggactgggggcaccagtgcaccacctgcaccgcctcgtgctcacgaaacccgatcgatcggtgatctgcaccgtccatcgctccacacccaattccctccggccacaccgtatcgcatcgcatcgcatctcggaaaacggcatatccgcgtcccccccggcggggaagtcatagaaatcgacttggccgctacgaaacccagagaaacacaccccggcggcacggccccctccgcctctcgtctcccgatcccgcacgcggccagctacaaatacgcgatttgccctcttgcacgcgtcgccccgcgcaccgcaccgcaccccacccccgcacgcaggaacggaaggtgggtccccccctccctccctccgctcgccgccgcacgaatctcgaggcaggccggaaccctagcatggccggcggcaagcgccgccacgcgcgcagcaacccgaccgccggcgggccgcggcacggcgccggggccgggcgccgccgccccgtccccgagctcccctccttcgtctccccggcctccgtcgccgccgcgttctcctcgtcctcctcgggcggccgcggccgcggggggaggggcgggcgccgcggcggcggcggaggcgggtcgtcgaactccgcgtccgactcgtcctcccacgccgtccccttcagctacgccgcgctccgcccctccgcctccttcgagggggcgactcaggtgctggatgtcaccatcgacaccgccccctgcgccgacccggcctccgcctccgtcccggtgtactcgtacggcccggttggcgggatcgggctggggtttcacggcgaggaggaggatgaggaggaggaggctggtgaggctgggctgcatctcggattgggattccggggttgcagcaacgaagaggtggagttggaggaggccaccttagtgacgccgaggaagccgaaggagaagcctaagggcaagcgcaacgagggatttttgtccattgggggaattcggatctacacggaggacatctcatcgccagagtcgggggtgggtgactctgatgaggaatcggaatcagattatgaggggagagatggcaatgatgatggtgatagtgacgaggaaggcagtgatgtcaacgaaggtggttcggagtctgatgaagagttgtctggatcagattcagaggaagacttgagcattggtgattcatcagttgatgatgaggttgttgccgattacatggaggggatcggcgggagtgaggagctgttaagcagcaagtgggtggctggaatgaatttggtcgattcagatgatgacgatgagatggatacagatgaggatgaggatgggttcttgaagaaggtgaagggacagcttgagggttatgccttgatgaatgcatccgagcagtatgggatgaagaggccgagctcagcagatcggttgaagggaaagggcactgctgtcagggcttgtgaccgggacctggcaagtatgcgagtgatgggtctggatgctgtgatgatggtaaaggatgtacgcatggcaaacagattaagaaagggagcaaaggtggcttcatcatcttctcacctctccaggtcctggcctaatgagggtaggaagagcaagaagtatcagagtgtaccaggtaaaatgccttcactgttttctgttgttttttcttttatgttatccattgtcaaatatgggaaaattagaacaatcagcgggcaagcacatctcactatgtatcttgaattgaaaagtcgtagtgctaagactgccaagcttccattaatcatggaatgttcttactagttgtttgtgtatgttaataacatttaggtttgatttgttttaaagcttttaaattttttgtttcataaagatggcataaagtaagtctggttgtatgctattgtttccactttacagagaatttgagataatagctgataagtattgcccaatttccactctctttttaatagaagtcatgggctcatggcagatggtgtgtattgattttagaaaaatagcactaggttgatcagtgattatctattgtgtacctttttaatacattggcgcaactagcttgttgtgttacattatgattgtccgtctccatatggagaagtaactcaatgtagacctttcaaattgaaaagtctgcagggaatatgattatccttggaaagttcagcttcttaaaaagttgctcggccactgtttacattaatgctcttctttgttcacgtatgttacaattatattatgtttgtgtgcctgctcaaatgttcatgttctcattatatttaacctatattgcgatgggtttgtaaaattttttgtatgtgattcaggtgagaaaaagaagcatcggaaggaactcattgcaaagaagcgccgccaacgaatgctaggcagaggagttgatttagatcaaattaatactgtgagtcttatagttgctttcacatgaagtgaccttattctgaaagttatgcccgtatgattctaaatcatcatagcaggagtctagttattttctaattctccagctcaatcccctgaaaaaaaaggcaagcacacagtcattaatgtctatgatatggtataaagatattagggattgtacaaagttcagtgataaatgcaagaaaatagtagtaatacaacattatgtgaagagaccttttacattttgaaactcagggtctatgcaatgtgattctgtccattgagttttaaaccggaggatgttagtgtggtgctatctggattcagttttgtactctgtttgttaaagtggaggtacaagataagatgtgcacaatatggagaaatgcacatccctagagagagtttcatatccactgtagctcttcttatgctgtctgttttcctttatgttggttttcttaatcaagctggttatgggtaaactttgagctttcatactcgcataggatttcttatgctttctgttgttggatggtacttggttattttcccttccccattccttgttagtataaaatgatgtgtggcctggttctgtttcttatgtgcagaaattgaggaagatggtcgtagatcaggttgatatggtatgcttccaaccaatgcacactcgagactgttcgcaggtattagatgcatgtctgtctatcattgattgtttgtattgcttgttaaagcatttgtattcaagcgcatgctaattgtgccattattgttgttaaatttgtaggttcaacgccttgcatctatttatcacttgaagagtgggtgtcaaggttcaggaaagaaaaggtaagtgccatatgagtaaatttaccgatcctagtagcactcccatgtcatgttgaatcttgccacggacacattggtttgatacaacatgtcataatgatgagtcatttttcccatctcttcgatgatgataggcatgttagttagtttccttaactccttgaggtatgcttatgttgcagcgcggtgagtgataccaaacatcatcattatgcatgcgagttcatgtcatttcaatgtgcctggaatttttgcattgctagggctcaaactaaaatctttacataattgtcgttgtattaagtaatgccttactggtgtaggatcttgttctttccctataccccgactgctctgactgttacagatccatccttagttcctaaccgacttacccactcaaattgctcttgttttatattcgctattttattttactctttaaggtaggaaggtgcatgacctcctgcaacaaaccatctgtcctttatggacagtggtaaagggtgcagtggcttattaaccactcccctgttatgcatgggcactgatacgagagacgtaagacaatgacgtgtttccttgtcgtgttcatcgcgtaagcgatgtgtctgcgcatatagcaactgccataacctggttatctataccaagatggttatgtgttagttgtatgcaggacattgcacctcccaaccatcttgtagcattgcatttttatgctttctatacttacctgctgtttacctattttatatcaattatgacatgtaatggagataatggtagttgcaatctttttcttgtttaaaatcagtttatgttggctagtcaagcccatgtccatatgagaaaattgacatcatatgtggttttgcactatattaaaaatttagttggtgaggttgcaaattaaatggataccccaaatttcaattaacttgcattctaattattttgtgtaagtaaaaaaaaatcatatggaaattctttgatctgctgaatgcagctgcgttgagtcaaatgctaatacaacattcttgccgtaaagtcaataattctgtcttgcagatttgtcactgtgacattaaccgcggattcttctttaccatcttctgagggccaaatccgacttgaaaaggtgtgtatacactgctcatattgttagtcgccactctgttcaattttgaagtgctttgattcgttcagcccttcatgaattcacatcacatttttcctttttttatgcccctcggtttaatattatagtcactttgggtttgtcctaagccaaatatcgtcaagtttgaccaagttagacaaatatagcagtattttcaacacaaaataaatatactataaaaatatatccaatgatggatttaatgaaactaatttgatgtcgtaaatgttggtatgtttttctacaaacttggttaaactttaaaaggtttgacttaggacaaatctaaagtgacttataatatgaaacagagggagtaataaactatgtcgaatctcagtactgtagtatttctacatataacataaaacattgtacatcatttttttgtcttgatattcaccaaaaaacattttatttggcataattggtcttgatattttgttttattgcaatcatgttatctccttgccagtgttaattgttccaatcttctgtctaaattgcttttcttctatatttcagctcttgggaactgagcctgaggactttactgtcaattgggagaactctaaacgtccagcccaagtgaagggcctctcagctccaggaaagttggcaaggaatcagacttccagtggaaagaaatcttccaagaaacaagtatcatttgctgaacgtcctgtatcttttgtctcctgtggcactatggcggaatctgttactgagacaattgcagttgccacaaccagtggtgaagtctcatgtgagaaaattgttgaaagcgactctgtcaagctgggaacctttgagatgcacaccaagggctttggttctaagatgatggctaagatgggattcattgagggaactggcctgggcaaagatggccaaggcatgatgcagcccatccagccaattcaacgtcccaaatctcttggactgggagtagaatttgacagcgaggctgaggcaatcaaggcaaggtcagaaccaccaaccaaagcaaggtcagaaccatggcggaatttgaggaaagtggagattggtggcgttggttcctttgagaggcatacaaagggctttggatccaagatgatggcgaggatggggttcgttgagggctctggcctggggaaggatggccagggcatcgtcaaccccttgactgcggtgaggcgacccaagtcaatggggctgggagctaagaataagtattaataccatatgtgccttctatctatctatgttatctatgttatgtaccttttacagccgcttgagtttgataacctagttgtatatatgctaggagagcataaccccgttggccgcggcaaacagcacgcgaaatcgtgggttccgatgcccctggctgtaggcagtaggttctatcttgtttacattgcggcatttcacatttttcattccctgttgttttgttcaattctctggaggaaagttatttatttccatggtacgtctcatctagtgtttttgtgtcaacttgtctttctgaagtaatgtgaagctgcgatggatgccctgtgatctccctgtgatctttgcatcagcaggttgcattcgtcttgcgtctcgaatccctctgcttgtttgaacttgaaataattctaggattaagcttttatacttagcggttgtaacactaaaccctaaactagttctaaaattgaaaactgcatttggcttataagccaaatccaaactagtgagtctcttcatacacagaatggctggatctggtttctaaccagtaagtttaaacagaagttctctgaacgatgagaagacctagcaaattgtttgcctatctctcgtctcacgaaaaggttcccgtagacctagtaaagttgacaggttgaataaagcttaagcaaagctatgtgtagtcacacttgacacatggatagatcttaagcaaaggcagtggaagtcaaacagctgacacgtgcagatataaatacaaagtgaaatcttgtaatagtgctcctttaaaccaaactcaaactcgtttctatctagtactactacggtgtatactcatgaagtacaaaatggaaaacaccaaaacgaggaacaaaaaataataatcttattatcatgtagtaataaaacgcatagatcacctacataatgaaatgacgtggacagtgcggacgatgacgccatggatcagtcgagcttgacggcggagaagaggtagtagacgaaggcgaaggaggcggcgagcccgacggcgccggtggcgagcatgacggcgagcgccatgagcagcgagtagccgacgtagagcgcggcggagaccgggccgctgaggctgtgcaggtcgaagacgaggtagtagacggcgtagccgagggtgtaggccgcgacggagcccgaggcgaagaaggcgcgccaccaccacctccagtcctccacgcagagccccatgtaggtgagcaccaccgacacctcgccgcacacggccaccagcagcgccatcaccaccagcaggaacccgaacacgtagtacaccctccccagccacaggctcgacatgatgaacagcagctcgatgaacagcgtcccgaacggcagcgtccccgccaccgccacgaacacccacggcgagcactgcgccgccggcacctgcctcgcgatcttgttcgtcttcaccgggtactcgaggtgcccgacgcgggatgccaccagcccgccggcgagggtgagcggcacggagacgaacgcccagaggaggaggatcacggcgaagagcaggaacggcacggcgcccgtgctgccgttgtaccagagcacgcagttgagcgcggtgaagacggcgaagcccgcgccggggaaggcgcaggaggcgcgccacgccacgcgcttccacccggcgctgtccccgtgccgcaccgtcttccagagccgcacggcggcgtaccccgccgcgaagccgaggaggaggtagatgccgagcatgcccgtcacgagcgcgccgcgcgacgccggcgacatgaacccgagcgccgcgaagaggatggtggcgacggccatggccaggatgcgcaccccgtcgccgaccatcacgcagaggagcaccgggtgggcgggctcccggaacacgtccccggcgacgagcttccacccggcgagctcgtccgcctgcggcgccaaccccgcctcgccgccgtgctcgtcgtactgcgcgaggtcgcgccgcacggtgcgcagcaggatgacgagcaggatggcggcgaggaacgccaccaccacgatggagttgaggatggagaaccagtgcaccttggcgccgcccatctccaggtacgcgtcccaccgcgacggccactcgacgccgctctccacgaacgccacctcgtaggagaagacgagcggccggttggcccgcacgcgcatgccgaccaccgaagggtcgcacccggcggccgccctcgccggcagctcgtcgtacatcttcttgcccttgatcgccgccgcatcgtgctccacgctgcacggaacgacctcgaacccgacgacggtgtacccgccgccgtccttgctcccgccggcgaagctgatgagctcgacggcgtcggcggtcgccatcagggcctccgccctggtggtgccgttccgcggcttgttgaccagcacggtgagcttgaggtggttgtacacgtagtactcgccgtcgtcggcgcgcacgccgacggggaagccggtagaccggacgaacacccctggcgcggccaggttcttgacataccggacgacggggagcgtgtcgaggaggaggttgacgtggtaggcgtcgtcgatgcggaacatgaggaggtcggcggtggcggggggaagcgggtcggtgcggcagaggaaggcggtggcattcttgagcatggagaagcggtacggcgaggtctcgatgcggtcgccgaggaggagctcgccgaggctctcggcggcgcggttgacgccgccctgcggcgcgcagaacgggagggagtagtaggggaaggggagcttggacgacggcgaggtgagggagttcaccttcgcggccagcgcctcgccggggcggtagcggtgcgggtagctgcccgggagatagaacgcggccgccggagagtggccggaacggagcaggaggatgaggaagatggcgaacgtggagcggggagccattggcgtcgccatggccattctcgcgtgcaggaggatgaagaggtgagctgatcaatgtgtgtcgtgcaaaacctgttcttattgagtacacctgcttgattatcaaagaagaaaagaaaaaaaaaggtactttacttatcagttatcacccatgaaatgggagtttttgagagcatgaactgggtgtgaaaaatcgaataggtttacttaatgggattgtccaatttttagatgaattttggtcagtttttctcaacattaagtgaaaatctaaccattcttattatcattccccttattctctattgagtaaatttcacaaaactacgggtagtttaactaaattatcacaaaactacatattgaaagtgttacaaaacaaaactatatatttaatataaaatctatcacaaaactgcatatttaaaatcgaatattagatttaataccagagttatcataaaaataaaactacagattctatagtttaataatccttaccactactgctatgttacggttacaaatgttgtagtttagtactaaacatgaagctaaatttgtagttttgtgataattgtattattaaatgtatagtcagtgatctttcatcctaaatctacagttttgtgatacacctttttaaaatatgtagttttgtgatagtttcatcaaagtatatgtatttttgtgaaatttatactcttctctatttaaacacactcacttctatattttagataaaaagggtcaactaataaattgttctaacatatactaaaaaatatataagataaacatttacaactaaatacaaaaatattcaaactctacaaaaaaaagagaaaatatggaccaaagtccttctgcctagctacaacttaagtagaatcgaagtagagtagcaaacgagcaaagttaattagcacataagaccagcgttagaaattgatgattgcatgcttgtcgtacattttgactaagcaaagctagctagcctcactagcaagaaaacctttttgaacatagatcaagattccagcacaagaagaaactagcaggccttgtggtcgccaaagatgcaaccatggatatattggatttgtttgattagcaagatttgctccatgtaacagcatctccaatagcctctccaaatcggactctccaaacacttatatagtcagctttccaattgatttggtaacccaaactcattcctcactccaataggctctccatcaatactctccattacgagcctatgacactgggacccacacgtcagcttctactaccccttcttcctcctctttttctccctcttcctcttctcacggccctcttcccgtgcaagtgcgcgacgacgatcatgcagaggctgacggcggcggctcgcaacggcgaccttggcaatgacggcctcgacgatgacccatggaacggaggcggaggccgtgcggggccggaggccgtgcggggccggaggccgcatggaggcggcagaggtcgtgcccccaccccgaatccagtgggggcagagccgagcgaatctggcgggggcggacgccgtgcttggctagaggcctctagacttggcgacctcagtgacgatggcagcgaatggcgacgtagcagacgacgacagcgacggctggcgacggagacctcagcagcagtggtggatggcgatggcgaccttgacgacgacagtggtgatggcgctcctctgtgtgggtgcgggattggtgctgcaacggcgacgcggggatgacagcgacgcacaacgggctcctgcttaggcaatggcgacgccggattcactcctcgttggcctcgtccgctccacgctcccctcccttatgttgctttttttctgcttctcgttggtggcggcggtcgcggaggacagcgcgagcaacggcgtggtcacggcgggcaacggcgcggaggacggcggcagtcgctgcttcgacgcctcttcctttgtgccgtcgtcgacaccaggacatagcaagcaagccgatgcaaggagccgaagaggagatggaaggaggaatgtgtgtggggcccatagttggctagcgacttttggctagccaaatttggctagtggagggagggttttggccagccggatggggcttggccatccggttggagaggctgttggatgacttttttaagctggaatagctaaaatttagcttggagagtaaaatagagaggctgttggagatgctctaagggcatatttaaagatatagctcggtatgtaggctcttagtttatttagaaattatctttttataatggttaagaagacaaaagctgtaattagtgtaccaaaataattttctacgtattaatttctttccatttttccatctctattttataagcgctaagagtcgatattgagctattgctaagcttaacaacgatccttttgtttcatttcccatctctcttccatctcgatcaacttactccgatagggggagtattttgttaacaactctaagagctcaatattaattgtggttttatatgccctacataccctacagctagggaacaatgattattaagagcaagttctggaggctactacaacttattttaaccatgtcatctacttggtaattacctcaaatacacaaacaacaacaattttattttattaaacggcgttgctatatttgtggcgccacaactctcatgttatctcactttctctttgcatgagttcagacttgtagtttagagcagttacaggttcgcgctctcatccaaattaaatgtttgaaaaagagtaaattacattcacggtacaacaaattgttaggtgtgtgcagtttagtgcaagaacttaaaatttaagcgttaaagtacaccaacttaactaggcggtgcattttcaattgtagtgaaagccctgtgggattttctttgccccagcgggcaagtggaagccacacgacattttcggtcaggttttaatccctatatgctttgtggctttgatgtctacatgttactaactgcatagggatcatcacatgaaccgaggccatgatgaaggtggacatgtttgcattgttttttaagcgtttatttgttagtttagcaagtatgcaccgataatttactatgttaatcaatggagacacaccggtggatttgttgctgatcagtttaaggaagggggagatggctctcacgatatgtggatagtggatgctggtgagatggtgaatggttggtatttggctgaaatttagagattggtggtgtttaatcagtgccaatgtgccgctgatgtggcaaaaaaatccaacgagacttgcactttgactgaaaatgcaccatctagtaagttgattcactactcaaatttcaagtgtttatactgaagcgcacccacccgataaattcttgtaccgtgaatacaatttactttttcaaagaaaaaaagatttagcataccaaagaaagtgtactcgggtaggatttatgaagcttcccaggataccaaacaaatggaaaaagaaaaagtacatctaagatccttcatcttatcatcgaattacaaaatcgtccctcaattgaaaaaccagatactcctatagcatcccttaacttacaagactgggttactataggtccttagatggtattgaacccggttttatctgacgtggcaaccgagtcagcgtgggacccacatgggccccacatgtcaggttgaccatgtcatcaccatctctctcctctcttctctctcttcctcctttctccctctcactttgctccttgtctgggcgggctggccagtgggtgcggaggaggccggcggggtgaggcaggagagaaagaggtccaacaggcagtgacgggcgacgcagcagcggaggcaacacggtgttgcgccgacgaggatggggccgatgtgcagcgagagcaacgcaattggcgccaccatcctcccatagctcctgcagctccgatgccacttacggctggtcctccttgtcctcatacatcgcgccgcccttgcagccaacgccaccgacgcctcaccagctctcgcgcccatcggccggaggcgaggaggtcgacgacgatgcggcgtcgacgaggatagggccaacgtgcagctggagcaacgtgattgacgccgccatcccccactgttcctgtagctccgacacctggtccttcccgtcctcatccacgcgccgcccttgccgtcgatgtcaccgacggcttgcctactactacacctgccgtccgaaggcgaggaggtcggcggcgagcatgcacgaagaggaaggaggctgggaggccgtcaagggagatggggaggccgacggcgaacacacggggagaaggaggaggcggcgcgggagcatgccggggctccgagtccacctccacggcgcccaccaccgcaacgctcgcctctacaccaaccatcacggcgcctgcctccacctccgcgacacccggccctgtctccacctccatgtacactgctacgatgcccacttgctctcggcccgttgctgccgccgctgccgcgccgccacatcgccccttcccccacgttgcccgtcgcaggccaccagatctcctcccgcctcgacccgccgcccgacccgcttagacgaggaacaaaatgagagagagagaggaggaagggagagaagaggggagagagagggtgatgatgaagtcaccctgacatgtggggtccacgtgggtcccacactgacttagccgtcacgttggataaaattggggtcaataccacctaaggacctaaactgacccaattttataagttgatgaatgctatatatttggttttttggttggaggacgattttataattcgataacaaaataagggaccttacgtgcacttgttcccaaataaatagacctagcttgggcttagagccttagacaaaaattgttacccaaagtaacaaccaggcccaagttcataatagcccactaacgacgggtctacagcccatttatactccagtttcaatagatggaaaaaaaagcaccgaaggtccatcaatttgtcatcgagttacaaaatcgtcccccaaccacaaaatcaaatacaggacatccctcaagttataaaaccattcactttaggtccttcggtcgtttttgaccccggttttatccgacatggcggctaagtcagcgtagaacccatgtaggctccacatgtcaaaataccaggtcatctctctcccctctcttctcccccttcctcctctctctctcacttttctcctctccgcagggcggctagtgggtggggaggatgtcaccgggacgaggcgggaaagaagatccggcggccgacgacggcacgtgcgacctcggggttagaccatcggagaggcccgggaggtgtcggcggcggcgacgacacgtgagaagggaggcggcggcggctgcgatgcttgagagggagaggtggccggcagcgaagcaggggtggtggcgggcggagcgggcgccgcggcaggcgagcgcgcaggaataagctgtcttcggcgtcgttcccactctgctcaccgccgcctgttccgcccatcgccgcttgctccacccaccgctgcctagcgctcacacactcccgccagccacctcccccctccctctcaagcttgtgaagaagagagaagaaagaagatgccgcggagcttggtcgggaggaggtggccgtgggagaggtataccaccggtgcgcggatccatccacccccgc

SEQ ID NO: 8444 - DNA, 6239 bp, Oryza sativa
  unsure (1)..(6239): unsure at all n locations
ttgtcaaatttctcatgccattgcttaggagcttgtttcagaccatacaaagacttcaacaatttacacactttgtcttcttgaccttcaactacaaacccatcaggttgatccatatagatctcctcatccagctcttcattaagaaaagttgtcttaacgtccatttgatgaatgagaagaccatgtgaggctgctagggaaagtagcacacgaattgtggtcaatctagcaacaggtgagtaagtgtcaaagaaatcttcgccttcgttggttttcttgagnaaggtataagaccccttagcaacaagccgagccttgtacttttcaatagtaccgtcaggcctgagcttcttcttgaacacccacttgcaccccacaggtttacacccatagggtcgctctgtcacctcccaagtcccgttagcgataatggaatccatttcactacggacatcctccttccagtagtctgcatcaggagatgcgtatgcttatgaaattgactaaggagtgtcatccacgaggtacacagtgaaatcatcaccaaaagacttagccgtcatttgtcttttgctcctttgaggaggttcactgtcatcctcctcagtaacatgttcatgtgtatgttcagtttgttctggtggtgtgattgaactgggaattatttcagagggttggctagaactactatgtgtatccttcattgggaaaaagctctcaaagaaggtagcatcacgagactccataattgtaccaacatgcatgtcaggtacctcagatttgactattaaaaatctataggcaatgctgtggtgagcatatctcagaaagacacagtccatagtcttaggtccaagtttgcgcttcttcgttattggtacattgactttcgccaagcacccccatgtgcgcaagtaagaaagtgatggttttctcccaaatccatatctcatatggtgtttttgtcctcatttctattaggaactctgtttaacacatgattcaaggtcaacaatgcctccccccaccatgccttaggtaatcccgcggtgtccaacatggcattcaccaagtcggtcagtgtgcggttcttcctttcagcaatcccattagactcgggagaataggggggcgtcctctcatgtataatgccatgttcctcacagaataagtcaaactcgtttgaaaaaaactctctaccacgatcagacctaagtctttttatctttctgtcaagttgattttcaacttctgccttataaattttaaaatagtctagagcctcgtctttcgttttcaacaagtacacatagcaaaatctagtagcatcatcaatcaacgtcataaaatatcgttttccacccttcgtcaacaccccattcatttcacagagatctgagtgtaggagttctagaggtgccaagtttctctcctcagcagccttgtgaggcttgcgaggttgctttgattgcacacaactatggaacttagaacctttgacaatggaaaacttagaaattaaacacatgctggaaagccgagacatcaagccaaaattaatatgacataaacgtgagtgccatacattagccttatcatccacactgccacaaatatggttcacagacttattgcaaaaatcagaaagggaaaagcggaataggcctccgcactcataacctttaccaataaaatatccatgtttagacacgactactttattagactaaaaaaccaacttaaatccgtctctagtcagacgggagccactaacaagattcctgtcgatagaaggtacatgctacacgttcttcagctgcacgatctttcccgaagtaaacttcagatctaccgtgccaacaccatgaacagaagcatgtgacccattccccattaggacggtggaaccccgtgcgacctgataagaagaaaacaatgagatgtcaacacaaacatgtacattggcccctgtatcaacccaccaattagtagactgattaactgaaaaaatagtaggtaaattaccatacccgcttccatctccagtgttgccaatggtcacattagcagacttagaggtctgtcctgcaggtgccttcatccccttgcgttgtggacacttcctggccagatggccaggttgaccacacacaaagcaagtcctctcatcctgattaggattgttgtttttcttcttcttattgaagttggtggtctgctgagctttgtatttccccttgctcttgttttgggccttgtgcacaacattggtactggactgcccaccatcgcccttagacgcgacatctttttcccgagctttgtcctcaacatcaagagacgctatcaacccctcaacgaagtattcctgtctcttgtgtttgagtgcagtaccgaaacctctccaagatggagatagtttcgcaataatgcacccggccacaaatttgtcaggtaagacacacttaaggagtttgagttccttagccatggtttgtatcttatgagcctgttcgactacagaacggttgtcagccatcttgtagacatgaaactgctccatgatatacagatcattactagcatcagtagcaccaaatttagtattcagtgcatcccacaactccgtagcgtcggtcatatgcatatacacctcgaccagacgatcgccaagcacgctaagaatgcatcccacaaaaagagtagtggcctcatcgaattctttctgctgatcagcattaagaacgcccataggcttgccagtacttacccagaagcatttcatagctgtcagccacagattgaccctgatctgccatctcttaaagtgcacactggtaaatttatccggcctcagtgcatcggcaaaaccagccatagtaaaatcacagcgtctataataaggtttttggaatgttgcgaatataggcatataatgatttaatatattccataaataaatcatgacattacagatgtatactagcattaacgcatcattagatctacacatgtaaactaagtagtaaaatatgaacagatcaaatatgcgcaacatgtcgaacacgtaccgaggtggcggaaagaccggttgctcggcatgaactacttgcggttgcgagcgtcgacgaaggcgtgcagcacgcgagcggagaggaaggcgaaccgtcgcggttgaacagggagcagtcgcacgaagcgcttcccaaaaaccttattgccgccttctcccggtgcaggacgtcgaaggcagaggttccggagacctgctctcccgatcgccggtgcacgctggcgagcgggatggagtagtccacgagcgacggcgcaacacagaggaggaggcaaaccctagattgatttcgcgtgtgttgcgtgaaggcggtggcacggtttatatagagataggtcacttgatcagggcgcccgcacgatctccactctgcataaccgagccggataagtcgcgcgtaacttatccggactccacgccgttttcacacaccggattttttggaatgttttcaacaacaaaacaaatccgaattttcttgccagcaaaacaaaactgtaaaaggaggctacatctgcgcaagggtgaggagccaatttttcggaccattcgacacgtacatcatgcacacgcgccgcctgccaagcgaggcaatcgagcgcgcgcgtgttgcccctcttctctccaccacacatgcttcaagtggctaggagggcatcctctcttttaaggaggtccccctctcctagaataagcaaggtggtactaaactccacatacatgccatcccatgaggttggcttttgtgattttccaaagaattaattttcgaatgggccttagcccatctattaattccaacagtgaacaatttctttcagcttgttactgagtttcaagaacacactaaaatccactaggccagatagttcatctaagatatcgcccttgtaatagtgaagcacatcttttgttaattctctaagacttctaataacatgggcttttctagtgaagttgtcatcattcagcagggtgtcttccactgactcagtgaatgcactgtcatgaaccccttttaaactctgatacctgatattgctacctgactcattatacgtctagcaataggacgggacgattccatcttgagaaacttagggtgcacaaggtccaagatgttaaacacttccgaaacgtggttctggaaaagtgtaccagacaggaccactttgcgtggtgtctttttagtgatgccagtacatctgtctcccgatttcttggtgtatgaccctcgtctagtataagtaggttgggtaccataagcagcctgtcccagcacgcagctgcaatgtttccatctccatcaccacagatgattcgtgagaactgcttgtatccaagaaatagtatgctcatctgggcttcccaatatttgaggacttccagttgctctactcttttgtcagccttaacagaatagaaatcatatagtggtatgtcctccacttgccaccactgaaactccctcttccaagtacctaatttacaccctacttacacaccacttacaaatgtaaattagtatgtaattttgggacttacatatgtaattttttctgacatcaccctgctcgccaacatagatccagcccttcctattgagaactctaccttgtatcaccggttcgctgtagagtgcctagttgattttttccaaaacctgttttcaagctcttcaatttaaagaaggtaagcaatttctgcaacgtgttcttctcgtagcatatgtaattttaggacttacatatgtaagtttgggacttacattgaaaacactaaaaatacatatgtaatttagggacttacaatgtaaatacatgccgactaatttttgttaaaaaatatggcgccataaatatagctactcccaatccctttcggaagcactacaaggggccttgcagaaggatactttgctaagaagctttgaatgaaacttatgagcataaatgtcttccctgaaccaggagcatgagctagaatgcaacctccaggtttgtctccgactagattcttgaccaggaagctgaatccttccaactgatgtggtctcatttgcttcgcatgtcttggatgaatggcaatatcagagacaatgaaatcttcggaaactttaacagcaccagtatcaatctcatcagcatcctttgaacgtgattcatagtaatttgttcttgtccttgaagcctgatataatgtaagcatgaagttaaattttcttatccacatgaaaatccaacaaactttagaaaactgatgcaagcattccatctttactacaggacccatgctctgaatactgccaaggctcgcagcttagctcatgtacaagccactaaagaaatccatatgatttccaaaacgactattactacatactccaaagtggtatcaatatcaaaagagttgataatgaaaacactcccccattttaggaagtagtatttcagtaaagaaaaggtcccccatagcatgtttttctataaaagaaaccagaatccctagagattcacagtaaatctaacgagcattacaaaaaccgtatgtgtgagaactatatgtcagtaatttttatttcgttcagcatgaatccacaaatttctcttgatcgtgatgcccttccactgcctaaagaccttcaaggtactatgtgccttaatattaatagcatttgtgtaggaagtgaagaaaatgatttttgacatgaacacggcaaagtggatacagctggtgtgtaggtgtggggaggtctactgcgcgaacgcgcgcgagatatggaagacacgaacggattcaaaatttccagttttgtctaccgcgtgcatggagagacagatccaaacttttctgattcggttatcatgtcgtgaaactctagcggcctgtttggttggagggagtttttaggaaggattgggagtttagagggatgaggctattaagtgttttgtttggttgggagatatgagaattttggtgagatggggatggaaaattgaggaaggaactccctccttttcaataactgggtaggggcagtaattgggagggaattcctcctttactttgtctaagcaaatatcagccatccgtttttattaatgacctaatctccaactaaactccctatcaatttttatcatctctaccaaacaagata

SEQ ID NO: 8445 - DNA, 18722 bp, Oryza sativa
acagaaagaaacaaaaatccaattcaagaacaccatgactgaagcagaaaaactattcatttattcattcattcaagaatggttcgaatagctgcactggaaccaaacaaagtagcattaaggttgtgtttagatccaaagtgtggatccaaacttcattccttttctatcacatcaacctgtcatacacacacaatttttcagtcacatcatctctgatttcaatcaaaatccaaactttgcgccgaactaaaaaaaaacacagcataaaggctgcaaatctacactactacagttcacaagcaggggcaaggtctctctgctcgtgaacttgttgtttagtggcatttcaaatacagtatctgacttgttgttgttgctatgtccaaaaccttaatcttgtctgatgctcactgaacagaagaggctttgggggcctcgtcagtgtccccagagaaattctcagaaaaattaaaaatgagagagaaagaaggaatcacgatgacaaggacatcacgtgactgaccacgccctgacaaaacccaattaaccaatcgagctactccactccaacaacatgccatgccaatatgccactgccatcatcatcaagaatgccgacatcttctcaaccaaaatctctccccttaagatgaagtactacctctctatatcaaattgccggtaattaacccttaatcaatgcagtaaaaaaatgtaaaaagtgaattatcttctgtttgattgatttcgttttgtaagagaagatctacagatgcacgtggtggcatgcgacaaccgccagtgacggaaccggtgggtgggccccggaggtgtcaggcaggggatccaatggccggcggccacgtcgccgaccgccgcgccgcaacttgctcccctccggtttggtcacacccgggatcctgggccccacctcccagccacacaaaactaatcccgaaaaagccgagcatactactagtacacacccaacttcaaaattatttcaacttttatctacagaacgagaaataaaataaattattttacaaaaatagacacttttttacgtattccgctcaaaaacaaaaatgatttcatgtaccaaaaaaatatatactaatactagagagaaaacgctgacacgtggggcccttgcttggtccaccgcggcgggcagggcatggtggggcccacgcgggggaacagcaacagaatctcggggaaagcgggcgatccatccatccttccaaccaaaccttgcaaagcaagtcagaagaagaaaccaacggaaaggcctaggcaaacacacacaaattttccacggtttttactccccttcctaccaggaaaatcaaattaactcgaactctggtaggaggacacgagggaacacgtggctggcgcacgtctgacaccgtgggcccacccagtccacgcggagggcccacctcccgaggggaaggcaacgcgcgtgacggcgactcgggagccgctgctactactactactccagttcaacacgaaaccgcctagaaaatttccttatagtttgatttcgaaagaaaaaatttaagggtttgagcaggtttatgactttattcaattattatccataactgaattcttctagaattacaaaatactccgtatagtagaagaaaaatccatacattttttttaaggaagagaagggcccgatggtgataaaatgggggtaaatccaacgacaccggccaccgcggcccggtgcgcagaatccgccgccgtctacagctggcgccgacgcggcggccgctacccaaacgaacaccttttacgccccacgagtccgcatcgaatacccaaacacaaacgaacgcgatatacttttttttcttttttcaggtagaactttcttctttttttttgcctattattacatatacacaaatcgtaacagacaaggaaaactaccactactaaaatgatatagtgaaaaaataaaggaagagcttttttgaacggacctaaaaaatgcttcatcttggcaaataagctgaatttacgggtccaaagtaaatgtttaaatttctgttgagattaaacagataaacactatggtagtacgactatttttttctataataagtgaacaaaagaggtgaaaagcaaacggatttcgtcagaaaaatcgttgcaggcacatctcccatacacaaatcaaatcaaggtggaattttaagtcaaaaaagggaacttgtcgtctgatttcctaacaaaaaatcgttgcgagaatcatcacacaagcaagaacacagatcacaagcaaatcgcccgaggaaggaacttgaagagaaaaataaaagcgaatcgcacgaggaagggactggaagaaagaagatttcagggcacaagaaagagctcaagagttctgaatccaaacggaaacaaaagtaaaagggccaaaaacaaatggggaaaaaagtgggggggactcacctctgctttagccgctgcggcggtctgagcgccgccgccggcgaccaggcacggccgcttctccggtgagctgcacccctcgtcgccgctcgacgaggcgccgccggatccgcccgcccccggcgccgccttccgcttccgcgacgactcgtcgccgctggaggacgcgccggatccggtggtggcggcgtagtccagaggggtctctgggctagacgcctccatggcctccttcgccgccgcgaggaccgtcttgacgtgcgccctctcgacggggcgaggacgcggacgccggtcgccgccggccgtggaaggggcggatccggccgccgcgacgtagtacggcggcgactcgggcatccgcgccgccggcgtcggctcggccttcaccaccgcgcgtggcggcagaggcctcgccacgccatcccggctgaaattcgcgccggatcccgcgccggccccgtactccggcggcgtctccggcccccgcgccgccgtcggctcgtccttgaccttcatcttgaacaacatcttcttcctcgcggggggcgggagcggggccggaatcgacgccgccttctccccgccggaatccctcagctccaggccacacaccaaaatggccggcggcggtttggacttggaagtccgcttccgccggtccttccatcccggcaacttcttctcctcagcggcggcgcccttctcatccggccgcggaacccactccggccaccgcaccagcctcctgttctggaagctgaccagaatctcggcggccgtctccaccgcgtcgtccatcggaaacggaatccacaacaccagccacccgcacgcacgcacgccgccggccgccgcagatgggagactgctcctcctctccgccgcgagcgagagagaaagagagagagagagagagattggtggtttcttggaaagggagaggcgagagaggcgagagaagcatttatagggaggaggaggaggaggaaaaaaaaacctgaaagggacgggcgcttctcggccgccgcgtagaccgggtgttggtagacctcgcacgctgacatgtgggccccacccaccgtctctcacagtccggctcggtgtaaaggcatcggggatccacttcgcactcgggttggtagacccgcatcacttccaggtgggcccgggtctctcgccctgttggagtctgatgcgggtacgtctcgtctcgtcttcgtctgtggattgcgaggaattctcgcttttgagtttgtactgctcctgcgcctactcattcaatggcaggtaggcccggtacgtgatgcttttctttttttttttttggagagagagggaggaaggaagtgggagtgcggcttatggatcaatctccggtaagaaagtgaaaattatggatttgtcgcaaccgaaacatcaactacgaagattagctatttattgtaaatgatttttttatcagttggctttggtgaggtaaaaacaaaggttttcaacaaacccaacctatttctgaatgagttgtttgtttctagatacaaggtaaagacctatgttttaaaaatgaattatacttgggctaataatatttggaataagttagttgtaaagttttgggacaatttcattcttgattcgctgtagatctctttgcatgataaacctaaattttagagagaaaatacaatatagctcgtaggtggcatattcacagtttgaggagaaggggattgggaagatacgcaaaacgaggtgagccattagcacatgattaattaaatattaactattttaaattttaaaatggattaatatgattttttaaagcaactttcctatagaaaatttttgcaaaaaaatacaccgtaaacggtagtttgggaagcgtgcgcgtggaatacgatgtgcatactctccaatcacccaggggcgaatgcaccgtttaggctgtgtgtgtgttcttcccccattttcctaacccgtctctctcgttttccgcacgcatattttttaaactgctaaacagttgatttatgaaaaaactttctatatgaaagttgttttaaaaatcatattaatccattttttaaaaatagttaatacttaatttgtcgatgagtgatactcgcggaccggaagaatagggtattggggtacgttggaacagggatctacgtagtacgacatcaaaacagacaaaagacaaggattatactggttcaggccccttatcaggtaatagccctagtccaatttacatgggattgatgatgatgagaacagattacaaagagagtaaccgaatagacgatgctgatgagatcgtagtcgagggactcgacgagatctcccggcgagttggcttcgtggactccggcttcgtaaactttggtaggtgtgttggcaatgagatgcgataccctttgcctctccctaggggtcccttttatatcgtgggataccttgaccctcaagtaagacttggagatatgtaaaccgacacgatatactagagattttatcttttccgagtatgacttttgcaattccttaacttcgtggagatattttccataatttgaggcgaattcctaacggcgtatatggaaactaaccatatacataaaggtataccttatcggtatattccataagtcgtgggatagagggtatgccttatctgtaaccctgacataattaatcatgcaataatacgagtttcgttttgcgtgccgggaggaggagaacacagccgtagtatacatgagtatttgatgggaccttatggcataattttgtcataccaggaagagttcatatagtaacgtagcatttttatttttattaagactttaattgaaagaattattaagaaggtccaaattggcgcacgtaaaacgagaaaactattaacacataattaattaagtttaattattataaacttaataaattgatatatttgatcttttaaagcaacttatatatagaaagttttcgcacgaaaacgcactgtttagtagcttaaaaagcgtgctaacgaaaatcgagataaaatctgaatcttaatcagaaaagaacaaggcacgacgaataaatcctaccatgccatcgtagggttaacaacattttccctggccacttgccttttttatgggctgcaagtttaccaggcttcctttattcatgagcttccgatgagttgggctggctgagccattgaggaactttcagaattttgatagtaattactgtacaaatacggttaccgacaaaatggtcggaaaaaactccatcacatttccactaccatttccagaagatattaccgtttccatttccaccatcatcagttatcgataccaattgaaatggtcggtgcaaactgaaaacgacagctggaaatctcaaaaatttccgttccattttcaccactaatgccatgtgtttttgtattgtgattggtgccacctattaaggttatgtttttttctccaattttctatttttcactccctcatttttcgtgcacacatttcatgatatgttaaacggtgtgttttttaaaaaaaaatctatatgaacgttgctttaaaaaccatattaataattttatttttttaactaatacttaactaattatgtgttaatataccgcttcattttgcgtgcggaaggaaaaagttctcaagtcccatccattctaaaagaacacaatctaagaccaccatgatgaattgcaattccaaaaatagaaaattataagttataaaatccaatttttacaaatcctcattgactggctactcacgatctgtttttcaaatctcgatatcctccaaacaaagctagatttgctatggcgttaaaggaaacagggtaaaggtccaagaatattgtttctttgtttgttgattaaatgattaccaaatggtttgtactagatatatgtactaccatctatgatcaaatcaataacatatgttggccaatttggtgccgaaatgatatttttcataataagaaaatagctaatcatatgcatgttatcttcatgtctaccaatcaacgctatacttgtatttgatgctatcatgggagaaacgagatactatgcgtggtgatgctacacttttaaaattggtagccaagggtattttatacaattttggatggagtagcacctatcgaattaatcgctataatttacgggatttatattagcttttaattctggtgatcatcttctcagagaagagggaaattgtcccatcactatatttttctctcattttcaattataaaatacaatggatgcatgtctgcttgtaggcagaggtcaaacatgtaaaccatttttattatcttacaaaaatatcaatcatttacaatatatgtacattatgcaaatacaatgtggcaggttcacattgtcttcatgtcctagagcgaccaggccgtgacttcaattgccacgtggatccaacgtggcaccattgacatgccagacgagccgacacggcacggcagtgccaatcagtagaaccatcacacttctgtggtttttgcctgatttacgccaacctttccctaaaaggaagtaaggttatattcgctaattacctcaacatgggacatttatcagctagccatacgtttctacttgtataaaagccggcatggtgctcttttatttgcaacgttacttatagttaaattaatttgtaacagaattgtcgattcatatgtgaccccacgagcagacctttttatcagcacaagcagatcacatttatggagttcatacaactaacatttatacataattaatatatactccatccgtcctaaaatataattttagtattttttagttggatgggacgtattctagtactataaatctggataagcctcctgtccagatttgtaggactatgacacatcccatccaaacaaaaattactaattcgtatattttagaacggagggagtatttgaaattacatatcgataatgctttctcttaaacgtccggagcatatgtttgtgttcaccgaccagcaatttggacccaatatgatactaataaaaaacacacgtatattggtaatgggcaggaagtttcttcaaactggtggtcttagatatagattgatgattaattagtaataagaaaatgtcaactttagttacgtactccgtgccaacatttgaccatttgtattatttgaaaaatttattaaaaaatttaaaaaaatcacacataaaatattgttcatgttttattatctaataacaataaaaatactaatcataaaaacaatttaaataaaacggacagtcaaacgttggacaccgaaacccacaactgcgcttaaaattagacggagggagtacgtaatatccattacataataataaaaaggtaatctttttacgtggtggtgttgatggcaaaatttagtaagatacgtgaagataaggatagatccgaagcggatttgaaggaattaacgtggtttccaaaacagaacggcgcatcagcagaaaactgtattggccgatatagagtcggattcggttagccgatataggcaatttgagttcatatcaaactcaagattaaggtttcaaagatattgcaaaataaggacggagtccgaagaagacaattgaaaacaatccgttttcctttatgtattttagaaatttatgttagagttcacaatgagctagtgtgtttatttttgtaaagtttgaattgtatccgatatggacaagttttgtactacagttataaatacatgcccaggaccttgtaaaaaaaataacagttcaataaactcttggcacatcaccccctttttacttttcgactttctcgacgagttcttgcttcaagttggggcatcggcttcgattttccggcaagaggtatggcatgtcacagtggtttgcattggcggattaggatgtcgttttagatgttctaatctatcttttgcagctactggttatcatatatcctagttaatctaaattgatgattctatttacttgtatcaaccaggcctttttctagggttttgttggtatcgactaaatcgttttgtcactttagattagctaaggtatttgccacactaaaaatcagtcacaaacttaattgtttagactttatgcttcttttcatacttagtattgcatcagttaagtttgatctactaaatcgtacttagaatcataaaaactagcatgcttcttgattaccaataggggtagaattggggtttcagccgatcttccttgatgtaactattttgctatatttaatttcttttaatcatgtttttcatgctatacctaccccttgtataggtatatcactctatttaaatatatcgatcttcttctcgatatatttacctagattgatattcttgtgtaaagctatatcgtagtattacctagattgatattcttatatctgtatcgtagtattagccgatacaatatcctttcttaacctaagtattggatcatcggctataatataaaaacgtgtaatctttagtttatctgatctgatccatactatctcgattaggttcaatctatgccgtttgcttgcacttcagagaaagattgaattagtgattacatgtttgattgcatctaaagctgatggaacatattttaggcttgtttatttttatatatcctataccttacaaccgattcgatcagagaacatcggctatacgatatgtcatcggctcatcggccgattggctatggtgttctaacttgattttactgtttagtcttgttggttacaggatcaaaccaactgacacgtcctgaacccaaaaagcaagatttgaacatacactggagctaagtggaattctcaggccgtcctgttttctcctcaataggtgggtgaatgggatgatgggtgccttttgtttttcaaatttatttatttactcagcactttgtaatgtacacacggtcgtggaaacttgttgtgctcaacatatttgaaatgaaattttaaaaacttttgaacactaatctcttttaaaatatgtagattggacgcatgaagaccatctgtataagtacatctcgtagtattacaactttgccagccattaaatattgtgtactaatacaaaactagcggtcaaaattatgttttttaagattatatcgatgccaatatatatacaacatattttttgtgacagaactataaaaggcaacttactagggtggtaagatgcaccagggatccagttgatttgacaaatatttgtgtattattctgtccaagctttccatttgatcagatgatcaagacgagcaatcttgatttattgttaataacttaattaatacgatctcttgggatattctgtgcgtgtaacagtacactatcactatgtacagatagtgtaaagtctgttgtccgtgatcaagtgaatttaccctcgagaaaagaaattgaggcacgagccctgttccactgcaaactgcaaccaccggatcacaagttacacatgcgacatgacctatacactttccagcagagaaggtgacattggcaactcccgctctcattttattatgttgccaagtaggatatgtacgtggttgatccgtgtatatccaacaatccgcccaaatccttatgccacataatgaatatcacgcttctcaatgatgccgtgcatcatcgtcatccactcatcctcctctgcatagttttttttttatataggtagagcatatccttcttttccagtgagaattatcttctcaagagtgcaattcattagttcatgaatcgatttttgttgccttgcgagagggatgtacagtactagcacagtaaaaaaaaaaaaaaagctcgaggctcgcgagcagcttgagcttggctcatactaggctcgattcgagctcggctcgagctccaaacgagccgagcccgagcctgagaaaaactcgcgagctttaccaaaccgagctcgagcttctactgagcttgtttgtatatagattatattgtatgttcaccttattaatataataaactaatagataaatatatatatatatattaatatttatttacacaataaattagcacgtgttaacacaatatatttatttgaatcatttttctactttttattagtgtgattaactagaaaatattaaacttatcaagagattatcattaaaatatatattatactacttatggccgagctcggctggccgagctcggtagagctcgagctcgaaccgagcttgcctaaaagctcgaaggtgcaacaggctcggctcgagcttgtgtcgagctcgagcttgggcagacaagctcgctcgagctcggctagttgataaccctaaacagtactactacacaaacagcgaaaaggcgtttccgaaatcggttagacgccccatctccccccaattggagattctcacaggtggaccatccaaccgcgtgagaaaaaaaataattattctaaacggatctcttaactcagccgattgtgatactacatatattttcgcaggccactgagttaaacagctcacctggacagaaggtggctaagataaagatttcttgcctatttcaaattaaaatttgaaaatatatctcaaattaaaatttttcagtttttgagtggcattattatgtagtatagtacgataactaggggtagtgtgtaacatataaaaatatatactccctccattaataaatgtttgacgccgttaacttttttaaacatgtttgaccgttcgtcttatttaaaacatttaagtaattattatttcttttcctaccatttgattcattgttaaatatacttttatgtatatatatagttttacatatttcataaaaaaatttgaataagatgaacggtcaagcatatttaaaaaagtcaactgcgtcgaacatttaggaaggagggagtatttgtgtcaacaaatatattggatatgtgtgagttaagacatattaacatatgtttctaaattcgattacaaatgagccatctcggatcgcataacaatagtctcataacatatattatttttttgagtaaatttcacgaagctatggatatattgaccaaactataaaaatgtacatagatttaacacaagatttattgtaatggttagtgataatttggtcaaagtttgaggttagtgataatttggtctaataacaaaataaattacagattccgctagaaaaccaccagatgaatttattaagtctaattaatccgtcattagcgaatgtttattgtagcactatattatcaaattatagcgcagttaggcttaaaagattcgtttcgcaattttctaacgaattttgtaattggttcttttttttgtctatatttaatattatatacatgtgtctaaacatttgatgcgacagcgtgaaaaatttgtttggtaactaaagatgcccttatttcgtcttccggaccttttggcactcagccaacggaaggccctcacgccatctcgcctgatcgcgcccagatctttttcaccgagccggcgcttgcgttttgattggcaagcaacgcgagacctcgagacgctcgtgatcgagctcgtccgcgtcgcctttcccttcccctccgctgctctgctccgcgcgcgcggtgcaccgtgcacgcctctgcagcacgcattactaacgtgcggactcaagggccagaggcagcggcgctgcagcgcatgggcgcgcgaggcgtaaacccccacacccccatcgtcatgtgggcatgggcatggggaccctgcctgcccgtgttgaccttggaggtgcggtagccggtaggtccacaccaccaggccaccgtctcgtactagtactgcaagactgcaagccaagtggtttggactttggagtctggggctaacctgttgctgggctgtacagtagtacgctcagagcctcagatgcaacaaaggccgggagggatggcccacacacaggacggtgggctttcccaacggaataagttcattctaggtcccttaacgtgacgtccaattcaaattccgtccctaaacaacaatacatataacacgtcactcaatttaaaataccggcatactttacgttctagagcagtatagtctcccttttttactgacgtgatggctaagtcaacatagaccccattatcagcggcctaaattttttccactacctcacctctcttcccatctctttaggactccacgctcaacggctccagggctaggagctagtgatgagcggcgcgttccggcgaacggtggcgtgacaaagcaagcatgcaacactgggggcgctgcatccgcgcgtgcaaaggaggaacaaagtaggtagtgctggcgcagcgagcgaacaacaattggacaggcttgcggcggtcggcgggagaggcgcgtggcgggtagaagctcgacagtgacagacgacgaccagcagggagaagggtgtcagctagcgggagagactctcggcggtccccttcctcttccctcgccactagtggtcccttccccttcctcttccctgccctatcgatgggcttgcattactacggctaccacaccaggtctagcccaccccgcatgcccactgctcatgccaaccctcaacaagcccaactctaccccactgcgtgccgccccacgcgctccgccaaagccgatctcgtcacgctacctgttggcggtggctgccgcgtcgccgacctcctccacctcatcctcgacgtcatcatcttcgttcacgtcattgaactactgctccctctctacgcaatgtgtctggtcatccactctcctgccatagcactcgacgtcgcccacccagggcgtggcggtgactgtggcttttggggcgtgacggtggccacgatgcacatcctcttggtgttgttccaaggggagtccttctaccagacgtcgcatgctccccaggccgcgttgtcggtgtcccagccgggaggcgtgggcccatgctggagcgatgaaagagcgtgtcatcaatgctggagctcgagaatatgtggtcacagcaccgatggctgacgacaaagcccaaggtgtcggacctccttgcccactgccttgactacagttgtaccacgaggaatcaaccctgcgtgtcgactgctgtccacctactccggcgttccatggcgttcgactccaccacatccctctccccttcataccactatcctcctcaccacctgccatcaaccttctcctcacacctgcttgccccggtgagatgggaacaagaggaggaagagagagaagtgaagaggccttgacatgtggggctcacgctgactcaacgctgttgacttggatcaaattgccacatcgaacagaatcatcagctatattaccatgggacctatatccaatttttttattaataataaataatattatttaaattaaattattagtaattagaggataacatttaccaaaataagatggccgctactagaaacagcgtccagatgtggacgctattaccattaacgtacagatgtggacgccaattggatcgacgtccaggttggtgcggtcataacctggcgctaatcatcgcgattaggaaaaaagaaaaaagaaaaatcccccaacgctagggcagggtgcctctgccgccgtccaaattgacgccgggagtctgccgccgccgccgtccgcctcaacctctggagtctgttcctccttccgactgagcgtagggactacccacgaggcaaatggcgcggcagcgctaaggcagagggccgccgccaccgccgccgccgtcgtccacctcgacgccgggagtccgccgtcgccgtccaccacctcaggaagaccacgccaccgcctgaatcgacttttgaagttctgagaggtggctgccgtcggccgcttccatccgtagcttgctgtcttccctggaggctgcagctgttgtctgcctcgactcctgccaagtgctgtcatctgttctcatcttggaagcttgcagccaccattgacgtccaagcccagaactcctacagtcaaggtgattcaactaacttattttgttgtagcctatttaataaacattttggaacacaatttatggatggtaattacaggagatgaagaatcaagaaccggcttcacaacttctaaaaaaaaagaaccggcttcaaaaatataacataggttcatcctaataagtctaatgtataatagagatctttataaaatatatgtctactacatcagagttgtcattggagttccaacttcggaactgaaattacatttattcacacagtagaattgaaatactgatttagcttattggttgttaacattttgtgcagctaaaaaatggctgatagtgatcggttcagtgatttactatggatgcctcatgggcagaacaaagtatctaaaatttcagaaaatgtgagttgtctacttagtttggtttcttgtcgatttgtaaatatattcatctaggttcccatgagtaattgtttttatctttgatgtagcctagtagttcaatgaatatacggcaccatcgcgttggaatcccttaccacccattgtgccgatcggctctacaaaatattggtttctatcaaattgcaaagatgaggagtatcaaaattgacaaatatttgatatctgctttggtagaatgttagcggcctgagacaaatagctttcatctactgataggggagatgacaattactttgcaagatatcagttgcctttggggtttgccaatcagtggaaaactaattgtgggccaatctgatggaaattggagtgatatgattgagaggtatcttgggattccaccagaagatcaagaaatgaagaagaaaaagaggaaaaaggaagatgatacatttgcactgagttactcatgatactccataactctgagcaaattgcgtgatcgctttcgtgccatgcccagtaacccaacacaacgggagatcgattggcatagtcgagcacttgtcttagaaattcttggctccattatttttactgattcatctggagatagtgtgcctgcaatgtacctccaatttatggataatttagcgacccgcactgaatacaattggggaggagctgtacttgctatgttatacaggcagttgaataatggtgctgagaaggcaagatcagaaatttttggccctctagtattgttacaattgtggtcatggtcacggttgccattaggtcgtccaaaaaatataattcaaaagacggatgaagtggaggagcaagaaaaaaaagaatcagatggctatcctatatttggggccaaatggtgtagttatcatgaattccccaccccacataattgtggtaatgttttacatatcttttgaattatgtctcattgtagattcttataacaaacaacatatatgtcaacatgcttatctttttatactaatattatacaggcactcaatagtaccgaaaccaaattgacttgattcgagaaggtactgtacaatgacaaccatatgaaggtctcatagagcatatgcctatccaaattcagaatgaccgtacttggtggtttgctagactacctctcatccatttttgggttgtagagttccattatccagaaagggtaatgagacagtttggaagaaaacaattaattacaccaccgcctccacatggtgaggttgagcttcggaagctacgcaaagtgaagcatgtaggaggaaaagggtgcgattggaataaattccatgccaaatatgtgcaacaatatgatgggattgaagcaacaatcgttcaagaggattgtcctttcgacgcagctagcttgaaggagtatagatgttggttccaagcaaatggtatgttcactgtgttttttgattctcaatgcttgggaggacttgaaaactctatcccataccctcgagataacatggagtggactgggtacatgcctagtggtccacccctagctcgcattgtaagttatagatttcttccaattactctttatattgcagtgacaacctagatctgattttaactcataattgcagggattgcgtgagattaaaaatgcagcatggggaatcaaatgttgtattactaatggatgcaagaagataggtaaatctatattgatcacatgtcaggggaatattagggatcttaacttggaatacaaattgcaaaacatgttgtctgaggctgaactaccaattaaggttgaagaaattccatctgatgacgatggcactactgcttgcacgccaagtcctccaaatgaaagttccgttgatgtatttgatgagtggatgatctcaggaaaatgttttagtagatatattgatctaggtgtggaaactactaatagagttcccacaacacaagatgcaagccaagtgactcaatgtttggaaaatgaagatctggtaaaattctaacacttgtgtgtatgcaaattaactttgtaatgtatttaatatatgatatactattgggtgacatgacaggtggcttcaagagaagcatcagctccactgcatcctggtgaaagaacgtcaagtcattcaaaaagttctatccaagtggttgattggactagtactgagaggactcctatgttcaaaaagaacactccaagttaggaagaccatatattctgttggatataattttgtagaacttttggagctatatgttctacatatatgttaactggaaatcagccactccaagttaggaagaccatatattcctgttgacatatatgttcttttcgaccactgtcttatatgggtgctatactatgtaaaatatggtcacgctgtcagtggttgaatggcgtgttactttactttgtactgacttactatattaatggatttttatgttgccaacttacatcccatttgaatgagcgcatgctatttacttcagtttattgccacgatatgtgtgtgctgtagggaacaaatccttgtttaaacatgtgctcagatacatcctacaaatagcagtacagcagcaattctattgtgtaaatcaaatcatacgaaaaattgataaggtaattcaaattgaactgtctgtactctcaaataaatacttcaaaaacaatgttcgttgagctccattcatgttcaaagccaaccagaagaatgtcctattcctggacaactataagctaaattgacactgtaatttatagatagactacacgatgcgtaaaactatatggtgccagagggtccatcaacatgtgttctgctcgacgttgcacctacaaaacaatcaaagagagtcatatatcaagtaaaagttaactaacaattataatgcatataattcccattgtttgctacctaaattgtcgctatctcttgtggaacgggtgtgcctggtgtccaagtcgtcttccttacatttcatccatgtacattggtatcctgttatgctgacgacggcctagatttatctgtctaggatcaggaacaattattggaccagtaaatggtggccattcaatttgatttccataaggaagaaattgtccagcccaggtaatagcaagtgcttgagaagagtagaatggattgatcaactgattttcattaagatttctatgtttgcaaactgccaagacatgagcacatggaacacctgtcaaatttggcttttgacaatcacaagatggtgtgttgttgggttgcaaaactatcttatacttgaagtccctcagtgtgtaaacctcatggtttccttgttgcattgggactaactcttgtcgacctttacctcatatattccaacttcatctccatacgagattacattcatatgtccagccttatttcctcgcttcactaatagcttatcaaccctttgagaccattgcttgccattgttaagtaaattaacaacatttcgccttctctcaacaaaccattctaagcactttgaaaatgtttcctccacaatggctgccaccggtaacctccgagaaaacttaaacacattgttcaatgactcagatccattgcttgtcatcattccccaacaatatcctccatccttgcattgaaataccttctcgggcttttcttgctcatctttatctt

SEQ ID NO: 8446 - DNA, 24148 bp, Oryza sativa
tggattggaagtcaatatccctgagtggagtggtttgtaagggaaaaaaccaaactgacccactctgtagcataaatgagtatgcatgtgtgcagatctgatttcttcaggtcatacctgaaaaactaaattaaagacatccagaaaacaaatctgcatatgaactgttgcactcatgtttcgttgcgtatatatgctgtgcaccactgaaatttcttgttggtcacactctattggttcttgactctatgagccttacgtgctatcaagcaaggagatattttcaatcattttttaatcaagttctattacaaatatctgtaattaaacggtgtttatggagtacttgttttcctactaactagtaggcttcgtttcactgtatttttgtggcttttgctgcaacaatgtttgactgtcatgcagtattatctgctctgaacatcctatgtttcgtgttgataatagattcaatagatgacatacagaaagctgcaagttctctaaaacgcatccacctagcctgcctagcatctagtgccttaggcaatcactgttctcttcgaatcataatcttgtcaggatcttgatagacttcctgtgaaactcatgctatattcttttttgatctctttatgttctcccccattgttcttgataatcttgtcaagatcttttcatttatctgattattcgagctaacatcttctgattgcaaatcatggggtgtttaagtgcggcaagttttatgaatattttgatgatcacttaagttacatgttattattattgtagacaacttgctgctgctgtgctccttgcctccttgtgacttctgagtttgtctaatcttctttgactatgattgaacatgtaccttttaacagaaagtggtcaccttaaaatcactaaattgtgctcactattacatcacacataataaaaaggttaacttgaacatataaaacaatgattcgagtgttggatattttagtaagtaaagtatgatttgttttttagcttaattgatccaggtttacattgatagtatgaaaccaatgattggtatatatcgacatttgatggagtttttctatttggatcaggattaagatatggcatagctgatcctaaaatcaattaggcaagaaggctgtcagaaaatgggaaaggatgacatcatggcagccaggttgtaaatcaactaatgtgcacatgcagtttctgttcaactagtattatactgacgtgctgttttgatttggggaaagaaagatggagcaaatagttttcatgttttgagtactgtgttgagatcctgtaagcaatattacatgttagatgtcttcaacaggcgctgaagttgattgtggcatatggccataccttttactacctgtacaattcaggggttgtatttgtacagtgctgatttatagtctatatgcagaagtataaataatgtagtagtatgacaaattttggatctttatgaatgtgttggttttgctaccaaaattttgacaatctaagtttggcctgatttagttcccaacttttttttcaaatttccaacttttccataacatcaaaacttttctacacacataaactttcaacttttccgtcacattgttccaatttcaatcaaacttctaattttggcgtgaactaaaaacacccttattccttccgtcttataaaaaataatcagtataggatgtgacatactcttttcgtcccaaaaacaacccaatcctgggtttgaatcgtgtctagatgatttaaacccaggattaggtttttctgggacggagggagtacatgtatagtctacactaggctgagccatacctcgtactagttttgtcttccttttattagacggagagagtatgtgcacggagtgtttttttttttggaggggggtgggtgggggaggtaggaatgtatactttgctgcctaattttggtaagataggtggtgtttgaatctcctgaagatgaagatgaagtttttcacgtaaaacgaggtggtaataacgtgtgattaattgaattttaattattacaaacttgaaaaatggattaatatgatagtttagaacaactttcatataaaaagttttcgcacgaaatatactatttagcagtttaaaaaacgtgccatttaaatccaaaagtttatcctcaaatttcagaggaaacgaacaggccacaatggaccaaattggcacatggctcattttcgtatctaatactttttttttttgtcaatgctcaacttaaaccagcatgagtacgaaccgatgcccgatataacacatacaacctgttttgttgttttcacattaaattactatcagtcgcatgttacatgagagcaaaaatgtttgagtcaaatcattctcaattgaatagggtgattatgaaactaagaaccttgaaagatagttaaataaatcttgaaaggaacatttttggtgcccaatgaaaccttagacaaaaatcgctgaagggtggaacaaaccgaagctaaccgaaagtcggatcatattcataactgaaagtaggcatgctgattggcgtgcgtgccattttatagcatgtgtgttatttaattatttttaaaatttaggcttgtaaatggatacgttgttatatttgtgggctgatgtagattatttaatgtagatacatgaataaagatgacattatgaagaataaccctggatattaagctaaattgaaaaggatcccaataaaatacaacagaatgccacgaattgatcttagtattatggagaagaccgtcgccacagtggttccactcctttatacaacggtacaacctcggtccatgatcgcacggcagcacgcaagatgaaccagcacgaaaattgccaaatttctcgtatgcgctagtacatatgcacgcacagcacatggaccaaagttggactcctcttgttgaggctttggcccaggcagagactccatgcacgcacatgacttctagattgcaccgtgactgcgtgatgaaaaattgagaagcacaaccattcgctatttttccctttttcctccacgtgtcgctagactatttggctgccactcgaccaatcagctaccaggagacactgctattttttatatctttttgttcttacataattcggattttatttgtgagatcaggggagacacatggtctaataggcagctggcaaaactgccagcttgagattagttgactaagaaagtgttggacaaaacctgttagtgatatgtcctataggcaattatagagatgattgtatcttatactgtcacgtccggaaattcactagtaatttccgaactaatttgtgcattaaatcctcattcaggaatcagcggaggtacacaaactgacaatttaatatacagattcatcaatataataacgttacatacttacaaaagaaaagaaaactgcagcggaattacggtctagcgaagctccggctccactcccacaggcagctcaactggggtataagccaaacgtcttctccttcgcaacttgtcttcaactgaggtttgattgattattgcaaggtgagcatatgacatactcagcaagccacacaacaaatatgcaagtgcacaggataccaaaggatgacataatatagggctcatttgcgaaagcagcatttagcaaacatttaagaattgcaaaacagtagagtaattaatcatcaatattaatcaacactgaacagcacatccatgctgatcaggcccaaccatcctgaacaaccatacccggctgcacagatctatctccaaaccaggaatgtaccattccaaaccaggagctaaattaattaccatcaattatcacattattattaatgagtagtgtgggactaatcacgaaagacattgttcgatccgcccataaccgcgggcacggctattcgaatagttttactctgctagaggtgtaccactgtacccacaagacacaaccccacaacatgtcaccatgcgcctcaataccaccacggtacctcggaaaggagctgtgacagtacccctcgcacaacacaatccaccacagcgcaccgttcctggatcataatcacccccttataaacaaggcatggactccccagcgacccccgtgggcttatctctgccacttctcagtctcgtgctccgcaatgaaccatgctatacaaaaagtaaagccgttgcccatgctggcttgtggttggcacggttaatgtttcacaaccgaaactcgtgaaccggtccttaattgttatgagcacgaccatcaaaaccatgtgctcacaacccaccattatcaagttttagttggcacattaattaattcacaatcacgattgaccatcgtgagctacaattaaatatccatcattaagtaatagtgaaacattatttatcccaatagtgtgctaatgtttctaagcatggctaagcaattatgtctaacatctagctgaaccaatatataaagctcaactagtcaaattatcacccaaggtataaagaatagagtaaggaatgcaaagtggtcataacaaaggaataggttcacaccacccggtgacattccaaaataaatgcacagttgaaataaatagagaattttaatataggatcaacatgctcaaaggaattgtgtttgggatctgtgtgacttgccttgcaataatcggtcttcaattagtcttcttgaacacttccgacgcactcatgaaccttcgcaacgacggaaacgacaagctatcacgcaaaacaaggaaaaagactaataaaaaccaaataaacaatacatataaagtaaacaaacatgtagatcatgattttagatgaatttagagacttgaacgacctcattccgatttcatatgaattaattacaaatttttacaagattaaattccaattaaacctattaaaggaaagactattccaaattaattaaacaatttacaaatgatttataactgagataaaagattaaaacaacctccggaaaagattagattatattcggtagatgacatatattaaaaagaaataatatgccactgaaaagagagaacggatttatatcaattttggacggctaagattaatcttgaccgagagttgaccaagatcggatggcttagattgatctggcaagcgagcctcatgagatatcgactcaacgagtcaattctacgtgacacgggatcacccaaatgatcaaccgaaaccggcgaatggaatcggcggctctgaaaggctctaaactaaaggacgactccacacggatgaatgaacgaaacacggggacacctcgttcgaacgaacgagcgaacgactccacaacggctgcgactaaaccggtgggctagacagggttcacggtaaagccccggtacggcaaacgataggccgataggaacctaggaatgcacctacggctagacaacttggctactgagcaacggctaaagcggcggctaggttaaagcggcacaaagctgcgacacggcggcactagggcgacttggtttggctaggcggctagcacaacggtggcgacaagcaacaatggcacaactggtagcgacggtgcacaaggtagccggcaaatgacgcggcagcggctgcgctagggttagagcaacagcagcggcgacatgaccgagggattgaaacctaacccgaggggtcacggatagaagactcaccaaaccaaagcggtcggagagagatagatgacgacggtgaaccggcggcaacacatggagaccacggcaacgctagatagacaacggattagattgaattaagaccctagggaaaaactcacaggtgaacggcatgggagcggcgattgccagcgaaccacggcacaataacgcaaacggagggcaccgggagcgagaggggatcaaagtgacccttaccaccacttacgcgacgacgaacggcaacgaaagatggccggcgacgagcttcgaagggcggcgaggtactgtccacggaggcgacgactttccggcgatatgcggcgacaatggaggggtggccgggcttcacttcgcagctgcgaatccaatggaggcagcggtgaagcttggcgatgacgggaggagcagcagggcttcgccggagatcaaaacgcgacggcgagcttcgggttgacggcgacaatggagctccggtggatttcggcttcggggagatggctgccgggcttcttctcactgctgcgatgccgacagtggatacggcgaggtctggcgaccacggagtcgacggcaaagcttcgccggagatcaaaacatggcaacggttcggccttcacggtgacggcgacttccggcggggttcggcgcaaaagaacaggtggccggggtagagctcttcactgcgaagccgagggaggtggcggcgctgaccggaaacggccggggcgacggcgaatggcggctggagcggcggccggaggtggagagagagggagagcgcggggagagcgattccggcgacggcggaagatgggacttgaggggataggtagaggacgactagggggtcctttatataggcacgggagctcgggatcaagcccacaatgacgggaaaaactcgggaaagtctagggttctcgccggaaaaaggaaggatttgatccgcgaaattggaaagaatttccatagaaaattttggggatttcttggggaaaaggaagagaagattgaggggatttcattcccgcaactaatttggaaagaggagcaacggggaggtcggattggtgggaggaggcggcggcactgtgcacgagcacggctggctcggctctgtctggaggaggaagatggagtactgtagcgccagggaggtaaatcagacttttttgccggctgagaggagaggagggaataggagggaatgggctgaattcggcccaagctgaggaggagaatttttattacttttccaaataaattaaccaatgagatgatctttcaattgttaaaaatactttcaatgctcaaataattccaagaaaaatcttgaacatacttggacactcaaagtatttaaaaatattaaaaccagaccatttaatgattaatttattaattaaataattactgaaatattctttgtattattaaaattaggaattgagctctgaaaaatccgagaaaatttcagagagtataattaatcatggagaatttaataaaaattaaatccaaccatgctttatatttaggaaattttatttcccacatttaacttcacttgtaaattaatgaacatttaatataaattcttttaataatttattaaattatttataaatcctgaaacgaaaatcaggctgtgacacatactatgtttacatatttatccgactttgttacttgaaatagataactcattattggttaatgaatatgtgattctttcatgagactctttatgttgtgtgttgctatttctaaaggatccctgatcaaatatcatatatagaataaatatgtttagatgatcagcacatgtattaattgatgatcatgtctcatgaatcatggtatagagataccaaattaataatatggacacatgttggtgaacatgttgttggatagacccaacatgagacactgcaagagccatatgtgttgtgtcatcagtgatctcatttagtgttggtattgaatccttagacctaagattatcatggttcccaacatgtgtagtagcttacttagggactgctaaacgttactccgtaattgggtagttataaaagtagttttcgggtatgctatgaaacatgtagtaggatatgaataatcaagatgagatttgcccctcctatggagagatatctctgggcccctcgatgttgtagattatggaagtgcatggccatgccaaaggtgattgagtagtcaatcacaagttatataatctatcaacaggttcgagtgaatgattgagctattagaggatggcacatatctagccttgagcttaatcgatatcgtgaggcaaaggggttcatataagtatacactagaggttcagccgatatgatctttgtgtatgcccggtaggtcaaaacgttctgctaggggccgctgttgacgcgtggaccgaaaaggagttttcgggttacagctgagtgtacatgaacctacagggtcgcacgcttaatgggccggaataagggcattggatggagattcaatatgagcttaattcggatagggatccgaataggagttctacgggccttggtggcccgggtgatggatcctatatattcgtgaggggtgtgaccggcggaggcattgcatcacgtgagaaaccctagccgtcacttccctccccgagcaaaaccctagccgcgcgcggatgctagcacatctgcgcgtggcgttccgtccctgtacgtgtggataccggtagaggcaccgctggtttgcggtgctaatcaacgtgggagtacggcgaggagaacgcatgaggaggagaaggtcgagccggtgcgatcgactacttcctctacatcgacgcgctctacttcgcgagaattctttcgacttctcagcgtcttcttccgctgcgcagcgcgtcgagtggtaacgatctatgatctaatacttgcatggttcctggtttacgcgatagaaaattttgatttatgttatcgtagcctatgcgtatcccaacaaaaccaagggacagttggcaaacaatagtttaatattgcaaaaatcaacaccattggattataattcagaatacacttaacaagtaggcaacagcttcaaactacagcagcaaaacaagtactctgttcctccaacatatggatggtgaccttgggtaaatgtcccagagattcaacacttcagcggatacatataagatatcttctactatttttttcttacaatatacaccacactttctaaattttaaagaattacactataaccataactcttatgcagcttgcaaggaagatttccagaagtaaaacatgtccaggtaaatattcgtgaagatccaaaaccagtaccagcaaatgaagtactccctccgtcccaaaaaaagcccatcccatactaggttgggtttttttttttgggacgaaaggagtacaacacaagataattgggatgtttgtccctttgaacagaaggtaaaacatctaaattcattaccacgtcactcctctctttgcaatcaacattttaaagtttaataaaccatctctactagtattcgttaactttcaggcacccagattccttcgtactgtgaccttgacaacattctcaacacaaatatagtggttcctctctttttgaaagtgcagccataattcagtgcgctacggttcagctttcggatgcaaggcacatccacaatgggtgtgtttggttgcctgcatttagcttggcttgcatatgtgtatgcaatttttggttgtttggttgcctagttgagtgtaaacactcgattcgagcttcacaactcagtttagcccactagatgcagcagcctgcatccatacatgcaaggttcgcacctgcgcatacaaggggcgagcaatgccacgatggggtcaatttgctctttcctcatttctccccctaaaacaaaaaaactagggtttggtgctcattgtcttcctcctctctttgccattgccggtgccagcttcctcgcctaccactgtcggccctccttcttgagctccggtgagctagatctggcaaccacgaggtcagatgaccgcacaaacaattgggctcctcatcatcgctgcctctccacttcttaccaccaagaggagaggacgaggaggaagacgccaccgtgagatctggcgacaacgagctcgctggccaaagatctggtggctccgagctcgtctccatcaatgtgattccatagaaaatagaacaaagtgtgttcaatcataactccattttattatatattcacctacctatacatcgaccattattaacaacatctatagataaacagttaattcatattgctcatgcaaaccactttcactttcactttcaagtgcaatttttcactttactttttcaaaaatattatgattgagtctatgttagttacattttctttcataaaaagagatactaatataactatatataatgcagatacaagatatgtgtcatgggaatcgacaactcagcttagcttgaatttgttctattttgtgatgttgcaaccaactcattaccaaacctagagaatcaatcaggctaatgtatcctcaacctgagcttttagatggcattttggtcctgatcttttggcctaatgccagtagttttgccggcaatggattggtccacgtggcataaggattttggctgccctctgcaacattgtgcgccctcccctgcatccgcctatgatccaccaacgagtgcctcactcacgaggagtcgagggtctggctcgtagagcaggtacaataatgtgatgttgaaagagagagaaaatgacattcatattgacaacaacatgctaattccaaccaaagaactccactgaaccaaggtttactctcctctgatgtgaaagattatgcactctaaaaatctgatcacactgttcttcccaataaagataagcatctagaacatcctttccagtaaactttggaacactcaactttacccgagcaacattatccaggtcatcatgatcatggcgaccacgatggtggcctccattgccaaggaccgcacctcggcgaggatgaacatgccgccgctacaaattgttctctgaaaaaaaatcatcattatatatcaccatattcctcctcatggtgatgatcatggggctcaaaacaaccgccaaagtgcgcacgggagccaaatcctcgcccgtgagcacctccttctcgtgctctagtacctccaccattggacggaccatggagtctgtcatcggcatcatcatcaaccgaatgtgcatccacaactcatcctcgggatcaacaagcggtggctgaaccaccccaccactggcagccggaaggcgtgcattcagcaaccgttccatcacttgaagaatattattccccatttgcaacacctcagcccatgtggcaggtgcatctggttcgtcatgattttcaccatggcaacttgattgagaacctgccatgttagctccaaaaatatatatagtggaataggtaaatttgtcttctagataagcttcctttaattgattaatgtccttaaccgaatccactaagaatctgactactggggactgattaatttcccttgcccaatttccggactctaaagccaatactaactctaggtcgatgatgacttcgggcttaccaaagtgttaacaaacggctagaccgctggcagctctagtacgaccgagctacctcattcagatcggtgtcagctctggcttgtctggaccgtcgagccatggcatccctgccggctccatgggtgcccggtcagaccaagctcagcctgatcatactgaccaagagcctccggtcagactgacacacaagccgcgatgaaaccggtatgtcccaatcggtcaaactagctacggtcccacaaaatgaaatagatttgaatcaaaccaaacaccctcatacatatgacctaatgtagcattttttatcatttcttcacctaggttaccacctctcttgataatacgtcaaagctagaagaaaacctaccaaatttgactgctcaataccttgattgataaaaaagaaaatttagatttatcacctttatctcattgctttgcatcatcaattttaattcgtggtagctgtccttcatatgcacattatgtggtactaactcaaaatatctcattcaaataaaatagttagttcataattagcatttgtcattaattaccaaaataaacgtcgtgggcttatatgctataagctagttaagtattgcatggtgaacttaatggtggcaagtggtatactagctagtggagggttgcatggtaaaactaatgctaatactacctccattccaaaataagtttaaatttcatccatcacacacataccaatacaaaagcaaaaaagactagaataccatcaaatgccaatgcaactattcatcactttatctactccgaatacatttattccctacttttacaaactcttactcttaaaatgaacttattttgggacaaatagatggagctaaaaatgaacttaatatgggatggaggaagtaggtgacaaggtagcatgctagttagagcattcccagcagcacatccaaatttcatcctccttatgcccatatggatgagcatccaaaaaagattcctcctttatatccatcccacttcaacagatcatccatatcgcaccctcctatattttagtaatatctttcaattaactttacatttgtatttttaagggctatattttgaatgactaaatttcaatggtgttatttaccgtgataatctttcgaatgagtaaattttaacgcatattttttaatgggtaattttattttctaccaatgctctgccctttcctctgttcaattccaacccatattcctctttttctctccttttctctatccttctctatcgttctgtactcttttttttttcctctcttctatcctgtccagactactccggaggcgtcgaccggcaggagcggatgtgcgcatgcggcggcagtgcggcgggaagccgtggaagcggcggcggaggctagcgggcgtggagccgagcaggtgacagcgccgaatgctcaggcgggcaggcaacgtaggcggccggtgggcgtataagtgaaggtggtggccgcggagaaaggaagtgacagcggtggccgacgggcgtggagccacacaggcgacgatggcggatgctgaggcagcgagcgcgcaggcggctggcagactcataagtggtggcttgtggcttgcgacggctcggcgttggcaacttgcggccggcatggcagcgacgacgacgacggagaggaggttgtgatggatgtccggatgggggcgggagctcgatccagatgcaggcgttcatatatggcgtgaggagagagaatcgctatatttggctaaaatatgctcgctttggcgcattgtgacatatttggcaggttagatgtcgtatctgttggaagcccattttcacctccagtatgccatattttgggtggaggaccggatggaggatctcctagggatgctcttagtgggctattgcattcaatttcttggaatggagtaaggcaataatgactatttttattgatcttaaggccaactcactttgctctatcttaacaactccacacatacaaaatatttccattaatatagtacatatggagaaaaagtaatcatcgacacccatgacggtgtcctcgtcgtattcggaattaatttttgaaagcacgtgtagagatttgaagttttacctacacttcagtcaccctttgaaacatagaatagaaaaactcatgaatagaagtaacatgtttttacaatcctatagaatttaaaaacacaggagaagtttgttaattgcaagcagtaaagattgatgttggtggctgttaaatgtcgattctatactgagccatcagaaactggaacatggactttgagggagcaggagaatggagaaaaatgaaaatcgctgaacttgaagaatggatagagaaggcttatcacaatgcgaagatatacaaagaaaggatgaagcactggcatgacaaaaggataaaaatcaagaaattcaagccaggagacaaagtgctaatgttcaactccagggttaagctttttggccacgaaaaattgcgcagtaaatgggaaggaccgttcgacgtcatcgacacctcttcgcacggggcaatcacactccgcgacaactcaggtaacatatttaaggtaaacggtcaacgcttaaagattttccttgaaccaaatgaaactttagatgaagaagtggatgttattgaattaatcgattatgaaccatgatgatctcatctagtgcatgcttaaaaccctgtatagttgtcatttctgcgcttagcttaggaattagtgggcctaggacgagaagtggaggcctgccagatccaccagggttcgttcggccgaaccagggcggcgcccgttcggccccattttcgaatagcaatctcccccgctcgtctatagtctgttgtgatgcgctttcggaggtggatcagtcgcatccaaccagagcacctgttcttcctcctccttcccactttgcaaacctcctctccatctcaacccgattcccttgctccatcacctccaattcaccaatggcaggcaaatcactgatcccattcattcgctcttcttccaattccacttacaatctcaccggagagccaacgccgacaaatcaattgattccggtagaagaatacacgatggagggggtaaatgatgtatgggctcaacccctcgcagctgtgccgggctcccctgcaaatctggagcccgacggcgagctccctggttcggccgaaccaggccctctcggccccgttcggccccccgttcggcagtgcgatccctctcccctcgccatgtcacaaggacaaaaatacggggggattcgcctgcgcgacggccgacaacgggagaactcggcttgttgaaggcgcgacgccttttccaagatgacgggaaggccgtgccgcctcccgccgagcgctatgtgggcaccctgttcaccaaggcaggggatgaggtgctccataagtatgtcatacccaccgctactccatccactccaatggaggagcgattccgcatccagggagtgcgaactcccggcggtgggtatggcaagggtttactccggccgttgacggcatcggagaaggaggggcagcggaatcccgtagccctccacctatgaaggtgaagcatcatttgacgccccctccaatagtaagggctcccgaccaatatcaagaagatgaggtgaagttgccagagccctcaatccataagctcgctgcgcaagtgaagaaactccgcaaggagaacatagagcttagggatcgcaacgcggagctaggggtagagcttgctgaaattagaaataatttcgatacccttagttgcggtttgtgcgctaagatcaagcgtgcattcgtagaaatgggaaaggaaaataagtattatgctaattagatgcttcctttcccatgaataaaatagtagtaggtgcttggttttatttttccaatcatgtaagcacttgctataaataatgtggctcattggtgttaaccccaatgttttccaaagtttgttttgtttcatgtttaataaaatttaggttttgaataagtgtgggggagatatcccagcctctgacgtgcatatgctctgaaaattgttgaatctctgaaacacctggaaggcactgaactctgtagaaaattgcagagggatcgggcatcaggttcggccgaaccaaagctggccccaatccctcccaattttcacaggtaagcaggtgagcacgtcttgtatctgtatatctctaccacggtatagtactagagctgaaaattcagaaaacaattggttcaagcataagtgaaagataaaatttccaactaatgaaattcttcatgtgattgatcttgtatattcattattctcagctgaacttgtgcttgtgaacaaccatccatgtttagggaaccttatgcatctaagtaattgctttatgtgagatgattcaagatgaagggaatccttgcaactcttgttatgactctttggaatttgttttcaaaataaaattgttttaaaagctcaatcctccaattgacttcatcttatacctaccaaggccatatgcaagtatatcattgatgaaccttgttatgcatatgactgcttgacattatattgagctttgtcgaatttatgagactcgtgttagatatctttcatattctcatgatcaaggggtcattaccatttccatctttttccacatatatataattaagctaagcttctacactggaagttggctttccaccgaaaaaattccatttaaataaactcctatattagactatgctttcttctcctggaaaagttcttggcaaaaagaaaaaaaatgggaggaaaggcatggctataaaaaagggggggggaggaaataaaagtttgctcccaaaacattgagcaatgttggaaagaaaatatagccatgccccttccatgatcatgccaagagaaccaaatggagaggaagtataggaaaaggggagaatcattttttttaattccaccattccacaaaagattttaccttttcattttccatccacaaataaagacccttgatctaggagtatgactgatgatcttcttgagtccatatttttggctttgcaatatatatgatgcaggtatgccccgatttatccctaccaagctccacatatcagccttagaatagggatgaattatggcacatttttccttggtaagaatccaaaaagaaaatatacatctgtgagaaacaagagggaaagtcaatatgaggaaaagagctggtttgtgaaaattcataaaaaaaatcccatgagtttgacggagaagcaagaaggattggaatcgagatcattccatttgtcaattacttaagatggtaagatagccactgataaagttcacaggtgcaggtatggttgtgaatgatttatatgcttgattcatatcttgaagaaattcattatgcactaacctttactcagggacgagcaaaggactaagtgtggggggttttgttggcggctgttaaatgccgattctataccgccaacatctgcataaagttcggataataaaatatccaacatagtgataggtgcttaatctcacatattccacagtgttggtgtatatttgtatgcaggtgataaactccgatgttgagaggaaatctagactaaagtgaggagaaatatgtatccatacaaggatgggttgtgaacttcgtagaaacaccagagaatcagcccaaaacacctaagaatggataaaggaggatcagaggaggagccaggccaaaggccaggccaggggggcccagcccaggttcggacgaaccctggtgatcaccattgatcccaggttttggcatggacgtcccagatcactccctgatggcggttgcggggcacttcggacattgccccttcgatcatcatacctacccctatataaggacatcatctcactcactttaacacacacttccaagcttgagctgaattataagaggctctattgtactatattatatactagaataggaagagagtagagtagaaggagtcggaagaaattcggagttgtcggtaatcttctcctattccttttattctgtttattactctgaattcaatataatattcttcttgagtaatttagatttattttgtgagaattatctcttggttagttcctaaatagcatacgggattattgttcactataatcaactaaaatatagtgattgctttggtgagttataaacactaaagtagatagtaattgcttagacgtggtgtttaggtaattgttatccagtaattgttgcatatcccacagtacgtttgaggtgggtgtagaggtggttacagccctcaagatcacttaagtccttcctgtccgggtacgtagtagagcgacatctgggaacagtgggttgccagtgcatgaagtatagcattaggattaaagttaagctttccctagacactgtttctcactagtaaatcctctctatcctggcatatcatttgcttggtgtccttggatgaaccggaggaagatctgaccacacacgttcccttatattcgatacccttggaatactccgtaggggaagtgctacatcggtatacccgtgcgcttgcggattttgtctgtgatcgtaaaaaataccaacaattgaaccaaaggaaaattttcaataggcttttatcttttacttatttttctatgaaattgacgataggatacaatcataaagaaaatctcatatatcttctttccataattaagagaaatcatttgctagccctcataattattaagcttgcctcgctgaaaaaactaaatctttatactgtgcatatctcaggacggtcatgttgaagctcgcatcactgaaaaatactttaaaagaagtcatctgtccaatagtgcctccattaactagcaaccacaccatcattgtgaaatggggagttactaggagtgatgttgtacacctggtcagcatcggcccacctgtcagtccccaccatgtggcgctatcccctcggccacctagctacctactactccctccgtctcataatataaggtcacatcccaccaaaatctgttacattatggatggaaccctatctagatttatagtgttaggatgtgtcaaccaaaattcttatattatgagacggagggagtagcaggcatgtcatggcagcaaattccgtttttctctcctttccttagcccggaaattcacaccaacgcccctacaaccctagcgcagcagggggagggccacctccaggtgggccctgcacccgcgcgacgtcagcgtagcgggtggcaattggccctgctctccgaaacggagattccccctgctacaagaatcgccacggtttccattccacccaccagcgagtacccacacacgtgacaggcacgcatgcgctctcggtctcggtctcggtctctgccccctcacgcgctctgcccccggcgccgcggccacgccatggctgccgccgcggactccggctccccccccttccctccctcccctctcgctctcttctctggtggcggagtccccggtcgggttattattatgcgctggttccggtttttttttcttttcttcgccatttctgcaggggcggaggaggggtggggggactttttggggggttggagattgtggtacattgcgttgttgggcgaggacttggccgtggccacgattcgtcgttcatgggggatgcttgggatttagggttttggtttgggtttcgagtggggatgaaattcctttcattttgagggggctttcttctccgttcgctattcgtcgcgtaaggcgcttttgtgtggttcgggcttttctcggtgataatatgtggatggtaatgttggctcgcgtccgttggtcgaaatctcctgtgatctttttttggatcgtgatgtcatgcattaagcacctgtacatgtacacctcgatttgagtagaacaaggtctgtattgtgcttggaaatggtcgggaagagtgatttcctagccgtgctcctcggaaacaaactatttatgacatttgagggcttttcctatgaggaagaagaagtgcttgttctactcctacctcatttgtttgcttgcttgcttgcttgcttgtttgtttgtttgagtgaactaggttctggattggagcttttttgctttgctttggagcctgcataatgtttctaaaacgctgactgcagaggatctcaatccagcggtggggggcacactgagagttatgtcgtgatttgagattctcatggcgtacaagggaggtgtttgttgagagaaaataaccattctaccatcatcgaaacggagattcgctaaaataccactccgcatttgggattcaccagaatgccgctctcaagtgtggggctttaaatgccattaacttccattttttagaactaaaaattgtttcgtcgcttctctcctatgtttaatgaccaaaatacccccgattgaatccatcaaaattcctcattcttctttcctactcgagcaggagcagcggcctgggagttaacttccatttttgagaactaaaaattgtttcgtcccttctctcctatgtttaatgaccaaaataccccagattgaatccatccaaattccccattcttctttcctactcgagtaggagcagcggtctgggagctagggttggccccgtgccaccttgccgttgccgctcctcttctcgcgggcgtccccgacccccgtccctacgcgccaccgccgctcctcttctcactccgccgccgtgccagtactcttcttctcgtgccaccctgttgctggcccacctctccactgccaccgtccctcccctcttgtcgctcgtcaactgctcccacgcgctcttcctagatgtgtgagctcccacttgattggattcaatcgggggtattttggtcagtaaacataggagggaaaggacaaaataatttgtagttctcaaaaatggaagttaatggcatttcggcgaagccccacacttgagtggcattgtggcgaatcccaaatgcggagtggcattttagtgaatccccgttttgatgatggtagaatggcaattttctcgtttgttgatggcacttgggaagtgggcgtttgcagatggtgcatataaagaggagtatatttcacaatactcttttagtttattatgccaaaccatggtgatttatgattaatgacatctatatactctaaactattcgaccctacgaatttcaattcatactaattttcttgtcatgttgagccatatcatcctgaatcatcatggttattggatagttgttctgtgtctgagatttgcaaccagatcagaccagccgctctattcacatatcgagctcttatgtgatacttgccttatgtgcttgttgatgttgtttcagtattgttcgctattatattatagaacatcctaaataactttctgttctaaaattaagagttgtgcattaagctgaccattcttcttgacatttgcacagtttcaatgttttgcagactgaggggctattcaagcatcatttggtttccttcccaaccaaaacctgttctttcatggacctaatctgttgttttctcttattataacttgataccccaaaccacaaccaacatctcctctgatttaatcaatctgctgtctttgtaggaatgtattaccgcaggcaaaggaaggcttcttctgaggccaacgccaatgtgtttatgcctgggggtccaaatggtatctcatttcctgcatcaaatagggctcatgattggggatatggcggtgttggcgaagaatgggaaactagttatgctcgcaaactccagttgatgaattttctttctgcactgcatcaacgcgctgcaaattctttggtaaccactagaatggatgcaaaaacagaaggacagctcagcaataatagttcttgattccgatgatgaggacgaatacacggaaggatgtgaacagctcacatctgagaacaataaagaacaggcaccatctggacccactagtccttacacgacatggattgtatccagcacgaaagaccaagtaaatggaaccttgcatgttgatggagtccaaagcactcaaattgttccatatggtcaaaatgcaccgttaataaatcagttccctttgcaaaccagctggcaaccatctatccaatatgaaagggttatattgcagaaaagacctgaggagcaacgcgttcaagatctggtggtatgtatctttcacttgaaatttttcaatggactatccacttcgacatattggtacttttactccattacatacctgcactgataaaccaatttattgcatcatgtcttgtgattgtattttgataaatctgaagagcattatgatatttcttgtctggaatgttagaatggaaatgtttgatgtttgttgaatctatactcttttgaagcttaaatatcccatatttgaactttaactcttgttgctcactgtaggcagcaagccatgcagagaagatagcagaaacacaagttctccttactcttcctactcttcctactgagagaaaacgaaggaaaacagaacccaccaccctggtagatgttgatggtggaactaacctaggaaaaagaaaaaggaaaaatcatcaaaatcaagcagcagttgattcaaacttggatttgcaacaaaatgatgttccttcacaaagctacaggactatgatagaagaggagaaacctgtaaaagaaagtgaaggtctcgaggatctttggaaagatttttcattggctgctgaatgtacaaaggtacaagttgtaatcacagatgttttttttttacttttattctgcagcattataaaattgttggttctttttccatctgactgctaattgtactcgtaaatacatgctataatctttattttttgtttcaagattgaataccactgtgcacaaagtaagtttcatggcaaagtgtattttataagataagatagagtttgaaaaggcattcatttgtcaaatcatttaaatatgtgtattatgacaaagttttgaagcatttcaattgattatttctatctgatttgtgtctttttccaataaagctcacgtaatattctttgtccagcttgatacaaatgaagacatgtccaatgaaaaagatgtggatgatgaaaatgagatggatgatgactgcaatcatgacattcggattcatgaagatctaggccacgtatgccgtatttgtggcatgattgttagaaaggctgaaacaataattgattatcagtggaaaaaggtgcgtaccatgtttaggacatgtgattcttcaaagttttcaaaactgtgatgtctatgattctagttttactttgaggaaattataagcagacaaccaactttgggaattgttttttcataaagaaactgcaagttaattatttacatgaaacccctcatgtcccatacagcgtcaacttttaaagccccaagcgttagatctggttatacttgacactacacaccaagagggtctagtatatgaatgttcgctattggacagtcacgcgaacggttccgacaaccttcgtcttactcgtacgtctaaccacgcctgcatgcaaatatctgttactaatacgtgttcacatgagagttgctctaagcctgccttttcaaagaccaagtccacctatgcttatgttatttgattttcctagaatcgtacacatgttcaacgtatgacgtatgtcaacagtaaatgttggttctgttaacagtgaaatttggtaatcggcaaaaacatcatcggcttagaatcattattggctgcagcatctcggaattagccgatgggagttatcaagtcaccaatagttggattcctgctatattcggttaaggaaatcaatctactaaagaaagcttatccctaagtgaccgagtttaaagaggatgcggcatggtagtttatctattaattaggaatagtttgttagtttccttttatctttaggaaagtgtgtttagtgtccgataaggacattatattttccttttatctttaggttagtttctttcttgtccgataaggacttatatcaacccctgggtataaatatgtacacccggggtctatgtaatctatcttcacaataaatacaattcggcgcatcgccacattttaccttttctactttattttattgtccggcgggacttggcacctgacgcggggttgcatcggtgttcgatctccagcgaaggggtaagtccaatgctccgccggtccaggcaattgtatcgtctacgtcggcgtcgttcaagactgcatcaggacattcgacctcttggattactctggtttggatgatatatttgcctacctatttatcatatgtctatgttaatctagtcctagcatctcaatttagctctatcggctgcttctcgttttagggtttctgccagtatcggctaaatcgcgttgctagattagattagcttagacatctaccaccctgaaaactcagtcaatggcttgattgtctagatattatgttttttttcatacttagtgctgcatcagttaagtttg

SEQ ID NO: 8447 - DNA, 16159 bp, Oryza sativa
agggtctcgccggtgccattgaccccttccaggatgccggtgaggcgggcggcggcatggtggggcggtggggcggtggcggtgggggatcgcgcgaggacggaggagtggtggcggcatgcgatctatatcggggggaggaggagaggagctagggttaaaagggtctgcacggatcttgaagcatatccaatggtccaaaattcgaatgataggaggtgggattttctgtcacaagacgtatagacagcaccctatattaagggaatttgtttcattttttgctccacaaaaaatattttacctagtgtactcacaatgtttcactatgtatatatctaatgttgcagtgaattgaaatattcttttgcaataaatcacccacatattttgaaaaccctctattaagggaatttgtttcattttttgttccaccaaaaatgtttcaccagtgttcttttaatgtttcactatgtatggaacaaatgttgtagtgaactgaaacattctttcgctatttgctaaaacattatttttatataaggtgaaacaacacctaatttaaatgattgaaacatttttgatctactgtaaaataattccgatatatttggtggaacatcgtgcaacattttaaaataattcaataataagctaaacaaatttccgtcggaatatatccatgtatggtcttattttgaagatttaattgcaacaaatttaatggtgcaatcggatcatgatttggataaataatttaagagaaaaaatagtttaaaatggttttgcacgtatgcgtcatgctgacgtcatcatccgattttgccccctccccgtcggccgaccaacacgtagtcgtctcccgttttcagcccaacaatcctttcctgtttttgtcttttttttaacaagttcatttgaggtcccttaactttacaccgagttcaattttcatccttgatgcaaaattagacacaacgggtccctcaacagtcaaaactggtataaaggaggtccctcagcggtttagatggcgttttagctgacgtggcatgacgcctacgtggctagtctgacttggtcctcgtcctacgtggtggtgacatggctctagaagcaaaatgaaaaatatgtgagacccacatgtcaatcataaaaaaaatatagtgggacccacatgttcctcctctctatctccgcccgcagtctacgaaacgctcaccagtggctacgctcgccgaccgcttgggtgaccacggcggcagggatgggtgggggaggaatggcgactgggggcagggggagggggctgtgtacaaaacaggatcttgcagcactgggacgaatcgatggcgtcaacgttggagaacccgctgaagcggcggcagcggcttcgagctcgagtctcgggccccgtcggcgccacgctgtccgtgtcccgcgactgcgaactcgccgttgccagcgccaactcatgaagatcaatgcggcgacgcaacaggaggaatcggcggcgcgggggggtgaggtcatgcagctccggccgccactcctcctctctcgtctctcgcctgctgccgcacgccgcttctctgccattgtccatcgtgcgccactccgcctgaggcccagagccgccccgctctgagcaacgaagagaggggagatggggagtaggacaagaagagggggcgtgaatgacatgtggggcccacgtgggccccagtatttttaaattattttttgtgtaactgatatgtgggaccatagtttttattattttgcaaattaaattgtcacataagcgtcatgtcaatgccacattagatgaagaccgagtcaaattagccacgtagacgtcacgtcagctaaaaccgccttaggacttattttgcaccggttttaagagttgagggatctattgtatctggttttccagttgaagaatgaaaatcgaattcgttgataagttaagagaactcaaatgaacttatattccaccgagcattcaccgtcaagagaggcgctctaaatttctttgtttgcgaggtgacatttgatagtgcattcctaggaagtacgaacatattgctttttttatggaccagtaatatactcgtgttgtgtaaggctcttagccatacaagctgcagctactgtggctgctatatcacaaattgactacaagtagttgcagcaattcttaactacggtagccgcagttgcaaaaatatcagccgagcacatcttaagtgtgtaacaggctagacgcatataattaagaattgattgggtatatgggaaggaaataagatggagaacagtagtagatataatgaacacaatgagtgtgtttagttcacgttaaaattgaaagtttgtttgaaattaaaatgatgtgatggaaaaattgaaaatttatgtgtgtaggaaagttttgatgcgataaaaaagttaaaagtttaaagaaaaaatttagaactaaacaaggcctttagtagatataatccgtacaacctattggagttaatttcgagacagtgtaatttggctttgcatagcagccacaggaaggcaaagccacacaaattttgacaatttgatattttgaaaaaaataattttacaaataaaccgtcactaaaacttattttaaaaataatcttttttttccagtaccaaatcatctggcgctgaccttagacacctcagcgccacgtcatctagcgctgaatgtcgtgccaccgcagatgggaggctaagtcagcgtgccaacgcatattcagcgtcacactatttggcgctgagatgtttaagttcagcgccacacgatgtaacgctgaacaaaagggttatttttaaaataagttttgatcggttcatttgtaaaaatattttttgcaaagagtcaaattgtcaaagtttgtggcaaagccaaacgggccagcacttgttcaccgcgcagcgcttgtcggccgccagctcgcgcggtcgcgcccatgtggtgatacccgtagaccggatatagagggtattggggtacgttgatgcaagggtctacgtagtatgacatcaagcaaacagaagacgaagattatactagttcaggcctcttgacaggtaatagccctaatccagttggtatggaattatatgatgggaatcacaggttacaaagggaacgatggaactcgatgaaaccggcgagatcataatcgaattgattcgactagatctcccagcgattcggctcctgcaggctccgacttcgtaggctgtggtggtggcgttggctgtgagattcgatcccgcaggtcctcccagggggtcccttttatatcgcaggtcaggcaatctccaagcaggactcagagacatcgaaccgcacacgatacgttgacaacacagtcttgcccgagtaggtctctttccatctgccaattccgtgaaggatttccttaacacgtatagagaatgtccctatatgcgcaggcatgccatattgatatgtgacatatatcgaagggtaaagggtatacctaacccgtaaccctgacagtagcccccgacttctgcttaaatgaactcgtgtgaccaacgcgacttctgatgtcgaagctgatgtcgttctcggtgtgggaaccgtagagacaggacatagtcgagaacaccatgtgaagtccaacggtcatgagtgaatttaaactgaagtctgaaagaccgccgcacgcaatagacccagaaatttccggcgggcatctatctcctttccttgaaattcgcgccgtgcgaagcgcgtctacttaagggaattttggggattcattctgaagtccgcctgttcgtgggaaaactttctagcctccaagcatccctcgtcttccccgctcccgcaaaaaccctcgcttgttaatctccgtccttcctccgacgatctctagttggcgatggatctcggcaaatctacttccaccaacgcgtcgctgaagaaactccaggaagagggcgcccttcccggtcgcggagtcatggagagagaagtaggaggtactgaaccccagcctgtcctaggtcgcatggttgcgatcgaggacaacattctttgtggttttctccctccaccttctgaatttcttctattggttctgcacttctacggcctttctttgctccacttgaaccccaattccattgccttcctcagtatttttgcgcacctttgtgaggcttacattggggtagagccttttctcgatctcttccgcttctactatgagttgcgttggatggaatccaacagggtgtccggatgcgtcggattccgacttcgggatggcttgaaatcgcgctacatcccgttccagtgcacttcttctcgaagcaaatggcgggcgaggtggttctatcttcagatagagaattcggatcctgtctttgtcgtccctgaggaacaaccagacaagatttcgtcttggaccgcaaagcccgccttgaccccttccctccaatccttcatcgatgccatcgacgacctccgagtacgaggtttgtcggggtatgaagtcgctaccgacttcgtcggtagacggatccaaccgctccaggcctgagcccacccagcctttgactattctgggccggaggacgcgacccgggtttctcctcggggtattttcctttttagttaaattgactccctcatgcgcgtgttctccctaacttatcaaattctgttctcgatcagcaggcttggatagcgccaccgtggagcgccgcgttggccaactgatgatcagcggcccgacaacggcagacgacgtccccgttcctctttgtgagaaggaggcgaccgagcgcgaagccgcaatcaacgtgagtgtagtcggcagccccttcatttttgctcctggattggataatgactttatgcaatgtaggctctccctctgactgacgccattggaccgctcgtggaccaccaggcggcggccttgttgaaggagggcatcgctcaggaggcgtccgatgtggccgttgccgctacgactagtggcagccgtgtcccaaggatagggagaaagttcacctccgtgctcggcagccgccggagagcgtcctccccatcggtgagtttcttgattcgttaactgcatagtcggaagatgccaccctcaattcgtacttggtttacttaggccgtggatgcgtctccgccaccttcgcgacggcggaagctggtgacgctgggcgagaagtaagtagacgaaaatcgagatttttcccttgtttgatttctggcgacttgttttgagggccagacatgatgatcttctgcaggtcggcataggcgaaggcggcgcaagacaggtctggagggaactccagcgcatctcctgcggtggcctcgaccgatgtcgtggtcgtgccgaggagccgtgaggcgacgccgagtgggccagccagtgacctcgggcctactcgcggcccgtctgccgacgtcctcacctggggggagtttcaagccgagatggggcgcatcctcgaggctggtgctcacggcataagtcgcgagattgcggaggcgagggcagcagcagcgtcgtcggcgaacgagcgtgccgacaagctggagcacgacctagcggaggttcgcgaggacctccagaaaatgagggagctggtggccggcaacgagtgacaacggcgggcactcgagggtcggatgtcagaactcgagaacaacttgtcggagatccgtggctcgttgcgggtcacctacaccggcctacaccagctcgccggggaatgtggtgttacgacaaccatcccggcgaaccccgacgagttctcgctgacgtcttcactcgcggaactagcaacgacgatggaggcgataccctccaagcatgcggccaggatcgtggaggaggcgtccaacgggatctataccggggcctgtcacgtccttgcatgtgtaaggttggcgcaccccgagctcgatcttcggcagatcttggatcggggggccgccaacgacgcgcgtaagggcgtgatggaggaaatcggcgagctgggagagtctgttctcccgctttttgaagagtaggacctttgttcctttgtaatcggttatgccttgtaaaaactttgttggcctcaactgcctttgcttgtgcagtcgtcaccttggtctccattagcactttggtcctgaatatttttggttgtcgtttgtaggtatgtcgatgtcgaggatgtccagcagcgtgggcagcccgagttaccggtggtcgtcccggcgattgcgctccaaccatatgtgtcccaggacgatgtaggtcaaagtttgcccgtgaatacgggtatggcgatgacttccctaagttggtgatctttgttttcatctcctttattcttctatccggagtgacttgattttctgtgttctcggaagagaagagcagcttgacttagttgtttccatgctgagcagatctcgagagtaggcttgctgaccaagatcgtcgcatccagtattggaagacgaagtgtgaggtcgcggaactcgagagagccatgttggaggtgagaaaggaccaggccgtagaggcactccgaggccgcgaggtgtggttcgactcgtatctgaagagttgctgcacgtccatgtcgagggtctgcagagagctccgagtacctcgtggggatcccgaagagtcggcggccggatacatctcgtggctgaacggagcctgcgctcagcttgagggcattggtcaacgcatcgacgaggccttgaagcaggagtgtcgtcgctcaagccggtatgccgggggacacgtgttggcctgtatacgagatcaccgtccgcagctgcacctcgaggtcctccgcgaaggtttttcacgttctcggaggactcctacggagatagatggcctggcgaagtcgatggtgccgctggcggagaaagttttccagtcgatggactggcgttggccttcctagtagcctttgtaccttgtgatagacatcttagggaaaagtgtaatatggttttggacctgtgtgaaattgtaagaagtatcttatgaaatagaaaagaaatctatcttaatgagtccttcttactctggatgtagtgtgtaagagtgcctcttcagttcccgactttggccagtcgtttgatttgtacactctccctagcccccagccttgtcgtcggaggattcttctcgaaggacaaggctcttggacctttgacctgcctcggttgaaccggttgaacaagcactgatcctagcccccagccgcgaagttggaaagttcatttccgattacgcggcttggttaatacgcaaggggagaactcttacacgaccaggtctgacatggtctttcgtctctacagaatccgacaaggccttatcggtctggagcgcttgtgcaggtagctttgtgtgcttgctatggaattgacaggcttcacaccgctggaccatgtcgcatgtgtctttgagggcggttggccagaaaaacccttgtcgaaaagctttcccgaccaatgtgcgaccggcggcatgtgacccatagattccttcatgtatatcgaggaggaggtgtctgccgtcgtcagacgagacgcatttgagaagtactctgtttggcgctttcttgtatagatcgttgccgatcatacagtaaatttttgctttacaggttattttctcggcctctgcgtcgtcctcaggcaactcttcgctgttgatgaatttgatcagtggggtgcgccagtcatctgtggtctcgatatcggcggtggcgcgttccgcctctgtgacctccgagctgatgtcgggggcggctatgttaatctcgctgatggcctctttcactgatggctttgtcaggatgtccagaaaggtgccaggctcaagaggttctcgcctggacgcatgtcgtgctaggtcgtctggctcgatgttgttcttgcggtatacgaggtacttggataactcggggttagagcatttataatctttgtgtacctggttggcgactagctcggagtcccatttcacgatcagtcgtttgaccccaagttcagctgctgctcttatcccagcgagtagtccttcgtactcggctgtgttgttggtcgccctgaagttgaggtggattgcgtgcttgaactgatctccagaaggagatgtcaagatgaatcctgtccctgctccttggctgttgagtgcaccatcgaacgccattatccacgtttcgttgtcgatctggttgcctgattggttatcaggcatagtccagtcggctacaaaatcggcgagtacctgggatttgatggttgttcgtggtacaaagtggacatcaaactgacttagctcgactacccattttgcaatgcggccgacaacgtctttatttctcacgacttcaccgagagggaaggaggagacaactgtgactctgtaggcttgaaagtagtggcatagcgttcttgatgtcatgattaccgcgtagagcagcttttggaactgtggatatctggtctttgcgtcatggagagcttcgctgacatagtagactagtcgttggactttctctctctcgacaacaatgacagtgctgacggagtatggcgtgacggcaatataaagaaataattcttcattaggttggggagcgacgagtacatggggatttgataggtagcgcttgagtgcaataaattcctcttcggcttcctatgtccatacaaatttatcttgcttctttagctgagcaaagaagggttgtcctcgttctcccatcctagctacgaacctgcttagtgctgccattcatccggttagctttgtacttccttgagtcttgcgggcgacttcatgttctcgattgccttaatcttctcgggattcgcttctattcctctgccagagacgaggaagccgagcaacttgcccgacggtactccgaaggtgcacttctgtgggttgagcatgaggcgatattgtcggaggttgtcgaacgtttcccgtagatcgtcaatcaatgagtcgcttttcttggtcttgacaacaatgtcgtcgacgtatgcctcgacgttgttgccaagctggttgctaagtgcgccctggaccgtgcgctggaaagtattcccagcggttatgagtccgaatggcatcttaacatagcaaaataccccgaacggcgtgatgaatgctgtcttctcttcgtcttctctcgccatgctgatttggtggtagccggagtaagcgtcgaggaaactcaacagctcacagccggctgttgagtccaccagttggtctattcgaggaagagggaagtgatccttgggacacgccttgttgaggtcagtgaagtcgacacacattctccatttcccgttggccttctgcaccattaccggattggctagccactctggatgaagtacttctctgataaagccagccttgagaagtttgtcgagttcttctcgtatggcttgtcttcggtctggtgcaaatctctgcagtctttgctttactggcttggcatcgggtcgcaccatgagtttgtgctcgatcacctccctggggacccccggcatgtcggacggctgccaagcgaacacgtcagcattgtcgcggaggaaggtgatgagcgcgagttcctatttctcgtttagtgatgccccgatcttgacggtcttgtcggggttggcactagagagtggaacggtcttgatcgcgccgttcggtttcggcgtcttgtttgtcttgctcattttcttgggtggctcagttgtggcgggtggacttggtgtttgctcgaccatgtcgaggctccgcttgtcgcattgtaccgccagctttgcgttcccttgaatagtgattgttccctttggtcccggcatcttgagcacttgatccgcgtagtgagatgcggccatgaacttcgcaagtgcagttctcccgatgatggcgttatatgctgtatcgaattcagcgacatcaaatgtgatctactctgttcggaagttgtttgcttggctgaaagtcacaggcaacgtaattttgcccattggtttggacgaagactggggagtaattccatggaagggttgatcggtgggcgtcaactcgcttcgtgggatgcccatggcgtccaaggtgctggcgaagagaaggttgattgagctgccaccgtcgatgagaacccgcgcgaccttgatgttccgaatagtgggttcgaccacgatcggatagcgtcctgggatgacagcagtcttgggatggtcttcttccgaaaattctatcttctgtttagaccacttcatcttgggtgcagccccctgccatgtcgagcagacttctcgctccacttttttatactctcgctttgaggagtacgctgtggaacctccaaaaatatgtgagacgtggaggtcagagtctagatatgctgagtccgattcctgagcagtcatctccgcatccttctcgaccacgcgtactcgcttgccttgttccaatgtcatgtgcttctcgagcgatttttttgaaaacaaggcagtcttccaaagaatgtctgttcgacttgtgtatgggacaccatgctttcctcgcgtcgctaccttgtgggtctgggcgtttgggagggttagcatattctgctgcgagaacttctgcttgagctttccttttcgcattcttgcgatttttctttttgcttgactcaggtgtctccgtggctggtttcttctcgcccccggtctttggcttgtcgttcttgcgtctaagcgcatcgtcaacgtgggcgcatcgctcaacaatctcgaatagtctccgagtagttgtgatgtgcctcgttgctaactcctgggtagtgtagcgatctctaacactagacttgaaggcgcgaattacagaagcgtcggtgatttcggggattgtatttctgcactcattaaagtgcccaacatattccctcaaggattcacccgagttctgtgtcaatgcgtgtaagtcgtcttcgatcgcgtggcgcttgtaagttccctggaagttggcgacgaactgctgccataggtctgcccacgaagaaatcgagtagggcggaaggtgcatcaaccatgaacgcgcagagccttttaacgcagttggcaaataattcgccaacgcgttgtcgtccgctccggcagcatagagtactgtggagtagacttaaagaaattcttctgggtcagtgctcccatcgtacttctctattgctcccggtcggaacctctcaggccatcggacatcgcgcaacgaatgactgaaagccctacacccagcactgggggcaatgggttgtcggcgatcgtatgtccttcgtggatgtctgtctgacgatgaggaggaggaagaagatgaggacgacgatgggtcgcttggtcccggtgaaggattacgagaacgccgaccgggttctcgagagccctgtcatcgtcctccattgttgtcccggcaccgatctctgtcatcttcgtcattatggcggtgtcctcgactggtatcgcccggcgtccttcgttcacgatcgtcgtgaatatggcggttgtggcggtgatcacggtctcggtcttcgttcgaacggcctcctcgttcttcattgtcgtgacgtcgtgaagagacgtgatgataggaacaattctcgttttcccgtgtgcgacgagcctctcggcggccgtttaggtgatcacggagatcgctggtgccgcgaggtggagggctagcttgatggggtgattcccgctgttcggggttttcaccgttgataccaccagttggttgttgttccgggtgggatgcagcaacggcctcttcgaacgcgttgctgaggttggtcactgattcccataatcgttctgtccattgtgcgagatcatcgtttagaacggggtcataaggggtttccctcagtattgcattgagggtcctgatgtgctgagccggtgtagtcgtttgattttccgcctcggtgttagcgcgtgctgatgtgtttgtcccgtcgatagccaatacctcgcgtggcgtacttgttgactaggagtcgtagtccttgagtagatgtaggactgacggttcgggagaaccgatgtcgataacaccgacgaaacgatttggggtcagcgtcgttcctcattctttgtcttcgcctctaagggtcttgcctggctactggaccttaggagatgacatatttgtgacgctgagaaaaactttacagcttgagaggtcatgattctttgtcttgtgaataggacaatagacaccacgagttggagaaacacgctgaattccacgctctttgcatgcgcgaatctcggcgcgggcgttgaggaaaacccagcaggcttgcaaagtatgtttcctggttttgtggatagggcaccaggaccctgtcgcttcggaagttattcttgtcggcttgtgtttcttgtcggaacgacaaggtttggccgcattagaatccttctcgagctcggatatcgtcgatgttctgttctccgcttcggcaggaggacctttcgacgtggagtcgtcttgggttatagccactgcgttctcgtttctggtcatcgatggctcagctgagatcggcattgtggtgtaaaccggaaagacaatttcgccgacttaagtccacgctagcatcgttgaggcaggaagcccgtagttgaggttggtgttgacgctgttgtcgacgaggctggatgacatagtagtagaaccttgagcaccaagtccccctacctggcgcgccactgtcgacgggtgatacccgtagaccggatatagagagtattggggtacgttgatgcaagggtctacgtagtacgacatcaagcaaacagaagacgaagattatactggtttaggccccttgacaggtaatagcgctaatccagttggtatggaattatatgatgggaatcacaggttacaaaggaaacaatggaactcgatgaaaccggcgagatcgtaatcgagttgattcgactagacctcccagcgattcggctcctgcaggctccgacttcgtaggctgtggtggtggcgttggctgtaagattcgatcccgcaggtcctcccagggggtcccttttatatcgtaggtcaggcggtctccaagcaggactcggagacatcgaaccgcacacgataccggaaatctctcgcactctcaaaagagaggtggggcgcttacgcttaagtcgatggaacttaaggttgaaataacactgggagtctgcagctcattctactgcaaaccaacacacccacgcctactctcccgggcctagaaggtttgcaacattctcatcaacccagtcttgcccgagtaggtctctttccatctgccaattccgtgaaggatttccttaacatgtatagagaatgtccctatatgcgcgggcatgccatatcgatatgtgacgtatatcgaagggtaaagggtatacctaacccgtaaccctgacaccatgtctctttaatcaaaggaaacagtgtagaaaagtttaaagcaactgcagatttttcttttaaaaaaaatcttcctctctacatttgtcgctacataataaaaatgtaaattagaaatcaaaatctcagaagcacatttccttttatttgtagaaactaaccatcaaccaaccaactgctacttaaagttgtactcatcataccccctccgtcctctaatataaaagattttaatattttacttacactgtttaaccatttgttttatttaaaaaattttagaattattatttattttatttatgacttactttattatccaaagtattttaagcacaactttcatatttttatatttgtgtaaattttttgaataagatgagtgaccgaacagtgcaagtaatatgttaaaattccttatattaagaaacggaggtagtataatagagccacaggtccatacaaaagcatgggatcaaccaaccgaatgcaatgcaaacggtcatagtagtagtgtagtagctagccacgttacgtaaagttacagcgcgcgtgcgcggcgccgcggcagcttcttttctccgcggcggccacgacaagcccgcgacgtgcgtgcagccggtgatgtcggcacagcgtggcgccgtggcgtgcgaacggtgaaccgttgctctagtctccgagattccacccagctaaccatggcccatctatcccgcgttagattttgtctatcgtctatctatggtcaatcgtcgtggtcgtcggccgctcgctgccgtacgtacgtttgtagtaagaaaatatgtagtgtccattgacgacgatgcatgcaattttcgtaattttgctgcgttcaaggcagccaaccacgatatcagatttataatattaaaatatataatattttatattagatttatttattttcgatacgaaagaagtagctaatataactggctatgttattgtgtgccaatttatggtgctagctagtaagactttgaaattttcttacgtcgtatgtgtatatagctttttttttcattttttacaaaaaactagcgcgcgcaaatagtcttatattagttgtagaaaagcaaaaaatataatatataagtggagaaagctttcatctcattagctatctttatctacaatacattgcagtagcacgagatagaaaatgaaaaagaaaatattatatgtgttgagtgtgtacttcctgaaatcaaccgtagtaaaaaaggctatgccctcttttaaaggcgcaacaaacaaatcgaacgcatccctgcaactctatgcaagttgtcaaattaatatgagccctaaatataggagtatatgctactccctccatttcaggttacaagatgttttgattttggtcaaagtcaaattattttaaatttaaccaagtttatagaaaaaataataataatattttcaacccaagataaatttattatgaaaatatatttaattattgatttaatgaaactaatttagtattataaatattactatatttatctataaatttagtcgaatttaaaatagtttgactttatccaaagtcaaaatatcttataacctgaaacgaaggaagtaccaatgatgttgctaaggttctttcgccctgatcttctgtcaaaaatggagggccctgagatagtgagatgtcgacgccgccggccagacggctactacattacttgttgccaacctgccaattaactgattgcacgatcgcctaagaacagttgaaaccccgcgtgttacagtggaatatattttatttgagattgatggttgcttttgataaattaaagtggtataaaaatccatcactattgaattgggccacgatcaaattagatagccctcccgtggtgaaaaatatatatgggcctcacgtggtgactgtatgcgagatggattgggctatattttttcatccaacggttcagagatgattaaatatattgatccaatggctgagcattaacgatgatgtggcacattgaggtttgagttttagatcttaattgtagttagtgggttataataactttatagtaagaagggattagagcccgtcggttagcctaacaagttaaagtaaaagctaaaatttaaatttttaacttggttttgaagttgatattttcaacataatttctttgaattattagtttttaagtcgctacgaacaaatatataaaagttttacctataaattattttttattctctaataagccgaaaggacttgttagggaatacagacaatcgatgagcctcttgttagaaaacgatagtcaaaacgataaaaaataatagatcaatcacataagacatgagatttaacgtgaaaaaccctccaaagcaggagagaaaaaactacgggcaccagctagcaaaataccttcactgaggttacaacgtcgtacggtgggttacaagaggtatatatatgatatatatgaggtgaaaccctaaaaggtattacgatccgtaccgcgggggctctgcccccacacccccgctccgctccggcccagcctcccgcagggcccccaattcgctccgacagatctttattaa

SEQ ID NO: 8448 - DNA, 14052 bp, Oryza sativa
acagtaagataaaaactgaagtaggccttgtaaaaatttctaatctaatgaggcggtgtttgcagtatgtgtacctaagactttgcaaagaattattgcaggagtagataaatcagatacttgttgcaagaaattgcaaggtttaacctatatacaatatatatgctaatatttatatctggttttcaacagttaactgcatgtactgggagaggaggtttccacgattactgagcattgaccagttacaacaactgatgaagaatggttgccctttggttggtatttctgatataacttgtgacattggaggttccatagaatttgtgaacaagagtacttcaattgagagacctttcttcaggtaatgttctaactttctgctgtgtataatttacagttccgtaacaagttctcacatcatcctaagctgtgttgacgatacctaaatttctgttacaattatgtttggatgttcattatggatgcataacttgtttgtcattctctgatcttttgccggcatcggggtaaataaggggggagaggtgttgtcatggtagaaaagagaaatgactataaggaattttagttcattagaactatgtataatgatgaatgctaaagtgccctaaagaaagatacttgatgggtctctttcttatagttgtaattatctgcttcttttcagtagttgtggcttttgacaaattactgatacacatgtctaggtatgatccttgtactaattcatgccatgatgatatggaaggaaatggtgtgatctgcttagccgttgacattctccctacagaattttccaaagaggtgggctcttttatagaataagtaagggtatctttgttttaagcacaaaccttttccattgactgttgtcctactgaacttctatgctgtaggcctcccaacattttggagacatattatccaaattcgttgctagattggcctcagctaaggaactgttggagcttccttcacacttgagaaaagcttgcattgcgcatgctggcagactcacttctctgtatgagtatattcctcggatgagaaagactataatgtaagtttcaaaatccaagtctatgctctcctccttattgtcaccattgtactgctcttggatattctgtatttgtgtcctgatagtttagaaggacagaatgagctaaatagctaatcttgttaagatgcacatatatttcacataaaaaaggagatatattcgattgctcatgtcttatgcttttacccgtaattagtaaataaagcactgcagatttagttattaagcagaaacttagtggcacggttttcttcttctgctttgttcaaacaaatatagatgtaccaaactgtttgaagtgaacaggcaggggaagctagtaaacagtgctatatgtcaatgaatgtttttatggattatggcagtgatggattaatgagtatctaatgctagagacaaacaatattagcccttattatttttgtgagctcatggtaggctggtagcatatgagttccatcgtttcctgtttttatcattctacctggtgttctgtgatatagcttatcgctaagactatgatgctttaccagcttcaggcatgttttactggtcctaatgttcttctatatgttcatgtgcagagagttgccaccagctccaacaaatctattacctgataagaagtacaacagcctggttagactctagttttctagtattacagtacatttatgatctgtctgactattattggatgtatgcaattagggactaaattgttttttttttctctaaaaacttgttggttcatgaaacaggtgtctctcagtggccacctctttgataagttccttattaatgaagctctggatattattgaaacagccggaggttcttttcacttgattagatgcgatgttgggcaaagcattgatgatatgtcatactcagagcttgaagtaagaacacatgtttctttttgatgcacagttatttagaattaaaatcaatattatatggcgtctatagtttgggaattaattattgctatttttggaacaatctgctactcattgatggcatgtcaaattcagagcttgaagtaagaaatcattttcttttctatgcacacttattcaggataaaaaacaaaattacatggtgtttctagcttgggaaattaattgttcctgttcctaaaattatcaatctcctgctaccactcattaaaaaaaacaaattttgttactgccaagaaagctaaatagtctgagaactgaaacgttatgtcttttcttatggaaccttcttagcagtaatactgtatggtagctcttgatgatcctatatatttggatttacgaatttaaaagttgatataaagaacaaaaggagcaaatgacagaggttggaattacgtgctgggctcctgttccattcccatggtcccacccatctctatctctgctgcaaaaggcagagggagtatgactagtgcaaaagcagtcagatattttttcgaacggtcaggccgttgccgacgttttatattaagaagaagatatcctattgtaaggagaaaacgggaccaaaccttacaatgctcaattaattagggaaaactgggtgaaaaccacaactacaacaccacaccaacagctaacctaacctaagctaccacgacggagcccaacacaaggcatcggtcaagcttgccatagagacgacacgacaacacacatgttatcgttgccgagcttgtcacccaagtgacacagcagcttcgacttcattgtgatactaccccaacgccaaaatgaacaaacaaaagcgacgcccacgaaggacatcagcccaaaataccaagggaccactcctcctcacagctagcatcaacaatcctataaagacattgcaaagtgccatcattgccaagcttcgtcgcaccccaacaacaaagcagctccgactctacctaacaataaccaaataagagtgatgaacacccgccgtggagcaaagagcgaaaccaagtctgtgaaggcctcgtcaaacaccctaggcttgtagagcttcggagacgttgcaggaatccaccaatgactaccattgcacgtaaagggttcttggtgctaggaggggtcaacgccaaaacaacacctccaaggaggggaacggcgcctaaagacgtcgtcgtcgtcatgccggcccatggcctggcaaggctttcgccagcgattcccgaacaaagccccacacaaccatcccgcacaacgaccatcgccggaccaccacgctatctcttcaacgcccaagcacagcccacccgcccccgtagctcaagctgccaagtgagaagacctcggtgaccgcgtgcaccggtctcctcgcgcagcatcgccgcccacagcttcacgccgctggccatggccgcgctccggccaaagcctcgccgaccgccacctcgcagaccaccggccgccgccttgccttggcccgcggcctcgtcctcctccttcccgcccatcccgcacgcgtcgcgaactcacagcctaccggcgacgacggccgacgggagcacgggcagagcaagccggcgccgtcgggctctcagcaaatcagcgcggcgacaacacccgtgctgccgccggttccaggctgcctcgccgtcctctctcgcaccgctagccgcctgctccgcctctaccgccacgtcgcccaccgcgccggccggatccgcgggtgggggggccagatccggccacagaggtgccggatccgctgccccaagccgacccgccgtctccgcctccggccgtgtcatcgtcggccttgccccgtcctcctcgcgcaagggcggttccgccaagctgtttggcctcgccgccgccttcccggctcaccgccggctttgccgccggcgagctctggcggcggcgaggtggaggaagggaagagggtgtggcggcgcgggcagctagggtttcgccccccgagccgcccgcgtgagaggcgacgcgggggatgactacaaacaaatctctgaacctttccatgtcattacactaaaagcagtcagatataaaccctcagatattcttcatgcaattattggagaggttcactagttcatctccgttcccctttctgagtacaccacgctctgcctgctttctactccgactgatcatcaacctggatggacatccatgagtttgtgccttttcctttcatgcttcttctgaactctgttcttttcttcaattttgtgtatgaccttttttcgctctcaaggaagtatgactgttttggaacttgagttttgcagctgtgatgcagtgaacaagttacataaaactcagaatcttgcagccctatatgatgaactttaacaatcctacaatcaatttcaaaaatctttcttcaatgtgtaaatattccagcgggtctctctctctctgttttttttttttggggggggggggcattaatcaatacaggacaaattacaattgttctggattagaccatgccaaaaagttagattcaaaaccacgctagaagccagataatccttaacttctatctctcgtggctaattcatgactaatcccaatttggtcatggcgagttcaaaagccatttaccaacttgttgtagtttgattcttctttatttagaaaaaaaatggaagtcacccacacattacatcattacattatgctatatcaaataatgatgtaaatttaatactaggctaaatctgaaactctataaacccagatcacacaagacaaactgattttgtattatagcattcctgaacttcttttgttgtttgggtacatatccagtaactcatgccactttttttttttgtatttaccatgatattattgttttattattttcttggtaaacatgttactggtcttatcctccttggattgcattaagccaaacattttagtacaactttttttctgagttatatggtgcatgtccttttacaggtaggagcagatgatacagctacattggataagattattgattccttgacttctctagctaatgcacatggagatcctaatgccagaagagaaattgaattatctctaaagataggaaaagtcaatgagtgtggaactgatgacagcatggctaaagaagggtcaaaggttttaattcttggagctggaagagtctgtcgaccagctgctgagtttctggcttcttattcaaacatcttcagcagcagtgcctacgatcatgacattgaccaaattcatgttattgtggcgtccctgtaccaaaaagatgcagaagaggttattctcacagcacagtgcattcctggactaagcctttttatatatatacatattttttagttgcttgcatgagttactatcaacatgttctgtgtacatcaataagcaatggaaatagcagaatgctatcattttggtcaagatttgtaaggtaattttagaaaaatactacattttcttatgtatttttgtctctatatgcagacaattgatggcataagaaatgcaacagctgctcaactcgatgttgcagatattaaaaatctttccaatcttgtttctcaggtaatttcaattctggtattataatgaacatagtggggctgccaaatcacatgggaattaattttgacctgacttcaatcctcttttccattttttttctttctataatgagattttaacttggagttgcttttcaaacaaattacatttgcaactagcaaaatacccgtgcgttgcaatggattttgaaaatatgtttttaaatgtactaacttgccagcgattagagaatttagtgattacctcctcttgcaggttgaagtagtagttagcttgctgcctgccagttttcatgctgccatagcaagagtatgcatagaggtagtcttctatacttccttgtgttcccctggtgtatggatctgtgatgatttatgggaggcctcaaaccaccatcgttgtgatattcagtgattcctgtatgacagatgaagaagcacttggtcactgcaagctatgttgatgagtccatgtcaaagttggaacaatctgcagaaggtgctggtgtaactattctctgtgaaatgggcctggatcctggcataggtactttccttaatatcatggtcaaccatgtacatttgttatggtacatacgttcatcaaattattaggggatgtgatatgactaaacattatcactgcaacgagaaagaatgtaattttatcatagagtaattttgctagtccaaacaagttataatattgcttatggcacgcagatcatatgatgtcaatgaagatgattgacgaagcacattcacggaaggggaaaataaagtcatttacatccttttgtggaggacttccatctccagcttctgcaaacaatccacttgcttataagttcaggtaaactatgatgttcccatattggaaataacaatgccatgttgcatgcaacagattttacaagaaacaatcatggttgctttttcctcttttgtagttggagtccagctggtgccatccgtgcagggagaaaccctgctgtctacaaatttcatggagaaatcatccatgtagatggtaatatttgttaatatttgctaaggaaaaacagatgcatagtttatagtatgttttactgacaaaaacatacttcaccaaaaattgatgtgtacttgatccatgttctttgtgcctaaaaagcgatgtatgacacaggctagcattcgtttttacagcatggaacctaattagcttttaaactgctaaaaaattggtttattcagtgtatctttgtataactatcttagtattttaaaattgcatataaaaataagaaaaggagaatccatattatggaaagaagatacaactgtcatatatcaattggtgaatttacctataacttcaacaggtgataaattgtatgaatccgcaaagaggctcagattaccagaacttccagcttttgcactggaacacttgccaaaccggaattccttgatgtatggagacctgtatgggatctccaaagaagcatctactgtgtacagggctactcttcgttatgaaggcaagtgttgatgtaccgtttcgttttaactgagacattcattttccctggaaatatcatttatacaaataattttgttgcacttgtacaggatttagtgagataatggcaaccttcgcgaaaattgggttttttgatgctgcaagtcatccactgttgcaacaaactactcgccctacatacagggattttcttgttgaactcttcaatgcttgtaacatctccacaaccgccagaaaggaatatagtgaagtctctggaggacaagatggtgaactgatttccagactcttgagttttgggcattgcaaagataaggaaatagctgctaagacagtcaaaacaatcaagttagtttctgaaccctgtgctttctaacattgctcaccacatttaacctcttctagaaactgccatgaagatcacagctgtgtttacatctaatattatgcaataaatctctttgtgcaagtagtattttaggaacatattagaaataagcagtattattgttgaaattctttgttataagtcttccagaaaaaaggaattatttgttatctatactactataaaagacactagtggtgccaccaccactacttttgtactttttgcaaactagtcccttatattttctaatattatataattgtctaatatttgtttcaatcaagtgaatatcatgtattcaaataagcaaacatctctatgacatattattatatattttcttttacccatagcaaagcatggatattttgctggtaatttagaagtgacaatacatcatctcttggctaggttcttgggattatatgaggagacacagattccagagaactgttcaagtgcatttgatgtgatttgccagcgaatggagcagagaatggcttatatccacaatgagcaggtgaggattgatcatatcagcagtcctccttcgatctcatgtattttatataacagtacagaaaatttcatgaaattatcaaagtatactcttttttccacaatacaaaagtgaacttgagagactgagagagctgattttttttttacattgaacgggcaaggtctcagaatatattcactcttttattgtggactttaactaaaagaaacttgaaagagagctgaactttacatacaagtgcatttgttcctttttttattgctcacatggagtattatctctagtagattgctagcccagtgatctatccgaatttctgtttcagattgtgctttaccaccataattcacaagcttcttttccatcaaacttctaaggataaccattactgacacgctaaatgcttttgctttggtgatgtaattcaggatatggtactgctgcaccatgaggtggaggtggaataccctgatggccgaccaaccgaaaagcaccaagcaaccctacttgagtttggaaaggttgaaaatggcaggcctaccactgccatggctctcacggtcggaataccagcagcaataggagctctggtaagtagctctcttgaaccacattacacttgtcatacgcatacctgatcaaagaggaaacttgtactcattatactcgttttcatgtttcagctgttgctccagaacaagatccaaaagaaaggagtgatcaggcctctggaacctgaaatttacattccaggtaagtgcaaatcaaatcagacaccacttgttgcttatggttatcgaacccagcaacggcggtgggttgctgatacgtgcgtttgattttgtgaagcgttggagatcttggagtcatcgggtatcaagctggcggagagagtggagacctgagaatcggacccaatatgtataatgtagcatggtggtagcttctctatatatatgcttcagtgaataattgatttgccgttgtgtggtaattaagcaatgcccgctaataaattgtaccgtagaagtccttctatgtacatccgtatcaaaaaataaaaaaagcatcgattagcttgaataaaaaggtgagctagctcgttggagattaatcaggccgtcgctgttggcagcagaaagtttttagaacttaattacataaagatgatacaattaaaccgagtcactctcggcctctgcataaaatacacacagccagaaaaagaagaaagaaacaactagaacatctcccaagtacaacatctcccaagcacaaaagtttgacagaaacatatatcttagtggctatcaattcatagactagaccgtcacccagtcagaaaaagaagaaagaaacaactagaacatctcctaagcacaacatctcccaggcacaaaagtttgacagaaacatatatcttagtggctatcaatccatagactagaccgccacccatgctcctgggtaaaaaaaacttctgtgccacctggtccaaacatcgagataccaccgtaatagtatcccgcagtcccgattggtggaggatagcccaggtatgtagccaccgggtaactaaggtaataacctgcaaaggagaagacaccatcttgttatcaaaaattactccattcctgctcaaccaaatggaccaacacagagttgttgtacccatcaaaagcagattcatcatttctttggagacacatgatagccaactcccaaacatatgaccaacattgcgaggaggtttcagattagaagccaaatgaattacagaccacaccaagcgagataagcggcactgaaagaataaatgttggatagtttcatccttgtgacagaaacaacatatcttgctgcctttccaatttctcttagcaaggttgtccttggtgagaattacgccccgacgtaaataccaaaggaagattttaacttttaggggtactttcaccttccaaatccgttcttaatattcggaccccggtatgtgttagagctagataatgagatttgactgagaagaccccattcggggtgaggttccattgaaactcatcttgctcctataccagaaccaaatcagctatgcgaggcaataagttatgccaagcagctagttttgcaccaattaaatcccgtcgccatgaaaagcacggaggattggtttggaaaatctgtgcgatagtcgactgtttatgcctaactatgttatagagacaaggatactgttctcttaacgaggcattacccaaccatttgtcttcccagaacctaacttgggagccgtccctaatcttgaaggatccaaaacggataaagtcctatttgacctttataagactagcccaaaaatgtgaatcccccgctttccaataggcttgagataaaggttgtgatcccaaatatttattgcgtggtagttgttgccatattccatcggtggtaagtagtttgtataaccacttactaattaacgctttattctttatctcgaggtcatgaattcctagccccccttgttctttgggacgacaaataatgtcccacttagcaagccggtatttcttcttatgtccatccccttgctaataaaacctagatcgaaggtagtcaagttttttaagtaccccactaggaattgcaaggaatgacatcatatacattaggaaactgctaagtactgagttaatcaaagtaagtcgtcttcccaacgaaagaagttttcctttccagctactcaatttctgctcagaacatgaagtcagtgcttctagctttcgaacagttgtcgggtcttaagatcaattttcataaaagtgaactgtattgttttggtgaagcacttgattatggtgatcaatacaaccagctctttggctgccaggtcggcaacttcccattccgttatctgggcattccgatccattattggcagcagaaagtacgcaattgtgttttgagtgtatgcatgtgacttagatagttgcataaatattttataaaattagataaaaatagattatgatgatataaaaaatacaaatctaaattcgatctacgaataaaactgataacatactggagactgactatcaatggcaggtgaggcaattgatttcattttttttaaccaaataagcaagggatgttggaacaacaagcccggccagatcaacttgcacctatggttgcgagaagacgatgttttcacttgtgttgcccaccaacgcgaggctctcctcaaacaaacccaaagtagagacttcgttattgctgtaatcgtgatattcgccgacggcttcgtcctccggcgagaagataatctccagggtcccgacgctagggtcgaagaccaacacatggcctgtacctgtggcaaacatgatctttttcttcttcttttcttcgttgttgccatcactaaacatatgaatcggggcgatccaataccaccttagacacgaatggtcaggcggcaacacgctcacccattcgatggaacacagcttctcccagcttccagctgcagcttctctcgtcacccatatttcgcacgtaggactctccggctcctcgtccacgagctgcaactttacgtctgtgaaagtatacacacacagacagccatccaactctgtcagctcaaagtcgtcgcgagattgcagctcaggaggaggcttcaacgacgacacgccgaaagattcgtcggtcacgttgaatgtgacgatgtcgccgtctcctcggaggaagtgcaggtcgccgccgttgcagagcgcggctcctcgtcgccaattctctcgcgggtaatgccaatgccgcggcggcggcgtcgtggacgcggcggcgggcggcctccagctgctcgacggcgacggctcgtcgccgtcgagagccaagacctcccagacgacggtcgccggcgagcagcagcggcaacccaccacgcgcaccaccttgtgccgccgcgtggccgagcagtagcccaagccgtaggtcgccggcggcggcgtgttgtccgtgcccgggagacgcaggatgtggcgggtggaagggttccagaggtagtgcgtgtggtggccggtgatcttgaggaggacgaggccatggcaggacttgctggcgagcggaaagatcgtgccatgtggcagatgtctagcggtcatgatctcctctaccgggggcctggggatcagatgctgccactgccattgccaggcgaagaaaggttgtcgaggaccgaacggcggcctgatgaacagccgtggtgggtgtttgttccgctgctttcgctggaggaaatgggcttcctggaacaggtgtgacgaggtgatggtggcgtggaaccgccgcgagacgcatcggaatcggaggagcgatttgacgggcaggtgggagaggatctcgtcgacgatgtcgtcgggcagtggacaagggcaagcccccgagaaacgcttcatcctcttggcgctcctcgtgccatccatgtcttcctccctccttgcctccttggttggttaatgattactcaactcactcctgtttgttttgtttgatcgattctggtgaagtgtacagcagatccaggagatcggtgccctccagttaaatgagtacccaaggagcaaggatgagtccgaatttgaatgggacacgcaacaaaactctagtccgagccggagtcagttcgcacgggcacggtattccttcgattaattggcaatcgccgatcagcgatcactatcagccagctttgccgtttttagggaatatcctccccgtcggttgctcgggagaggtatagatggtcatctgggccgcccggcacggcatggcccaagcctagccgtgcctaggctgaggtttgtcgggctggcacggcccgggccgtgccgtgccagctcacaggcagcatacacagcccaggcacggcccaatactactcgggccatgccaggctggcccgaagacacgaaggcctattgtgcttgctcgtagaaaaagtatatttttggttcctcaactctgcggctgtgtttgaatggctggaaaataagtctattttgtatgcctcttgtcttgggccttgccttatacgattatataagtctattttgcgtccctatatttttttatttgatcgggccgtgctaggccagcccaccatgccgagggtgtagcccagacatggcgtggctgtcaggccaggccggcacgagcacgaccccagtcgggccttgccatgcttgcatcgggccaaaattgcgagcttcgggccaggccgtgggccttgggccatatggccatctatagggggagggagaaaaaatcgagcgctccctccccccacgacgcacgcccccttggccccacccacgtgtccctgcctccacctgccaagtgtctccaccacatactccattgaaacaaatcacccacatattttggaacgggattgctatatgtcattcgaatgaaatttggggaagaaatcttacagattttgaaccattggatccatgccaaggttcgtgcatcggcttctctccttcaactccggcgggctccccttcttctccggcgccggcgacaccccaactctgacgggttagggtttggggttgggatgagggtaggaggggggttgggtgagggggaagagggggctttcctcggggtttagagggatggccgtgggcgacggaggaccgatggtgggcggtggactccggcgggcggcaaggcggcggcggcaccgccgaagccacggggatgaaggagggcggtcggccggcgtcagcggtgggggcaaagcaagcatgagattaggaggcggcggccggtggtggcggatccggcggcggggagccgccggagacggggaagacggcagggcgggggcacctccccgtcgccacctcgaggaaaggagggaaggaggagagggggttgggggaggggg

SEQ ID NO: 8449 - DNA, 10127 bp, Oryza sativa
cctcagacagtccaattagagggtgtttgcaattagagggttgcaaacaccctctaattggatgcctgaccaaagcgaccggtaaaagagttctcacagcaacaagttggcatttttgtgagagggactaaagtttagctccactttagtccctccaaccaaacaccaccttactccccggtcccggatcacgattccaaaccctaacgcacgcttcctcttttgattatgcttgttcggctgttgctgatgctgattctaaattttaaaggtttaattttacatagatttctttgcttgcctccttaacagtaattaaaatagagctatatgtagtgaaagcgatgaacgctgagattataaacttgaagctgaacactgagactactagatgtctagatccccctccccctttgacaagttccatgctggagtattcttttcaacttattgacatgtgtgtaactgtcaacttgattaagatacagatttttttcctcgacttttattagcacatttttcaaactgctaaataaatgtatttagtgcagaaacttcctatgtagaaattgttttaaaatataagataaacctatttagtttataataattacaacttaattaatctcacattaagggctttcttattttacgtattatcacttaatttttatcttcattacattcaaacgggacctctgtgccatggttctcgaattacaattctttaagaacttgaagcactttctatatcaccatttattagacagcttgttcgaaacttttttataacatgctgacggagcttggggctcctcaccgggagaccgcgcaggcccccctttgccggttcggccgggggcgctaagtgaggttcttcgccctcgatctgaggaacgtccgcgagagagggagtgcacaagacacgggcgacgtagacaggttcgggccgctgagaagcgtaacaccctactcctgtgttttggtggatctgtgtgtgaaggaatacagagagccggagagcgagagatagttcaggctctagaatcccctcgccagagtcccaacccccctcttcctaggcctgggcctcctttttatctggtcaggggtcaccacatggggctctagctgcctaagaagggaaacatgctttttacaaagagggctagtctacagccggaagtgacctttgacaagcagagcacacgcctcctgccccgctcgcccgcttttccggtggacgcccatttcaaccttcatttaatggccagcgacttccttgccatacttgcgctgaagcctggaatggatctgaccgggactgacataccaactccaggagttagcacgccggctccggctagggacgagagccaggtagctctcatcattccgacgggacggggcgaggcgtgtgacaggccgcctgttgccacctaacccgcgatctgaccggtctgtgaccggtcacacaccgcgaccggtcacggaccggataagcgctcgctgcgccgcattaaatgcggcgtggcgcgctcgtccaacctgctataaatgcggttaggtgagcccgctgtgcttacctaacccacacacgtggcgccaaaaccacagggggtcggggcgccccagccctcggggccgaaacgggagcggcccgacccctcggggagacagagggaggggtggccacgtcaccctcaggcccgacccccccgagggggtcaggccacgtgggtgaccgcggctacccaagcctctagtcacgatacccccggccccatgtcaccgacagtagcccccggcgttacgccagggcgatcgcccccctcgagggaagcgctcgggcgtgacgccactccttaggcccggtgacaggtggggccggtccctacaggcgggcagaaacccagcggtcgcaaatcgcgcgcatcggcaagggaaaaccgaccgacgataatgagcggcctctttaagaccgctacattactcgagcagcgcgcgaatcgggacgagccggttcgtttcgcctggggacatgatgatggcgcttttcacggttggcgggcgtagttaatgcgcgcacgatctgccccatctcaaccgccacggccgcacatttgccacgtgcgccgcaaacgggcgagtgggtttagtggaggcgtgtgcgcgagaaacgagggggcgaggtagtgggcgcgggaagcgaggagccgggcatagcgttggcaagggtgtaaagacgccgaggaagggatttgtttctttcctctcgccactcttccccttgccttcgccacttgtgccctaactcttcgtttcctgtgccctacccttgccgcactcgctcgctctcaagctcctcctccgccgacgtcatggcacggggctccgcaccgctcgacggtagcgtgctgccgccttcccgcatcgtgagcgagaggcaggccgggctgccgcgccgattcatgccggaatctgccaccggccgggaggtggtcgcgttgggcgagggacgcccggcgccacagtacccggggcggtccgtcttcttcctctttttcgcaatggcggggctggtcccgccattctctatttttttcatggatattctggagttttatgatctccagatggcgcacctcacccccaccgcgataatgacgttggccatcttcgcacacctgtgcgagatgtttattggggtgcgcctatctctccggttgttccggtggttcttcaccgtacagccggtgtcgccgccgacggtagtcggtggctgctacttccagccgcgggggcaggtgctgaaccgctacattccctgcgtcctccacaaaaagtgggacgactggaagagcgattggttctacacccccctcgccgacgaagcgcgcctccgacttccgagccagcccccggcgcaggcctccagctggcgggcggtggtagatctgggagacggctacgacgccattcttgaccgcctggcgggtctgtgatccctggggctcacgggggccatggtgctcggcgactaccttcgtcgccggatcgcgccgctccagcggcgcgcccggggcgcctgggagtacaccgggcccgaggactacatgaggacccaccaggggtgcaaatgggactgggaccctgaggacttcaggatggtggtccaacgggtgctgaatctcagctccgtggaggcatccctcatcccccaaggggtcctccccctctgctgcgatccagagcgcgccaagatcctgaccatcatgcaggtggtcggggcgtcgggggagcgggccccccggggccacgatggcgcgggcgggagccgcaggggggaacaatctaccccgggagggggtcgtgcttttgggccccgcgacgggggcccggggagcagccgccctgccgacgcccgggggaagaggaagcaggagggaacccctcccccatctcctccccgagggggcggggcggtgcgtgctagcagcaggcgcccggagggtgccgtgccgatgccgcagcccgagggggagcgaaagaagaaacggctccccaagatgggggggatcgcgccatgacgggggaacctcatctcgcccccgaggtggtcgtttagccgaccttcccgcaggttcgtccccgcgcccaccgcggccgtattcattctcccatctcccaaggcgagttttcactcacccgcttctttttgtcttctggtttttcttctgcctcagcgagatcccgtcgcccccccccccccccccccgccattccaagtccggccggtctgaggccgaggagacggcgaccgcggaggtccgaaggcgggaagctgaccggcgagaagccgcggaccgcctccgggaagccgaggaggctgcccaggaggccgtccgtgttcgccaggctgaggaggccgctcgggaggaggccagactccgctgggccgtggagtccgtccgggaggcagaggcggcgcgcgcacgccaggcggcctgccaaacccccgacccgactccgcccgaggcgacgccgacttccgaggccacccacgacgaggccgcgggcgcgccactcgggcccgacccctcgggcgacgtttgggacgagccagcttcgggagacgcccccgagtccggcacgtcgatcggcgggccgagccgcgcggcacccacaccgaggcggctctcccctctgccttccgctgccccactgagcgcggagcccctcctgcaggccttggccgccgcgaacagcacagtgctggacgggttaagtgcccagatggaggccctgtaggcggagcaggcggagctcgacgcggcgtgggcgcgcgtcgaggaggggcggcgctcggtggaggccatggtggaggcgggccgcaaggcacaccgccggcacgcctcacagatcgaggcccgtcgtagggacctggcggagatcgccagggaggtggaggaggagcgggagactgccctcatcgccaccgccgtgctcgacgaggcgcgggacgacctccgcctccaatacgggagccaggcggcggagctagaggagaagctcgacgccgccgctgcccgagaacggcgggcggcggagaacgaggcggcgtcccggcagcgcgaagaggcccttgaggctcgcgccacggcgctggaggagcgcgcccgcgccctggacgcgaaggagagagacctggcggaccgcgaggccgccgtcgccacccgggaggcaacactggcggcgcacgaggccgcctgcgccgaaaaggagtccgcactccgcctccgcgaggacgcgctcaccgagcgggggcgagctctcgaggaggccgaggccgcggcgcagcggctggcggacagcctgttcctccgcgaggcagcgcgggaggagcaggcgcgccgcaatctggaaggcgcccacgccgagagggccgcactggatcagcgggccgctgagctcgaggcgcgggcgaaggagctagacgcgagggcgcacagtggcggggcggccgcgggccacggcgacctagccgcccgcctcgcagccgccgaacacaccatcgccgagctgcagggcgcgctggactcgtccgccggggaggtcgaggccctcctcttggcgagcgaagtagggcccggcatgcttcgggacgccgtctcccgtctagaccgtgccgggtggcaggcgggcctctggggcgggcggtacgcgaagtacgccgccaaccaggagggcctcgcctagcgcctctcagagatggccggggccctccagcggctcctcgaggagctcgaggagacgatcaagtcatcctcgagggacctcgcccgggggggggggggcggtggagctcgtactggcgagctaccaggccagggaccctgacttctccccgtgggcagcgctggaagagttccctcccggaaccgaggatggcgcgcgcgcgcaggtccgggacgccgccgaccacatcgtccacagcttcaagggtacggcccctcggctcgcgttcgcgctcgactccgacgaggagggcggtgacgatggtgcggacgacagcgacgacgaggccgacgacccgggcgcgtcggagtgagcccccaggcccccgccaatcttaataacttttgcttcttcttccgaggccttcgggccccctccttgtatagactgatttgatctgtaatcaagtaaagaggaaatttctgcgtcagttctgtttgttgtgtgtatgagacgaggatggtctgtgccgcggtccttctatgtcttggcttgaacaagggctcgtgcccaggtcccagcctcaaacggcgcgggtcggggctagtgcctggggagatcctcgtgtcgagactggccaggccgggagcgcggtgaccgagggttatggatgacccgattgtgggcctttgccgattccccccggagttcaccatgccccggggcacggctcggttatgggccccgtttggcgattttagccgacccgggccaccgagggcagggtcgagcacgagcgtgctaattcaagccaagattcttcaaaaggaaacgatggcacagacacagtcctcaggaaatcgaaaatgcttttattgaaatacggaagagaaaaaaggtgagtatatgcatgtggtagcccccggccaaccctgcacgcccgggggggtgcggggttggcccgagcctgagacatgacacccgacccccactaggggtagaagcgatgaaggtgttcgatgttccacgggttaggcagctctgtgccgtcgcccgtggccagccgaacggagcccggccgggggacgccgatcactcgatacggaccctcccacattggtgagagcttgctcagtccagcacgcgtttggacccggcgtaggacgaggtcgtcgacgcagagtgatcgggcccggacgtggcgctgatggtagcgccgcaggctctgctggtagcgcgcggctcggagggccgcgcgccgccttcgctcttccaaatagtcgaggtcgtctcggcgaagctgatcttgatcagcctcgcaatacatggtgacccgaggggacctcagggtgagctcagatgggaggaccgcctccgcgccgtagacgaggaagaaaggcgtttccccggttgctcggcttggcgtggttcggttcgcccagagcaccgctggcagctcctcgatccacgagtcgccgtgcttcttgaggatgttgaaggtcttggttttgaggcccttgaggatttccgcgttggcgcgctccacttggccattgcttctggggtgggcgggggaggcgaagcagagcttgatgcccatgtcttcgcagtagtcaccgaagagctcactagtgaactgggtgccgttatccgtaatgatacggttaggcaccccaaaccgagcagtgatgcctctgatgaatttaagcgcggagtgcttatcgatcttgatgaccggataagcctcgggccacttagtgaacttgtcgacagcgacatacagatactcgaacccgcccggggcccgcctgaacggacccaggatatcgagcccccagacagcaaacggccacgaaagaggtatggtctgcagggcctgggccggctgatgggtttgcctggcgtggaactggcacgccctgcaccgccggaccaggtcgaccgcgtcgttaagagccgtcagccaatagaaaccctgacgaaaggccttgccaaccaaggtgcgtgaggcggagtaggctccgcactcgccttcatggacatcggcgagaagctcgacgccttgttcccgaggaatgcacttcaggaggactccgtcagccgcgcgccgatagagggtcccttccaccagcacgtagcgcttggagatgcgccggacgcgttcactcccttcgcggtcctcgggtagagtcttatctgcgaggtacgcctagatctcagtgatccaagcaatcaatctaggggagctgggagcgctcccctcgggtcccgaggcctggactccgacgggcctcgggggccgttcaggcgcgtccgtcccccctagggggtcgggtcgcgccgacggctgggcaagcctttcttcaaaggcgcccggtggggtctgggctcgcgaggaagcgagccttgagagttcgtcggcgaccgcgttatcccgtctgggcacgtgccgaagctctatcccgtcgaaatggcgctccatacgccgcacctggcgcacgtaagcgtccatctgcgggtcagagcactggtactccttacagacctggttaatgactaactgggagtcgcctaacaccaggaggcggcggatccccagtccagctgccactctgagtcccgcaaggagtccctcgtactctgccatattgttggtcgcccgaaaatcgaggcggaccaggtatctgaggacgtctccgctcggcgaggtcaacgtgacccccgcaccggcgccctgaagagacagggagccgtcgaactgcatcacccagtagacggtgtgaggccgctgcgaggggcccgaactagcctcgggggcggagacgggctcgggagctggggtccactccgccacaaagtcagcgagggcctggctcttgatcgcgtggcgtggttcaaagcgcaaatcgaattcagagagttcgattgcccatctcaccacccgtccagtaccctctcggttatgcaagatttggccgagggggtaagacgtaaccaccgtgacccgatgcgcctggaaataatggcgcaacttcctcgaagccatcagaatagcgtaaagcatcttctgggcctgagggtatcgggtcttggcgtcccggagggcctcgctaacgaagtagacgggccgctgcacctttcggcggggccgatcctcttcgccaggggccgcatctctagggcgctcttcgtccgagaggccacgcggggcgcactcggcttttgtgccgacgacctcggggtcagagggtgacaggcgcggccttcccgcagtggccccgaggccattctgggggtcgggggcacctggcaccgtcggacaagcaggcggagggccagctccggccgtcgggggcctcgggccgccgttcggttcgggggcctctcctccctgctctctcccgggtcgagtcgacacagggtggggacgcgcggagtgagggttgtcctcgtcgcgctccacgaccaacgccgcgctgaccacctgcggggttgccgccaggtagagtagcaacggctcatctggctccggggcgaccaggactgggggagaactgaggtacgctttcaactgagtgaagacccgctcagcctcctccgtccaggtaaacggcccggagcgtttgaggagcttaaataggggtagcgccttctctcccagcctcgatatgaaccgacttagggcggccacgcagccggtgacgcactgcacatccctaagcttgctgggggggcgcatccgctctatagctcgtatcttctcggggttggcctcgatgccgcgggggaaaggatgttgagggctgcacccccgtctatgaggacacgccccaacctcacattgcaaacggtgggggaaaccaccatcgcgatctgtcctccccgggcaacgcacggcgggtggtcggtctggtcgaaggtgagggcaacctccgaccaccgcgcccgccgcgtcgcctcatgggtaggggccgcggccagaagctctcgcttcatggccttgaggctccggcgagaagcgtgagcgcacgctcccccatcgacggtggcgacggtggcctcaggctcctggaaccccaggtcatcgtcgccatcgtcgatgtcctcagcggtggccttctgcttggcctcacctcgccggttgccggcgggagccgccggggtcttgccctcacggcgctcctgcctcttctcctcctcccacttcctcgtccgctcagccaaacttttgaccgcgcggcagtccgcgaggtcatggagggcggtgttgtgcacggtacaccacttgccagtcgggcgctccctgccgggagcgccggcctccttctttttgtcgctcgcaggcctcccctttcggggggcccgcgaagcgccctcgacggcgaggacatgaccctcgtcgtcggaacgggccgaccccttcttcctcctcctgtcccgacgtcctgaccgagcggcggacccgggggcggccggagctgccacaccagaaccggaggagttccaggtccaggcctcctccttgcgagccacacggtccgcgagctcaaaaagctgcgcggtggtctggggctccttggaggcgatcttctcgagcatgcggttgtgccgcacgcccccctgaacgcgtagatcaccgcgtgtgcggggatgcacggtatggtgttgcggacttgacagaaccgctgaatgtacaagcgaagagactcatcgtcccttcgctgtaccgcatgcaagtccgcttcttcgcctgggcacagatatgtgccctggaagttcgtggtgaactgctggcacaaatcctcccaagagtggaccgacgcgggtggcaagttcattagccaaccccgcgcctgacccttcagggtcatggggaagaaattcgccat

SEQ ID NO: 8450 - DNA, 17303 bp, Oryza sativa
ttcctgcagccctttatgacttctgtaagctcctaaatatccaacaacctacatgatcgtctgtcattcctgtatcgtttgctaggctctcaatatattgaagaaaattcctgaagaaacgaagaggaaactagctgctcgtggttacattgctcaatctggatatgtgatgaaatacctccccgtgccaccaaattgtttatacattccagaatttacagatgggcagagcatcatgtcctatgtgagttcttcctcacgtttgttcttcataattttcctgactggttcaattctatgtcatggcttattatacttgcttctcatatcaggacatatcaatatctctgctgaagaaggtgcttcagaaaatagagcagataaaaaagtcaagagctggatccccaaactttgaatcacatgaagttgaatcatgtgatctacagctctctattgcccagtacatacatctaaggggcactacaagggtatgttgcatgatcttaatgtgatagtttatttaccatatttacatgagagcatgttcaggagagtcctgtctcagctagagaattgctccagagagtagctcatctgctcacacacaaattggtcacttgttttgtaatcgtaattgtcaccaagccatgaattaggatcgactagttgtcaactgcatttgcacaggctgtcgacttaagctcatttttacaacaatttcaatactccttatagtaaccaaactaaaaatatgaatttacatttgacttcatattaatataattataatgactgagcacatgcatacaagggattttgattcataaatctctcagaagatagcaacaaatgaccaagcatatccatatgggttgggttgatcttgtgtcgggttgatcctgtgcatgagtatacactgtggatggttatcattgaggatgaacggtctgctattgtgcgtctatgtgcaccctttattagagaaaacagccatgcaaaccatgcatgcattgtcagtgaattcataatttcatattgcataggacgtccgtcatgatcatagacacactaagcaaaactgctcatttccctacattaactatattatcgaactcccttatagctattaaacccgaaactacaacatttctatagtagttggacctgaaaaggttcatgaaattcatcaactattagttcatgttaaagctttcttccataggtttatgttttacaaccgttctctcccagtagttgtgtgcaatcacttatttagtcttgtttcttttgtcccacggtaatgttgtcttgcagggtcctcaagacaacaccaagagatttgcaatcagtactgatccttctgcgttatcaacaaaacaatggctggagaagatgagaacattatttatcagcaaagggtcagggttttcatcacgcagtgtacttactggagatccatatattggagtagatgtgattggactgccttctgaagtggcaaaaagaatcactttcgaagagcaggtaacagacatcaaccttaacaggttgcaagagattgtggataagggattgtgtttgacctacagagatggccaggcaacctatgccatcaccgttggatccaaaggtcacactaccctgaaagtcggacagactatcagtaggagaattgttgatggggatgttgttttccttaaccgtccacccagtacccacaagcattccctccaggcatttcgcgtgtatgtccatgaagaccatacggtcaagatcaatccgctcatatgcgcaccttttgcagcggactttgacggtgattgtgtgcacatctattatccacagtcccttgctgcaaaagctgaagcactggagcttttcagtgtggagaagcagcttaccagttcgcacagtggcaaggtcaatctccagctagttagtgacagtttgcttgctctgaagcatatgtcttccagaacaatgttgagcaaagaagcagctaaccagctggcaatgcttgttacatgttctcttccagatcctgctgtgatcaagtcaaagccgtactggacaatctcgcaaatagtgcaaggtgctctgccaaaagccttaacttctcaaggggacaaacacgtagtcagggacagcactattataaaactggatcttgacaaagaatctgttcagacatcattctcagatttagtgtattccactctttctgttaagggtccaggagaagcactacaatttttgaatgtgctgcagccattattgatggaattgattcttttggatggctttagtgtaagcctccaggacttcaatgttcccaaggttctattggaagaagcacagaagaacattgaaaaacagtctcttatccttgaacaatcaagatttgcagaaaatcaggttgttgaaatgcgtgttgataataatttgaaggacatcaaacagcaaatttcagattttgttgtgaaacgctctcatcttggacttctgattgatccaaagagtgactcttcagtgtctaaagttgtccagcagcttggttttgtgggtttacaactttaccgtgaggggaagttctactcacgtcgtctggtggaggattgctactacacttttgtgaacaagcacccagctgtcagagaagaacattctccagaggcatatggtcttgtacggagttcatattttcatggccttaatccgtatgaggagctggtgcatgctatttcgacaagagaagctattgttcgctcctctagggggttgacggagcctggaacactatttaagaatctaatggcgttactgcgggatgtcgtcatatgctatgatgggacagtaagaaatgtctgcagcaagtctatcatacaacttaactacacggaggatgatgccttggacttccctagtgcaataggtcctggcgaaccagttggtgtcttggctgcgactgctatctccaaccctgcatacaaggctgtcttggatgcatctcagagtaacaatacttcatgggagcggatgaaggtaataacattaaattattttatgcattggtaaaaggtaatattgtatgcatgcatgataagtttggtatattcctttaacctaacaggaaatacttcagacaacaagtcgctacaaaaacgatatgaaagaccgaaaagttatcctatttctgaatgatgctcttgtgccaagaagttttgcaaggaaaaggctgctattgcagttcagggctgcctaaggagaattacgttagaagattgtgctactgacatctgcattgagtaagtatccataattaatgctgtcaattatattggtatataaattaatgctgtcaattactggggtatgtagttatattcgcttgctttgcttttagtgaaatcaatgaaggactttatttcttttgtggttgttttattgtagttccctggatttcttataccaaagtctaaaactcaagtttccttttcctttttggtccttcagaatactttccatttttgaaatgtgaaagttttgcggatatagaatgtagatagttggcaaatgttcaatatctgtccaatgaactgaaaattatgtggatctagaaagtaacttagtgttaacttatctgtttgcacaaacagtgtgtttgactgggttaggtcttatcatatttagggatggaaactgggctgcacccgctgggtttcagcaccccgtaccacccccgcaatgcaagatattgcccgtccccatccccatccccgcacacgggtcagtcaagtttccccctgtccccatccctgcaccaggtatgggtcacccggtgggtccccacactcggtaacaggaacaagagagtagcaagctacaagccagcaacatgacagcacaacagcaacaaagccaggaacgaaccaacaaaactagttagccaaacacaaatgcctgaacaaccaaacatcaaacagatcatatccaactatccatacttaaacaccaacagcgtcaaagtatgaggtcatagattggcagtggcagcggcgcgttagtcgcgacagtgacgtggtgtgtccttgaagcttcacagtggcgcagcctagaggttgcccttctggttgcccaggtggcttcgtgcagtcgctctcgctccttctggttgccctgccgattggatctgagagagtggaggggaggagtggaaggaagagtggatgtggactgtgctaaggtttcagtactttatatatgcacctctgatttgggccttctaaatgcttttttttttttactttttgggctgtggtcttaaagggatttgcaccttcctgattgacttggggccccatggggattcgggggccgggggcctgcagaacgtccccgctcccagcccacccgatgggtgaacaatttggcctaaaacagccccatggagggtgatttcctcccatttacagcccataatagagttattccccgccggttatcatgtccgggtccccattgccatccctaatagattcatattttatctgtttaatgctgagaacccggtatctcttttccatggatctgcacatcagtgttcattgtccactaactagtcatggacttggttcattgatgttaaacttcaatcatttatatactcttgaaattgtccatcattatgcaactggaactgccataaaacaacttagaaattggtcacgacagtacccagataaatgcaagttttgatcattctcaaaaatggaaattgagataaaagtctccttgtcgcatattgttggcttttagtattcattatcatttgagcagaacaccttaaatataacattcacgttgtcaggtaccagaagcaaataggtttagatggaacttcagaagcagccccagcacttgttggccatattcatcttgacagggtattatgatatattcttatgttggtgaatacttgcatgcaaacagttgtttttattatgccctgataatatatgtacatctttctttcaggcacatttagaaaggatcaacattagcactgaagatattcttcagaaatgccaagaagtttctgggaaatatgggaagaagaaaggacatctcagtaacctgtttaaaaatattacattctctacttggtaactatctattctctactatattgcttgagatctcacgtttgaagaataaattgcacgcactgctgttttgtttatgtggttgtgtcctgccattagttgctatggttgttggcggttttatagttttggtagaagagggttgtcatcttgtagattgctagggttattcaagtgctgcattgctctttaatcagatgttcaatatctaatatttcaacatcatgatgatgtgaaatcctacttatgatatgtgattgtcgctcgctgtatcaaatgataagttagttaacctcaactacaaccatatgctgtacctggcttgcaagtttcatctccattgaagtagtagaaatgagccataagaaagaggtaaggggatctttatttgcttcctagttccaagattgttcagttttgattttctttttcatgttgtttatagcaaagtattggtagcttggcatagcaatggagccatcgtctaggcagagaatattgatgcattgtttatttcaaatcacaattcctggcaatattctacttaagttcattttcagttaatcatttttagcattaattattatctgtttactgtgagacgatattatattatttaatcgtactcaagttttcacccttactcttggcagcgattgtttattcacacagaagctggttgatggaaagctacctaagcttccgtgtttgcaattctttgtttctgataacatgatagtatctgaatcagtggagagagcagtcagtgtgttagctgattctctatgtggagtgcttttgaatacaatcataaaaggtactgtaagttgtacataatatgcttctgttggaatttcattttcaatacaatttattatttaggttcagttgaaaatcctttattcacatcttgccatgttttttaaggggtggggggggggggtccaaaaagccaaagaattatgattgatccatttttagcccttaaaaaacaattatcttccttcacgctcatgtctttcataatacttttctttttttcccccaaaaaagttaccactattttcagaaccataactgttattgtgttgcaaacctagttcatgatggggtaaaccattcattggaggggttcaaacaatgatggcttgtggttgaatggcactaggtggagtgcactgactgagggatggatttagagtagctggttaagggaaagatcatctgattgtatagagagatgtggctctgtttgaggcaataggatgtcatggcctggcataactaaaggataacctgctaacaaaggatgggactataatgaacaaattggtaccctttagtgctaaagctgctgcctgctggctccacagctgtaacagattaagacattctctgttaatgtttggtagttaactgattctattggttaaattattgttataaaattaatgttctcctgtcctgtcacaaaaaaaaaagtgttgatgtgttaaccaaataagggtagtacttttagctcaacaatttccttgaattgagaatgttgctctgcaggtgatcctcgaattcaagaggctaaaattgtttgggttggatcggatgcaacatcttgggttaaaaacacacagaaggcatcaaagggtgagccagcagtagaaattattgttgaagaagaggaagctttacatattggtgatgcctggagaacaacaatggatgcctgcataccggttctgaacctcattgatatacggagatcaatcccttatggtattcaacaagtgcgagaacttcttggcatctcatgtgcttttgatcaagttgtgcaggtttgtcaccttaccctttttgtttgtaagtttgggaggtatttcatttcaaatctgctgtttgcaggtcacgctgcagatctttccaatctttttaatggattatttgaccacttgcatttacaagaacttactaaggaaaatttataaatatatgaacttagtatttcatgatagctctatggctacctctgcttcacaaactactgtgtttccgtggaaatagctgtttgacaatgttgatctaggtgtgttggggaactatctatggtttacgcgtgaatgcgataattgcatttttttttccatgtctgaccaagattttaatgttaatagagaatgttgactggtggaacattcggttttgtttttaatgggcaagtttggtccatttcaattgagttgtatttgatttctacgatgaactcttttgtacatcatgtttgtgcttatggatttgtccaatgcattttataaatttttatcttgcatctcatttcaatagattattttatatgtgctgaattgtgcagcggctttcaacaactgtaaggatggtcgctaaagatgttctcaaagatcatctggtacttgtggcaaatagcatgacatttactggaaacctgaatggatttaacaatgctggttacaaggccaccttccgttccttaaaagttcaagtacctttcacagagtccacattgattgtaagcttatctctgagatcaattggtttgttttttatcatcacatacattttattgatttggcccttttattttgtagacccctatgaaatgctttgagaaggctgcagagaaatgtcattcggattcattgggatgtgttgtttcatcatgttcttggggcaagcatgctgcaagtggtactggatcatcttttcagattctgtggaatgaaagtcaggtaagctggttttttctgcccactggagcttattgattatataagaagtggggcttcactctatttaattggggctaatctgcttaaagatctttgcacggtgtgaccaatcaaatgaattagcgttttagtgaaaaagtagctctgcttattgttgtaattgatttttttcagctgaaaagcaataaggagtatggtgatggcctgtatgattacttggcattggtgcgtactgacgaggaaaaggcaagatacacattctttgatgatgtggactaccttgcagaagagaacgaggcagatgtgtgcttatctcctgaattggatgggaccattggtcaaccgatcttcgatgataatttggaagagcaagatgttcagaataacagctcgtgggataatggcacaacaacaaatgcaagctgggaacagaatggtagtgctggaaatgattctgataaatggggaggttggaatgatgcagctgcaggagctgacacgggagtcacaaaaccagcaaaccaagggaattcgtgttgggatgtgcctgcgacagtggaaaagagttcctctgattggggaggctggggcactgaaaaggcgaaggagaaggagaaaatatctgaagagccagctcaacatgatgcttggtctgtccagggccctaaaagggcaacagatggaggagccagctggaagaagcagtctagcactcagaatgatgggaactcctggaaagagaacaagggaagaggatcaaatggaggttcctgggagaaagataatgcgcaaaagggatcatggggcaggggcaatgatgaagctgaaaataataatgatgtgcaaaacaaatcttgggagactgtggctgcagatgctcatgcttctacagagaagtcctggggcaatgttactgcatctccatcggataatgcatggagtgctgctccggtttcccaagggaatggaagttcagatacaaagcaatctgattcttgggatggctggaagtctgctggagttgacaaagcaattaacaaagacaaggaatccttgggcaatgtgcctgcatctccatcatttagtgcgtggaatgcttctccagtttcccaagggaatgaacgttcagatgcaaagcaatctgattcttgggatggctggaagtctgctggagttgacaaagcaattaacaaagacaaggaatccttgggcaatgtgcctgcatctccatcatttagtgcgtggaatgctgctccagtttcccaagggaatgaacgtttagatgcaaagcaatctgattcttgggatggctggaagtctgctggagttgatgattcagttaaagacaaggaatcctggggtaatgtgcctgcatccccatcagatagtgcgtggaatgctgctccagtttcccaagggaatgaaagttcagatgcaaagcaatctgattcttgggatggttggaagtctgctggagttgatgcttcaactaacaaagacaaggaatcctggggcaatgtgcctgcatctccatcagatagtgcatggaatgctgctccagtttcccaaggggatgatgtctggaattctgctgaagccaatgagtcacgtaataaggactggaaatcagatggatggggtgccagaggtggcaattggaggggccaaagaaacaatcctggtaggcccccaaggaaacctgatggcaggggtctgcctaggagacctgatgagagggggccaccaaggcgacactttgacctaacagctgaggaggaaaagattctaggagaaattgaacccactgtgctgagcatcagaaagattttccgtgaatcaatgtaagttacttcatgattatttgttaattttgtgtgattcatgatttacagttatatgcttttaagtttctgaatagaggaggcttggcttttatatgaaagtatgctaggtccgacatttaattgatttgtactgtcttaagctttttaactttattgttgacttaaaattttgcagtgatagcataaaactttctccggaagacgaaaaattcatcaaagagaatgttcttgaacaccaccctgagaaacaatcaaaggtgtctggtgaaatcgatcacataatggtatggttctcttgttacttttgggttgacctgttgtgcaattgcccgatacgctataatgaaatatagcattcgtttggcttatggtgtgcaatggcctcatttaatttgacaggttgacaagcaccaagtgttccaggatagtcggtgcttgtttgtggtgtcttcagatggaactcggtcagatttctcctatttaaaatgcatggagaattttgtgaggaagacctaccctgagcatggggactcattctgcaagaagtatttcaagaggcgccgtgaccaaccaccagcagctgatggaggcacagcaccaggcactccagctggggctacacagtctactgcagttgatacccaggagggcacttcacagcagacccaaccagatatcgcaaccgctccagctgcaactcaacaagagactcttcaagacactccagctcctccagcagacgatggattgctcgggaagggacctagcccgtctgactgatgctcagggtgcgcttagagctgccaacatcctgcttgtgctctaatcctgccactctttttttcctacttggcctgacattgcctagtgactagacagatggtgactttgtgtagtagagaagggttagcagtctttaggtctcactcttccagacgaactctgtaaattctggatgttagtgagctgcatcccgtagcttaaactcgtttttaccctctcttttttttttatcttttttgtctttccagtatggttatttggttagtccaatgcaagccgattctgcgaggccgtgccgaatctgatgattttgttgttctgcaaggcacagagctctcgctggtgctgtttcattttggatgctgttacagggttttgtaaagacactgaaactaccatgcgaatcagcaaaagatggattccctgctgtgaacaagcaggtggccttgcatgaattcattcatcaaacatgaggtcttgctggtgacgccacaaatttggtttgatgtgtttgcactgagctggaccaatctgttcttgaaatttcttcaggttggtacagaaaataggtaatattgtattctgtcatttcattaccaagaccagtggtgtgaacaagctggaggcattgcttaaatgcatccgtcaaccgtatgattgtttcagcaaaaatcacaaattttgtttgatgtatttgcacagcaatctgttcttgagattacttcaaactggtataaagcaaataggcaatgctgtactgtcattttgggttttttcacttatcattttcgacctttcaaattgtggtaatactaccaaaattttgtaaggtacttcctccgttcaaaaatgtagctacctagtacgggcatcactaggtagctacattttgggacagaggtagcagtgaactacacgtaccttgtcaactcaacccaaccaatttttgggtaattatattacttttcactcgtaaaaatccttccaaaagttagtaaggtattaacccaaacacaaccactcttaccttatcaaaatttggtaacgtcgaaaattgacattagcgaaaaaatgatttttatttatttttcattaccaggatgcatttcatccatcaacattcattaaccatatgattattttcagcaaagaccacaaaaaattgtttgatatattttgcactgaactggagcgcgccctgttcttcggatcacttcaatccggtaataacaaagcaatgctgttttctgtcatttcgttacaaaggatcagtagtatactcctaaataataggcacatccaaccgtcagatccgcatccaacggctgagatccccgccgccgcggcgtgggagtcatcacactagactagtacactaggctagccgcctcgaccgaacccctccactctcttccgcctccgcctccgcctcgccgccgccgccgccgacgacgacctccacctctccacgccgccgtctgcgatgcaggcccgcgtcgtcgtcttccccgtcaagggaagggcctggtgcttcgccagcccgcgcgccaccgcgcccgccgccgcttgcgggggcggcgatgggggcgccctactacccccaccgccgccaaccgtcaaggacctctggcgcggcatcgccggcgggggccgcacggcgtcggagaacgcggaggccgtcgtcgacttcgtcgcggacaaggtgctcgactcgacggggagcgccttctcgtctctcgccttaactgcattctcgcatgccgcccgcatttggggggtttctgatggtggggttttggctgccgcagatgaaccgggcgtggatcgggttcgggagcgcgccggaggggtcgatgaagaaccggatccacaggtcgggagtgtaagggtttggggattgcttagtggcgggtggcgcctgtggagtcggaaatggcgagatgctgagtcgttgggtgtgctcccctttttttttgctttgttgtggtgtagcttcgggctgaagctgctctcgcgggtgcggccgtcggaggtgctgctcaagtcggtgaccaaggacgtctccctactcgagatcgtgcatccggcaaggtgagctctgcttatgagtttggtgtttgtgtttgataaaatgtgcgtgcaatttgtgtcgtttcacctttgttgttattcttagtttgattgtcgaatcgattgggatattcaactatttgggtccttgttgtgatgaatatttcctaaggctctgagcctctgtgcaggaaatcatacagtatctgtcgttagtggcttagcttacttgcaatagcaatttatcattaacggatacacattgtcgccaatgaatggaactattagaatgtctgagcagatactaatttagatatacaagtttcagtatgcttcatgtagcgatacatgggttatatctgatcaagtttgagcattgactctgacatctctatcattccgttccaatacacaattcacaccagctttctctgttcatagctgttattcaagaactttgttgggacaaagtagttgaaagtccttctattctaagggcctgtttggcacagctccagctccacctctcctggagctggagctcagccaaacagtttcagctccacctgaaatgggagcggagctgggtggagcgctctcacaaaatgaactagagaggtggagctgggtccattccagacccaactcctggagctaaatttaagagttggagctctaccaaacagggcctaagaaattgcatgatttgcgtattgtaagtctgctgtaaaaatgtatgtcttaattcttcacagcttgtagctgcttgttttttgaacctctgtgcgtgctccgtaactgtaaaatggtagattctgtgtcagtgcctgttgttgcacagaagaagctctaaaagacttgttcacacgaactattcttttactggcttcgtaagttacttggaaagcctcatgcatatgcttgtttttgtatagaagttagctattgagctttatgaatcgctctggcactatcaagcatcaccagacagagttggtcggcaattttcttactcatgtcttattttatgtctattcaagattatttctgaatcctagctttaattgcagtataaatcctcgtcttgtgcgtcgacggttgcggcatattgctgtcaggtgagtgtttgatggacctgctccaacaatttgttactgtatagctcaatttatatctttcctcacccttctgtttctgcaatgtttctgagaaccaggggtgcatcagttcacaggaaatttctttatggctcagtttgtttgcttccagttacaagtgttttcatggtaagtctatattcatttgctttggaaaaaatggtgttggctagcaatttgcaacagtgatttcagtgggatcagtttgttgtactttgaagggattttttttttcattttgcgatgctatcaattattgaccaaactaaaaagattattagatctttatttttgcttgctgcctttgctagattgcgcacaatattagttgaggcttgtgtttggtctacttttcaacttagtacatcaaattaagaaaaatatgatgagctcatttacacattaaagataagggatttttacatatgtgggaggtataatttacacttctgattcagttaatgagccatacaatataattataattttgtgagattgtgctccagtgatgtctagtttataacctagcacacattacttgaatcctgatgacccggtaggttcttatgttttaatcattaaccagagtatcataatctacttgatcaaaggatgtgattgtatgttgccttcttgtgttgttgtactttaccccataggattcatagcagaaaaaagattgtgaaatagagtatacatgttggtatgaaaacttctaatgcgtgcaatccgtacttaactcactatgctatggtgagatgacattcattcttatacacctacttattcatttgcaggtactgcctttgccaaacataccatttttctgggtgctgtttcgtgcttattctcattggagagctctgcaggtttgttagatggcccagttattatagagttttcagctcttggatttttttttgttcaaactcctctctgtcgtggtgtggcgtttgctaaggtatgtttgatacttactttgacatagggaagtgagaggctccagttgttagtttctgacagctcagatcaatggaaaatccttcttgagaagcagaaagagatgagttccagaaaggatggcaacccttgtgaaaacactcaatatgctccttgggtaagttgtctcaattcaaaatgagttaaaccttcagattgttgtattttgagggaagttttggaccgagacatttatggacctccggagtcatcatcttgattattttctgttaattcaactagagttgtagatcggacatactacatcagttctagatcagatacttgaagagttgaggtagttaatctgtgttactatcacatacctactgcctctagtatgcaaatgtacccgaaggcaatgaacaaccttttctgacatgtggccgcatgggataatgcacaaacaagttaagccaggatatgccaattaaaagaatttatctacttgcacagttgcatatatgctggcttgttttacccgctaggcacagtttgtttgaccttgaggtttatgacatgtcagtgtacccttgcataactgcatgcattgtatgcccaacctgcacatacacatgggtggccacgactatggatggatttatttgtagttattgattatttaatagttactccatttgcatacaactggtgagcactttctggaatgcctgacttcatgttgcaatcattaagcaatcattgaagccagctattataatatatctttatatggtttttatataatataactttttatacatctgatgaatgatgggcacattgaagcttgcctgacttatatacaacaatgattaggctgtctgtgcagccagttatgcatctatgtgtaatctcaattcggaggatctgtacattgtggctcacagaaaaaggttgccagttacttcacaactccaactagtcaccttaacaatttttgccacaacatgttgtaatttgctgttggaatctgaatctgatattgtttttactgcaacataacttgagatcctctacctcacgggatttatatatgtccacaacattttatgaaggagctactatggaggaaatgggggaggggagttccattatttgtatcatataagatgatcttgtttgtaatatgtgttcctctcatacatggtcctttcattagttaggtgaaaatagtggttgttgggggtgttaggcaatagtggcttgtgactctagcctactgataattccttctagattgttaggctttgacagtatatatatcatatcatatttactgtatgtgcagtttgttttttttttgaaaaaagaaatacttattgtgttatttcttcaatagaatttgcagccttcgaagaagcttgatgggttccttgagagcagaaaattgaatgaaggattggattgtgataccatttcgaggatttgtcaggcatatgatttggacaagattgatgttctgaagtacagggatttggagtaaccacatccagtttcttggctgccgtggtgatttttttgccagctaatgtttgtgtggtagaaatgaattccgtcgtggagaactagctgaactgctgaagggtacacgagtgacacgagacttccaaaattagtgactaatgcagattttttttttttgcaagggatttggagtagtagcattacaattcacaagttttgttgttcctcagtctgctgctggtttacaaggcagaaaaacagacaggacctaaaactgtagtgcccatggtgacatctaattctgtacccaccatgtaaatagaggtggaggcatcctttccccactagcattttctttggtttcagcaccactcagtagtcagtactctgtaaggagatttgcttcaatggattttgcagctgctataacttctgaagtcaaaagttgtgactggattttgcagctaactatgaggccaaaagttgtgattggctaatattttttttttgggttgtttagggtgcaatcagaatcaatcattgggtagatctgcatccaattttggttccaaagcagaatctcctctctgcaaagtaccaccggtaaagatttggtctttctgaggtgcttccagtgaaagttcatagtttctggattaggactaacctttgtatgttttgactgatccactcatctacctctttgattgccattggattatcttgatagccggcggtcaaattaacttttagaaaaacttgagaggatggcatgaaagcaccacaaatccatggcattctgcatgattgaaaaccatctcctaattaggtgtggttatgctgctaggattggagcgaaataataaatatcagaactgggtccaataagccgttttccttcaagcttatccatagtagtagtagaagtactagttgtacctctcgatagtgacgttgctgtggcaatgtttaaacaacgcaaaaatgtgaccgattgggcgattgggattgcccacaaagtgacatgccaacttgttgctctcttaactcttttaccggtcg

SEQ ID NO: 8451 - DNA, 1622 bp, Oryza sativa
ctttgataacggattatatgaaaaatttagttgcaaatataaaagtacctcaaaactgtatggaattcttgtgttccaagcatttcgatttgctcctctcttctcttccgagctgctcgactttactagagctaatgaaggcatgccaaatttgacatcatggtgacatttagaacataaaatagattttacaaaaagtccaatttgaatttagatggtactccattagttacaaaatagtataagaatttttcatcacatccaaccaaaatcctttatattttgggacgggtagaaggagtgtaaagcatttctggaaggagggagtataagcatttctagaaattacaactggagtataaacatttcatgaaacttcgagtactactccctctatcctataatataaaggattttgaaacgatgtgatatattataatactataatgtgttatatttatctaaaattctttatattatggaacggaggcaagagggagtaccatctaggagtacaggtcatatcgggtaaattgcatctgcaagggctggatggccggagacccgatagcccattccccatttcccttatccggaaacagcctttgctttccccctccctaaaaccccccgcagcggcgcagcgccacctctcctcctcagccgaagcgtcggggccatggccatggcgatggcgtcgccgcccgcttgcccattcctcctctcgctctcggccggcgccaccgccatttccaccgtgtccgccgcctacggttccgtttccgccccgcgcgcgcctctcttcctcctcgcctccccgcgtcccgtcccgcctcgccgacccctcgccgcgggctcctcatctcccaaggccgcggcacccgccgccgtcgagatccccgaggagtacgtggacgatgttgatgcggtgaacattgcgcaggacgtcacccaggtgcatggccgcttccccatccacgcatatgctccatttttttgctttaacatgggaatgggtttccatctaaaacagtacagtgaaattggttaaggtcactaggatcatctcgtttagcttccagtattgtggtggttgagtctgtgaggtactggaattccatggtaaattttggtatttttctgtaagctcgcaatgggcatgggggataaatgataattggcttagatctcattttttgttctggctaggacaaactcacaatgggcatgaagtataattggttagatctcattttgttattctacccatgagcatgaccactcccacttctgatcaaacatttacttgttaatcagctgattgggaaaaccccaatggtgtatctgaataatgttgtcgacggatgtgttgctaatatcgctgcaaaacttgagtacatgggaccttgcaggagcgtcaaagacaggtatgtttttgtcatttgtgtattcttttctgccagtgccacctctcattcatgtcttttcaggattggattaagcatgattaatgatgctgaagagaaaggattaatttttccaaacaaggttagattatcctgatagtatttgcaatactaccatcatgaagattctaacttgtgcatatacttctacctatg

SEQ ID NO: 8452 - DNA, 1528 bp, Oryza sativa
attttcttccccctgatgatcattcagatatttatgttttggggtgggtcttttattgcccttttcttaatatactagacgtggaaaatattttttttgtcaattttactaaattttctgttcatgttatccgactttctccatgtatgttaatttcttgaatgttggctttgacatataagactatactagtatttgatacatagctgaacgaggtaaagaaaggaagttccatgattcctctgtggtaaaaactgtcattgattttgtattcagatcagtgaatcatattttgctttgtagcttcaagttcacatctaatcaattctgtaacatttaaactttaaacagttttcaggaaattgttcctctcaatgctggcaatgtgcttgtaatagaagacaacgaaccagctgccagatggcttgttcttataaaccaagcattaaaccggccagctgaaaccaatgccaatgtctttcagaatgagccatctccctctgttgattctagtgtctctcgagcttcttcaagcctcgatacttcgttctctgacctagcaaaaacatcaagtagttccacaatcttccagaagtctaatctaaaatccattagaaaatccttcatgccagtccatcgaaaacggcttaaggcctgcaactgccctgtagagatggccaaatcatcctacagggatgcttgctttggttgccccaaagcatatgcttacgaaatagattcgtcagaagaggatgaacgggaagaaaagaaagggcaatcaagggattctaatggatctgtgcgcagtgaagtaatttctcctcccaccgcaagggatgaactaaaatataatcttatagcatgtaaacaaatggttggcatttttgtaatggtatgggtgaagaaggaactagtgcagcacattggtcatctaagaacgtcttgcatagggcgaggaattctgggttgtcttggaaacaaggtcagaagcaaagcataatatcagtttgaagtgcttttgtaagtactttttctgagtacacttcttctgcagggatgcatatcagtgagcatgacactgcaccagacaagcttttgtttcatctgcagccatttggcttcaggtcagaaagaaggtgatgaattccggaggaactctgatgttcttgagatactgaggcttacactgttttcaaggatttgcaggagaggtgtgcgaaaaatcccagagaaaattcttgagcatgagtaagaatgtgcttttagtgtgcttgtaattagtaaatatatgtatcttgtcaagcgtatatttctaagctatacgctgtttgtttcagtaaggtgatatggttcggagatctgaactatcgtatcgcactgagctatgcagataccaaaaattttttgatggaaaataattgggatgttctctttgaaagggatcaggtaacttccatttcttgttgcaggaaaatgatccattttttctggaatagcaatatcatgtacctgagaaacaattactatt

SEQ ID NO: 8453 - DNA, 2446 bp, Oryza sativa
ttcctgcagcccccatgtgtggtatactccatgagtttttggcctggaaagcatattaccaatgtaaaagatatttctcttttccaataataaagctatatgttctgaatcaagtaacagcatggacaaaatctaatgatgaacatgtattgatattcattttaccaagaaaaaaacaggatattcgttgaaagaaactggaggaggccaaatgactcaagaagaggtctacttacatatacatattttggggatcaatttcattaaatagattgatgtagaagcgcaacccatctggactgacatccctgcaaaggatacctgacaaagaagttggtattagtttatctttttatatatagtgttcatggcttgaattttttttgaatgggtaaccatctaataccaatgctttctgcatttagaagatgctccttcgctaaagcaggtgcaatcccaagtgtaaatgcagcatcgctggggcttattcccttctgaagggcatcctccttttgtgcaagtgatgagattctcgcaaatacctatgcatatcggcaaataatcagcatgtgcttctgcttaaaacgataatagtagcgttcaatctgaaggtaacagtgggcaggtgcccaccaacaaattaaatgaaatggaagataactaaacaattggaaggtccagagatatttagccacactctttgtgtgactgctaacttgggattgttatgtcgtgtgatgtgtggactgtttgacttgaatttatgatgaaatttaggcctattcttgccagtgcttacctcatcatcactatgcgtcttggtctggatcaccttcactccactgtcaaatttcctgagcatgactgggctgctcattacaaatcaacatctataagcaaaacatagaaccataattaatggctggcaacaaaccagctgaaaatactaaaaaacacattacaacatggggtacatacacgtcaaatttctcccaaagggaacaggcttgcagaagatcctctggtgagatcaactctacacaaaatataaggaaaaaaaacaatatcagaacatgtaacaaaggaattccatacagatacttagcagaaaagcacagacctgtccctcttgcacggttgtagagacaatagacatcaactagtgccatcataccacctgctttctctagtggtgttctaatatagtcagccaactgataatgaatacaaaaggttgaaaatagccttagtaagactgctctaaccgggaggactcagaagaagataaaaactcttcaaaacagtgacgagttatagaggcaaggacatttttggtgttcctgtcaattgtgtatgaaacagaacttgagtgtaaaatctgtggtctgtagttgaaataaaagaaaaccctctgaatgattcccaaatttgacccaactaatgtgtaagcactaagcagcgtgaaacaattcaggcatgaggcaaagaaatgaacagaaagtactgttcaatagaagtagaggctcttggttgatggaggaaaaggacacacaatttatcctgaagatcctatggcgataaaacctctcaagttgaagatttggtctagctggcatgatattatacaaagttcatgcattgccatcagcatcacaattgagcttcacagacagtgaaaactacttcacaatgaatgcagcaagaacacgagcaaagcatgtattacctggcgtgacagctgctggtggtacagagcaccagcggtttctttcgtcacaggggacacgattccaacactcaatagccaatcctgcatgtcttgcttagatcccatctcttcatcattggaattggattgggctgatgagttcgtcaatagcttttgcctcattttctccgctaactccatcatttccttagctttgctctaattacaagattgcagcaaaacacacacaaaaaaaaaaagctgcgttgtaaaaacatatttgttccaataccatatgactgcgttacaagaactaaatgtggaaattttacattttagctgcgttgtggagcatggtgttccagtaatccagtcaattacgattgcatcacaagaactaaatgtggacatggtatcaagtactacttggcaagagcagcagagaggaacgaaccatgagggcgttgagatcctggaaggcatcctgcagattctgccccgcgctctcccacgcctcctgctccatccgcaggatcccggacaccccaaccacgggcatcctgatggcgagatcctcctccgcgggggccccctgcgccgccgaggagccgcccgcgggggcagccgccacggcggcgaccacctcccacgccctcgcgcggacggcctcgagcagcctcccgtagaacacgtcggcctcccccttgctgacgacgacggcgacgacctccgatcgcg

SEQ ID NO: 8454 - DNA, 1794 bp, Oryza sativa
atatgattggttaatcaatagggaaggtagttcttggctcctgagttttattggctcgtgaatttcattacttcatgcacagttgtttgtatttgatatctagtcgctaagttggctgaaatatgagccgctgaacttttaatactctactccctccatcccacaaaatttcaaaccctagcattccaagatgaaattaaggaggaaggcaaaataccaaaatgtccctaattaataggaaagttgtattgatggatgggtaggtgaggggtatttaaaggataaaatttcttgatttgcgaactggtggtaggtaagaagatagaaattggtttattttgggacaaaattcaaacatagaagttgatttatttggggacggagggagtacatgtcagcaagtgcctccgcaacagtgtggtaatactcccaagtgcctctgaaattgtttaacaattgtttgtgccctatttttgcaatggttcacaaaatatgaccagcggttcagcaccatgttttcttttagttgcacttctaagtgaactcagatgtcattgtatttattatgttaactgaagcacataattgttttgttgcaggggccacaatatgtatgtaccaatttctggaccttcatatgcttgtcatgcagtggaatacagtaagtattttgttccatttatcttgtcgtacatgccaatttctggtcctcagctgatttccttcttcgttctagtttagagttaatgaaggtctattcagcttttgctcatgcaagaaaatttgtgttcacttatctattgagcaatgatacttgcaagaagatgtgtgttgtggtatctgatgctaagaatgtatggcatggggaaatataaagcattatttatggtccatttcttacaaatagttcacaatctaatatcacagattcacagttgtttattcagctaatgtcactccatatatggaattttctatttcattatttgcgactccgtggcatgtttagctcaaggatttcgattatcctaggatgggttggcccatcataatgttaacccattccatagtttttgtgggaggaccccgttacttagtttccattattattgcggctatgagaaaaaaggtggtgatgaatctgtctttcattcttgaaacacgtgttgttagggtttgactggtttaaaaaataattttcaaaaataaagaaagaagtgaatgaatttggcagagaagtacttaatcggattggaccactgacccacgtcttaccactgcattaatctaatatacattgttgctatactgttggtatttgataggagtagtaatctcttttttttatgtgttaaaacagccgggagtttacccaccgtgtcaagtcagtgtcaatggctaaattcactactcaagaagtgcggtctcttgaacagggagggaaccaggtaattccgggaattactttgttttgtcctctttagactttagagtgacctggtcatatgcttacatggaggtcatgggtgcagcgagcacgtgatatctacctaaaagattgggattggcaacgaatgaggttgcctgacaataggtgagtttgttttcattcccatgtgccgtggaaacttctagtacatttctttataattattccgctatgttttgttttagcaatccagacaggataagggaattcatcagagctgtttatgtagacaagaagtatgctggtgggaagtccacggacaaaccagtcaatgatagtgaggtaatgagtttataaatctcaat

SEQ ID NO: 8455 - DNA, 3365 bp, Oryza sativa
gggggcagggagatttggaggcggacgcgcgggtggtgcgacgaggaggacgaggaggaggaggagaagatggagcggagggggttgtggccgtgcttgcggtggggcgggtaggcgtggacgacggcggcgagcgggagggcgcgcgcggagcgggagggctcgtggaggaagatgaggcggtgggaggtgaggacgaggaggcgggcgcggagggggccgaggcgggggctctcctcgggctccacgtccccctgcgcgacgaggtggcgctcgacctcccccgcggtcagcaccggccgccccgccgccgtcacgtccgcggccgggagccagtcggccgccgcggcggacatggtgatgactactgctgctgctgctgctggtggtgacccgggtgagctcgcgttgggtttttgcgtatttgggcccggattgcaatcgcacacggccgccgccggagccggacgagtcagtactcagtaccaggcagcaaggttcacaatttggataaaaaccggtcgaatttcgtgcgcttcgacatggctcagaattaagtttcgattaaaattttaaaggttaaacaatatatttggtcaaaattcagttaaaatttatcaaaaaccgtgatgtcaatgaggctcgaaatttagtggtcaaccggtaatgtaaaccctgagtcagtacacggcctgacgtcagcccgaaccgcgaagggcaacccctaaggctggattctaagttcactatcctaactttatcttcctccgttttctgcgcgcacgtttcttaaacggttaaacggtatatcttttataaaaaaatattttaaaaaaaatcatattaatacatttttcatttttatttagctagtacttttattaatcatgtcttaataagacatgcatacgtcattttgtgtgccaaaagctcttggattgtgcaaattccatatttccgccctaactcgaacacaaaaccatcttctcccttgatcttaatgtgtagcaacttatggtaaaattaaaatcatcttaaaactatgaatttggacatatcttgtctagattcacagtgctacatattgagacgaatgtagtatttatcttttgatatatttagagctccaaattttaaaaaccagtaaccaataaatacaacccattcagaatgaaatagaaaaacgaacatgtcaagaaatcacaagtccagacaaaaaaaacgtaaaaatataattttggtgcgctgcaaaaggttgtcctagtatctcgtgataatactatgattttatcaagtcgaaacgataccaatcctatctagtatcctactttttataatatctcgaccctcctattcatttctacacgattatatgaaatcttaagtattatctcgattctatgatccctaattccctatgatcctacaaaatattattcaaaataacgtggattgataataatataaataaatatgctcaagtttacatcgaaaccaattaaatttatcaaaatcattattatatgctttaatttatataatatattataattgctttgtaacttaacgtaagtctgacgtatcggaatacaaatcttaatacaagatcctaatagaagcctaaaaatctatagtaagtgaaataggaaaaccgaaatctagtgatgagctcgtattgatttgcgcaataccagcggggcaacaaagcgagagagagttaatatagcacaacaacacgaataagcatgcagacattggattctgcagataaagagtactccctccatactcatattagaagtcgtttaggacataattgtgcatactaaggagtgattaagtagagatattttttcatgtctgcccctaataaatagggatgtggatgcattctgtacgataagcaatcatagctcaaatggctagtgcagagatcactttctttttgcttgcaataactacgcatacgtgatgacgagcgcaacggacggcgagcgcagagccatacacgaccccgcgggcgaacgacgacatgtattgtgaaaacggaccaaaggccttagaacgacatctaatatgagtatggagggagtatacgattttcagttccgtcacatttctttattattcatagctcggctaccatgttcatatgcgttctgctgctgcctctgcacaacacatgaaccagagttcaatgtgtctaggcgagacaaagattccagcttttgtcaccgagaaatttcttgagcgatttggttggccaacgcgagagatcgattcactgcggagcaatcagcacgggatccttctttcccttgagaaagtccgagtaccaacgagcggagcgcctcgctcgccgcggccgcgcgccgtcgtcgaaatccacacggtacaggccggatcgcgactggtagccttccaggagctcgtacacgtccacaaatgaccaaacgaagtagcctctcacatcaaccccgttcctgcacaaagcagagatcaatcagaacagcatgaggcctcatgtttacgattatcagctaaaatctaaatttttaactttaaatttaaagttaaatttgggattatttttattgtatattatttttcagccttcgtttttacaccgttaagaacacatatataaaagttttattcgaggaataagccaaatgatggggctggaagatggattgaagtgaaactcatgtagtttgacacactgatactgatgtttggagatcacctgattgcatccaggacacctccaatgtagcccttgatgtaatccaccctatcagggtcgtcgagactgtcatttgtagatcccttccctgaagaaaaagaaaacaggcaagtgagaaagagtattgtgttggaaatttggtcataattcggcatattttaatccaaaataacaagataataaacatgatatttacaataggatttgatccagtgatagtggtgaatgtaatcaacatgagcatgcttaacgttgaataagcatcaacaatcacataatgagttttgagaattaatccatttgattaaggaattggtaacttatatcaattagtcctaattgatggatggttgatggttgtgtagtggaggatggttcatggctagttgatgacaattagttgctctattcctcttcctattccattggtaacttacatcaattactcttaattgattgttggttgatggttgtgtagtggaggatggttcatggctagttgatgacaattagttgctccattcctcttcctattccatgactcttactcttcatcttccattcctcttataaaatgagaatgaatttgatctcccgcgagaagaagaagacacacttt

SEQ ID NO: 8456 - DNA, 3799 bp, Oryza sativa
gttggctttgctgctgcactgaaaccgcatgcctttgatggttcaaactataagagatggaaagcacgtgcactattgtggttgacagcgatgcagtgcttctatgtttcacggggcaaacgaagtgaaccacctctttctcctgaggaagaggctaagttcgaggcttcggattgcctgttccgtggagcattgatcagtgtactcgctgacaacatagtggacgtgtacatgcacatgccttctgggaaggacatgtgggatgcacttgaggccaagttcggagtttctgatgccggcagtgagctgtatgttatggagcagttctatgactacaagatggtcgatgaccgttctgtagttgaacaagctcatgagattcagatgctggctaaggaacttgagaacaacaactgtgagttgccggacaagtttgtggcaggtggcattattgccaaactaccaccttcttggtcggactttgccacttctctaaagcacaagagacaagagttcagtgttcctgatctcattggctctttgggtgttgaggagaaggcgagggcaaaggacgtccggggcaaaaaggttgagggaggttctagtgccaatatggtacagaagaagaaccctcatgcatcccacaacaacaagaaagtcaagcctgatgtcaaacccaaggctgcaaccaattttaagaagaaaagcaagggaaaggcaaagggagactgctttgtgtgtggcaagtctaggcattgggccaaggactgtcctgagcgcaaagacaggaagtctgccaacatgatcattagcgagggcggaggaacatcggggtacggtaaaatattacctacagttctctctgtttttcattcacttgattggtgggtggacactggtgctaatattcatgtatgtgctgacatttctctattttcttcttatcaggtcgggagaggttcctccttgttgatgggaaacgggtcgcttgcggctgttcatggtgttggtacggtcgatctgaagtttacttcgggaaagaccgtgcagctgaagaacgtgcagcatgtcccttcaataaagaagaatctagttagcggctctctattgtgtagagaaggttttagacttgtgtttgagtccaataaatgtgtcgtatctaaatatgggacttttgttggaaaagattatgacagcggaggcttgttccgcttttctttgaatgacatgtgtaataatcataatgctgtgaaccatattagcgagaatgatgagtctaatgtgtggcattcgcgactctgtcatgtgaatttcggttgtatgacgcgcttagctaacatgagtttaattccaaaattcactttggtaaaaggttccaagtgccatacttgtgttcaatcgaaacaacctcgcaagcctcacaaggcatctgaggcgaggaatttggcacctctagaacttgttcattccgatttgtgcgaaatgaacggcgtgttgactaaagggggaaagaaatatttcatgacactgatagatgattgcactagattttgctatgtgtatctattgaaaacaaaggatgaggcattgcatttctttaaaatctataaagctgaggtagaaaaccaacttgaaaggaaaatcaaacggttgaggtctgatagaggtggggagtatttttccaatgagtttgcatccttttgcgaagagtttggaattattcatgagatgacgcctccctattcaccccaatcaaatggggtggccgaaagaaagaaccgtactctaactgagatggtgaatgccatgttagacactgcggggctttccaaggaatggtggggtgaggcagttttgactgcgtgtcatgtcctgaataaaattccaatgaagcataaggaaataacaccattcgaggaatgggaaaggaagaaattaaatctctcatacctacgaacatggggctgtttggccaaggtaaatgtacctatagccaaaaagcggaaacttggaccaaaaactgttgattgtgtgtttcttggttatgctatccacagtgtgggttatagattcttaatagtaaactctggagtacccgacatgcatgttggtacaattcttgagtccagagatgctacattctttgagaatgaatttcctatgaaatatacacctagcacttctagtaaagaaactgtcatgccccatgagcactttgcaccgatagaacacaatgatcaaacgcctgaggaaaatcctgaggaggacaacattgtagatactcgcaagagtaagagacaaagggttgcaaaatcctttggagatgactacattgtatacctcgtggatgacaccccaagaaccatagaagaggcatattcatctcctaacgctgactactggaaggaagcagtacgcagtgaaatggactcgattatgtctaatggtacttgggaagtcgttgagcgtccatatgggtgcaagcccgtaggatgcaaatgggttttcaagaaaaagcttaggcttgatggtacaatcgaaaagtacaaggcaaggcttgtggccaagggttatacccaaaaggaaggcgaggacttcttcgacacatactcactagttgctcgcttgaccacgattcgagtactactcgctctggcagcctctcatggtcttctcgtccatcagatggacgttaagacagctttcctaaacggagagctggaggaggagatctatatggatcaaccagacgggtatgtactagaaggtcaggagggaatggtgtgtaaactattgaaatccttgtatggcctcaagcaagcacctaagcaatgtcatgagaagtttgacaccacgcttacatctgcaggctttgttgtgaacgaagctgacaaatgtgtatgctatcgctatggtgggggagaaggggtgatcttgtgcttatatgtcgatgacatactgatctttgggaccagccttaatgtgattgaggaggtcaaagactatctgtccaagagttttgaaatgaaagatttgggagaggctgatgttattcttaacatcaaactacaaagaggagatgagggtgggattacacttgtgcaatcccactatgtggacaaggttttgagtcgctttggatatagtgactgcaagccagctcctactccttatgatcccagcgtgctattaaggaaaaaccgaagaatagcaagggatcagctgagatactctcaaatcattggttcattgatgtacttggctagcgcaacgaggcctgacatctcatttgctgtaagcaagctgagccggtttgtctcaaatccgggagatgatcattggtaggctctggaaagagtaatgcgctatctaaagggtactatgagctatggaattcacaataccgggtatccaaaagtactagaagggtatagtgactcaaactggatatctgatgctgatgagataaaagccacaagtggatatgtgttcacacttggaggtggcgctgtttcctggaagtcttgcaagcagaccatcttaacgaggtcaacaatggaagcagaacttacagcattagatactgcgacagttgaggccgagtggcttcgtgaactcctgatggatttgccagtggttgaaaaaccagtgccagctatcctaatgaactgcgataatcaaacagtgattattaaagtgaacagttcaaaggacaacatgaagtcatctagacacatcaagagaagactgaaatctgtcagaaagcagaaaaactccggagtgatagcattggactatg

SEQ ID NO: 8457 - DNA, 15204 bp, Oryza sativa
ttcctgcacccctaacttggcttcaacgaaattggagctagtgctcatctagtggtaagtaaataaatgtagccataacatgcgaactcctagatgagttctggaacctctctttcgagggattttctaagattttcctatgagtagaagtgtttctatagcttggttcttgacatctatcccgagaggcttgcccactatcaggattccttaaaccaaccaaaacaaaccaaacaacacatcacgtattttatttgaacttctaaagatgcatcctactaatagagatagcaatctagcatcgaggccaagttgtttatctagtttaactttttgagcctcttgtcgctgtaaatttatctggcaacttcaaaactgcactattatgtccagaatttgttttggaaatttaaattatgttcaaattatatgttgcaaaattaagtcaatatttttttttagaaaacacattataaacgcaaacgcttacatacacacgcataggggttgacaaaataagaccgaaccgaagaaccgaaccgaaaagaccgagaccgagaaattcggtctcagccctcaaaagaccaaatttttttcggacaattcggttattggcttcagttaactaaattaaccgagaaaaccgaattgtggcccaataggcctaggaggcccaataagcccagtaaattgctaaaccctagaagtcaccgctcctagtcatgagtcacgcgacgccctcaacccatccatcgcgccacctccgcctccgatccccatccatcgcgccgcctccgcccatcgcgccgcatcgcctccgcgggcatccatcgtgccgccgccgcctctagccagcccacctacgccatggccccgatgagcgccgcctccagccaacccgcctccgctgcaaccccgacgagcaccgccgaccgtcttggcgccgcctccagccaggctccgccgcggcccggacgggtgccgccatccgcctcggcgccgcctccagccgagctccgccacggccccaacaggtgccgccgtccgccttggcgccgcctccagccagcccgcctccgccacggccccgacaagcaccacctccagctgggctccgccgtggcctcgccactagcccttgtcgccgagccaccgaacgtctccagcgaatcggtctgaccgagaccgagatcgaatttgccggtcctgagtttcttggatgaaattccgtcctgatttttcaaaaaccgaaatgaacgaatgaacgaagaccgggaccgaatttttcagtcagaccgaacgcccacccctacacacgcacactcgctcctgtcaactcacaccctactatataagcaccttcgagagactggaccgatatattttaaaattgacgatgtacattattatcggcggatacgtcgcttcctactgaaataataattactccctccgtccataatatagcgatcgaaccggatgaaatgaagagagtagctgtaaatgtgagcattcacatcatgtgggtagaaaattcgaccatgtgtctccatttgtaggcttcaatttttttttggcaggccgcttccatttttgttaagatatttggacggcagataatgtgtatactggtaaccagttctaatcgtttggttagtttagtgctcgaactcaaaccttgtcatcaagaattcggacttggggaagccggcaagtaaggttatactattaatttttggatgcactgttccattaacaagaggaaagtgaaagcgatgtgctactactacatccaacaaattaaagcaattataatgcggcgtgatgatataaatgatggcaaccatctacacaataactctttaagttttaaatttaaatatatttaaagctttgcttgtcactctctgcaggcgccttgcctccttttcatatgtttccttgaagcaatctcgccgcgtgtaacttttctcatcaaaagataagcagcttgatcatgctgatctccttaataaaacagagcctttcttcaaggacgccaggccggcctgatcctaccacctgattattttttaaaaaatttggatgtatcactgtatcatcgcgcacaatgattatattattgcgttaagttctcacatccaacacaaacaatgatggttaagtccaacgcgtgttcgtgtggcagctgtgtcgagtgtttaaaaaacaaaaaatcttcatgcaccttgcctgatgcctgctagtcccgtgatctctacgtgatttgtgacacgcttatagcatcaaggatcgcacaacaaattggcgtgtagcgcgatagcgtcgtccatcggcgagattttgtcggttcgagacctgatctcgtgtgagctaagattaccacgatttcatatcacggcgacgcaaacatgcaatatactgcaaactgcgtcccctcgatgcaaccgcgctagtgccggtttatgtgttccaactgacgcttcccatgttgccggtcgctgtcaacggcgttgttccgctggtgcatggtcggtccgatccgatcgcaaaaccgagtgcgccattcgcagacaaagccggccgggatcatctcccctctttggctccggtcgtggcttcgtcgtgggcgtccaaatgggggcgagtcgttgtgtcggctgctgccactggccaggctaaggcgcgcgagcggtcacttgcgcggcgcgcgtaggatggaatgattgccgcgacgtcacccggccgcacttgcgcttgcgcttgcgcccggtggtgcgtcgaggtgaaaggtgggtgaattggtggtggccctgtcgcgctcgcgtcgtccgtccgatcgacctgaggaggtgtggcaactgggcattggcaaatggcaataccacggcgcgagaccgaacgccgccggcgcgcgtacgcctcgttgcgttgaggtggtttggtacttggtgggggcgattgggcagccagtacgagtggcgctcggctctgcggttgattggcccccaggttgtgaaatatggctggaactgattagctatgtgccttttggtacggcgctgccttttacaaaaaaaaatgctcaagtttatagaaataacatcatatgataatagtagaaataacgtctaagatagctaaatgacaagtttatagaatttgtttttttatcgatcattggaaaaggctctaaatgtggtttatgataattcaaatagtatatagattgataatacaaaagtaaaaaaatagatggtgtgacttaatgagagaaaaaatgagataaataatttggactataaattaatcataaaaaaattagaagaggtggatgatgtgatttaatgagagaagataaaaaacattaactaagtttggaattcgttactaaaccccaatactaggtataacccacccccgaactaccaaactgtgtcaactttcatcccaagacagaatggctcagtgactccagtttcgtttgatgtgacgctttgactctggccaattgtatttaatcagcataagacccatgtgagcctaacatgtcagcaaccaactatttccttctttctctctcctctctcccctctcttccccatcctcaccagggggaggcaagccgtggatgacatggacaggggcgatgaccggcatccagtaggagaaggaggaaatggcaaagcgaggaggtggtgtcgttgtggcggtggcgggagggagatgagggaggtggcggtgctacaacagctaatcggtgaggtgcaggagctctagaacctctaaggtgctcacttcgttccccctccctaggcaagcaagcaacaagtcaacaaccatctctcctcttcccccattctctaactctcttgttcgtcatcagcctgcgatttcctcgctacgcttctccttcgcgtacttggtcaggcaccgacactaccacctgctgcccgtccgcgaacgcgcgcctcagtctgcccaccttccacacgggatgacactgctgccgatttccaaacctccttcgccaccacctcggcaatgattcgcacttcctcccgacgctggcgagtagcagacattagccgacgaggcctacaaccctgactgtctaccacccaccatcaccacctcctccctggcgcatctccgtctcgccgactctaccaccaccgccgtcgacgatgacgatgatgaaagggataaaagaggggaaagagggggcgacaagtgggtctcactgtattttttaattattaatcgaacacttactgataggtgggtctcatgtttttttttactttaagtgccatatcaaccccacgtaggcgtcatgtcagtcgaaactgtcgttcaaaccaccttggaatcttatttgcactggttttgggagttgagggacacatcatatctgttattgtggttcatgacgaatttcggactcggtgacaattttgagggacctaatgtgaacttattcctcccgggaaaaaaacgagcccaataggcgtgttacttggtccaggacaggcacgcgtatgaagcctgcagtaggcgggccaactaaacatataatagtcctcttaacgttcaggcccaatagctggagcaattggagaccagtttagggtaacaaggaattttctcgattaatgttatcgagaatatagagcggtattctcaaaaaaaaaagagaaaagaatatagagcggtaagcaggtgaatcacggtaaaaaaaacgtaattgtaggaccaaaccatccctaactttaataggaaaaaaatgactttgctagtttcaaccctctttgaaacatttcagtacaggatttacaaaaccgtacgattaccacacggttataatggttacaataattatcatgcacggttactttttcagtttttaaaatcacgatatgtctcgtggttatcgcgcggttttcacggtaaccaccttatcacggagtgcgatatccacgtcgaaaacggtagggaaacctgaccacgacacgtcgagacatgttcttttcctttccgcgcgcggcaacgcggctgtataaatactcacctacgcagctacgtccgcatatttgcctctgccacacacgtacgcgcaaacgtgtcatcgtgcgacacagacgcttggcccccgcggagacgcatgacggcaagagtcgcaatgcgctaagcaaacctctccttgtgcagtggagtcccatacagccgcgcgcgagtggtggtgcgcacctgcatggaggcaccactccacttcacggcgcgcaggtacccagcattttccgagaccttgaccgtaaaaacgcccgtcgcccccacacgcctggccacggcggcgtcacgccaagtgtcgtggcgctcggggtggaagctatagtgcccagacctttgcctcccttctcagatcactaggagtactccagatcagtctcagtagtcagtacagtcctcctccttgcttccctatataggcaggttcacttcaccggtgacacccactacccttgtctgttgtctttgttgccaaggaggaaagcaaacaggggccttgcaggagctatcaacaaaagccatggtctccatgaggaagaagaagaaggcctttgctgttgcagctgcaaccaccttgctttcccctcctcggtcctcctcctcctcctcctccacggcgtcctcctgcattgtgccgccgcgcactgagagcggcaagaagaagagtaagcacaggaagagggccaaggatggcaccggcggtgacgacgacgacgccgccgttgctgctgcgccgaggaagggatcctccatctacaagggcgtggcaaggtctgcgttttcgattcctttttcttgctctgatgatcagttcgcagttgtttgcgtgatctttgcttggtttctgatgaatgcgtcgtttgttgtgtgttgctggtgtgtaggcacaggggttcagggaagtacgaggcgcacctgtgggacaagcaaggctggaacccaaaccagacaaggaagagaggcaggcaaggtgagaaatacaaattctacgagcctcgggtctactatgttttctgcagctaatgggacaagttgattgccattttgtttttctttgttctctctttctttggttattgttaggtcattttgtattcctgctagcttatgtgctgatcttttttaatttgtgttgcaaatgcggtgtttccttctgcctcggaattcgtgtggtgatcgatgctcatccatgtctgatgtctcatcgcctccattagtctatctgggtgagtcaagatcctcttcacatcgtgggaaaagttcacaaactttttcttcgctatgattcacaaattatcactagcgtgtatggctccgaattccattgccgtcctagtaccatgcacatattctttcttcagaataactttgaatccgcagctactttgttctttctttcttggaaaagagagtaattctttctttcttggaaaagagagtaaagaagaaacacttttgggtaaagtggaaaagtactgcattttgcctgtccccatgcatgcgtcaagatacattttttacaacttcaacagaatcatcaagatcatgctctcactcgctaccagtacatttttttttatgtagaacatgctgaaaatacacggattaagccattagcattgtttctttgcaggagcttatgacacagaggaggctgcagctcgcacttatgatcttgcggcactcaagatctggggctcagaccatgtcctaaacttcccggtaaagttcagagtgtttcagcacctgtcatttcccagtagcactaattcgccgttactaattaaggaggagatgatgttaacttgttaagctcccatttgtgataaatgcagattgacacgtacaggaaggagcttgagaggatgcagcgaatgacaagggaggagtacctggctactctgaggcgcaagagcagtggcttctccaggggtgtctccaagtacaggggagtggcaaagtaagcatacattgtcatgcaatatcactgtactgtccaatcaagcactagctaagcattgtcctttgcatagcccagtagtactagtacctcttttccgtccaaaacccatttcttggttctccaaatggcatactgtgatactggcaaatctggcatgagaatacggtgtgctactagtactgtgaaaattgaaatgccaaaaaccgggttgaagttcttttgccttggctaagctctactagtaggagtagtctcaacatttgactgcaatgcccatgtttgtcaccgcaggcatcaccacaacggccggtgggaggccaggataggccgagctgtaggcaagaaatacctctacctgggaacattcggtaacgcgttcttggttttgttcaccggctacattctgttcctgacgccatgaaaactgcagtttgttaacaatggacaaccaatgcacatgtatcagtaccaccacatatgttcgtgtcgtatgttattcgctttcgtgattgttaatttgtcgtgtcatgcatgcaatgctgcctttctctttggcacaatgtgatgcttgaagaatgctactgctgcagtgctgcgtactgcacggctactgttacaaaggcccacagaatgtgccccctgaaagatggatgtttcttttgctctgtacgtgcagatacccaggaggaggcagccacggcctacgacctggcggcgatacagctccgcggccgcagcgcggtcaccaacttcgacgccagctgctacacctacacggaccacctgccgccgccgccgccgccgcagccaccgtccgtctgcaagaccgagccggagctggagccgccgcagccggcggcgcctccaggctcggagtcacttctccggcccaagatggagccctgcgacgactgggagccgccggcgatttgcccgtcgctccgtgacgcggacgacgcggaccacgccatcgccgagatcctgccggcgctctgcatggaccgcgccgacttcgaggccaggtaccctgcccgccgcgcccgcgacgccgccgccgacggctggtcgacgtcgtcggacgacgtcgccgccgcctccgtcgacgatgacgtgctgcgtagcctgccagacgacgtgggcttcgtcgacgacgtcgagagcctcttcctggacgcgcccggcccggccgccgccgccgccgccgccgcgatgccagacgacgtggaacgcgcggtgcagcgcgcgccttctgccgcgtctcgtcgggccaacgccgcggcggtctcctacgcgatcagctcgttggcgtccgggcgctggtggtattgacatcacgtactgacgtacgtgtcggtgtcacgccatgtcgcgcatgcatgcactgtgtttgcacagcttcgcaaagttggtgaaactgcagctagccagctatagttagggtgttgcgttttggtgggtatgatgtgaagtgaagtggagtagcttgagcttgacaagcgtggtccaatttttggcgagtaattgcgggcgatatgctagccaggagtatctgcgtggctgctcgatctcattgtagtacgtgaaagtggaagaaacaggagaaggctcacacttttgggtgtaactccactgtggtagcgagctggttttggtacttgcaccctgtcggattcgggtataattaagctgccgcttgtccgagttgaatgttggcgtgacaagttgacaactccacgtaagagtgtgacaatcatgttaggccattcacaatacatctacatggcatttggcctcaattgtccagctaagcagattgtatacgtggagaagaaaagaaggtgaggcccatatattcaccagctccgcgcgtcctcatttggctccgagagcctcgtcagaaaaacagcttttttaatcgtatttgcacatgagaaagcatgacacagagagagaagggggagaagctgacccaaaaaagtaaatttttgtggtggggcccacatgagaaacagtttggtggggtccacctaaagacacgcgtccacgccgcattgtggagaggggagcttcacgctgtttcttcgtacgtggctgtttaggctcctcagaaaaacacgacgcagtgctaatgcctttaggacttaggaccctttgcggcagtagtggtaaacagaagtcatgggtgatcattggtccgatgcttcaggcgaaaccaattcccgggcgaaaccaattccaggagtgtgatagggacagaaaaacggtttacaaaattatcatgtgcggtaatattatcggtttttaaaattactatgatatacctcgcagtaatcacatgatttcacagtaaacacaaagttactgcggtaacagcattattttcgcgtttctaaaactactgtatatctcgtagtaaccgattttcacgagaaagaaactcacggttaccgtgataaccgttaaactttgagtgatgataaactcatctaaaatatatagtttggtgtaccttgttcagtaaccgttaaatcgtagggtaacggtaaatatctaaagcagtttggttaaccctactagtagctactattactgcaacaagctagctacgtgtacatacgtgtcgcgtgtgagcagaatgtatagtattggttaggagtacttagtagtagttggtacagccgtatttggctactccaagctcttgttgatttgacaggagtgtatagttacgattccatcaatgcatgttggtggtgagtgttgcaccgacgaacatgcgtgacattaaaatcttgtcgcctgcagtgcaggctacaaaatgaacctgtctagagagatgcggcaggctgcaggctgatcgctgacgtctgtaccggaggaacagtagtgagtagtctctctcgtgtggatgttgagcagcgctctggagataaaaggagttctaaactttttcttgaaacttttaatttttctatcacatcaaaatttttttacacatataaacttttaacttttccatcacatcgtttcaattttaaccaaacttttaattttactgtgaactaaagacaccccttgggttatatctaaagccttccgttgtaagcaaggtctatatatgaaaaaggagcaaaatttggtcgtgttggggtcttgggggtggctagtcgctctcttaagatagctgcattgctaagcttcctccagctatatattgaaacattctgtttttggcgaacgtacgtgcgggaggagttcagccaacctgcatgcatgtatgtatgtatacctggttcgcgctaaataaattaattcttactcgtcgaataaacgtatatacgtataaagaaaagtaagatatcgatgcttcaccataaaggagctttgtgttgaagctaggcctctagaaaacagaatggtcttaaattctgtcaaactaaaattaatggtctgtctgaaagtggtggaatttcacttagaaaagtcctgttttaggcattactcaaattttataggaattaaataaattaatttctagagtctgtacatataaactgtgtgtataagcttaaaaaaggaaaccgcatggtgcacgcgcggtgggcatgcacatgaaataaattttgaataaaaactatatgctcttaaaccacatactaaataaatgtttataattaaaaatgagcatacgcatttttgaaagaaaaaaaatgagcattcatatcataaaaagaaaaccaacaaacagatgagaagtcaaacaagttcaacccaactgacctgttgggctgggccgggtcaaacctgtcaacctacaccatccaccagcccaaagcgaatcctatcccatcattccttcctggctcggggagaaatgccgcccagaatatcgatcgcatcgaatccagtcaacttgctcggtgtgatcccacggcggcagccgcaagccgaagcatcggacggacagaaacgactgcatccgtccacgcgtgcggctcgtgacgacggtggtggggctcgcgttctctcccccagctatattatctcacacgactcgtgccacaccgcaccgcaccgcacccgcaagcgcaagcccagccgcctcgtcgtgttcgcgttcgtcgcgcggctccgacctccaaagccgccgctacccttcccgtcttcgtcgtcgccgcgcacgcagatcgcgaaccagcccgcgcgccgcgcagcagcgccgcggagaggaaaggagagctccgccgcgcaccccccgccaccatcttggtgagttgcccgcgcgctctgctcgatccctctcgtcggagctcgcggatctgcccgctccggtggatttctgttgcgctctcttttttttttttctaaatgaaaattccgtgcgagtctgtggtcgattccgtggagagatgagtcgttttcgttgctgattcggtgatggaggcatgccgcgtagtctccacgctactattggcggggggaatctgttcgagccttttcgctttctgcttcgggtgttggcgaatctgattcgattccgcggctttgcgccccgtcgtttcatggatcgaacagcacgctatggggatgtgggtgtttagatctcccggatctcgtaccttgggctcatcaatttccgcttagttctgtgtgctgtcaagtgagcatgggcgcgtggggatcggcgcgaagtctgcggtgatctgtgttgctagctgagacttacctgtgctgctgaatttttgttttggagcagtagggagagatggggctcacgttcacgaagctgttcagccgcctcttcgcgaagaaagagatgaggattctcatggtcgggctcgatgcagccggtaagaccaccatcctctacaagctcaagcttggcgagatcgtcacgaccatccccaccatcggtaagcactctgttcatgtccttgttcttcttaatgagctgtcttagctgtaggaaggtactatgctgcacgtttatgtacaggaacgaacttttaattacatggagtgatggagtgagcactagttctgtttgtagaaacaaacttgaatttaaactctacatggagtgagcactagttctgttatgtagaaacaaacttgaatttaaactctagtaaggaggaatagttagcacgagcttgttcgtattataatcacatagcaaactttgatgttaaggtattggatatcactttggctacaaataaatttactacttgaaactttggttagaactaagccaagcatatgctactacacttctgtagctcttaatggaaacatctgtaattctctatacttgtgattattcttaatgatacatatgtatgcatctgttcatatggactccttttattgggtcattatgataatgtatttgtatttttgccatgtggcttcattgcattatagttttaataaatgaaactaccttattctggaaattttcaggatttaatgttgaaaccgtggaatacaagaacatcagcttcactgtttgggatgtcggtggccaggacaaggtaatagagtcagcttatagttagaaatcataactaccatttgttggctgttcctagcccttggggtaaaccggaattgaacttcttttatgcattgatgttgtcgtgctaagctgctaatgctgtcatgaactttcccaacttaattcttttattgatctataaatcaaaacagatcaggcccctgtggaggcactatttccagaacacacagggactcatctttgttgtggacagcaatgatagggagcgtgttgttgaggccagagacgagcttcacaggatgctgaacgaggtaatgatttttgttgtagacttgtagatatttggttgttccatagtgttcccagtctgcatatattgaatctatttacgaagcgcttattcgacattattgcagctacaaaattggaaaaaagtaagttgcttgtttggttcacaaaaatcttaggattttccatgaccttgtatgaaaatgctaagatagtagttgaaatgctatgaatcagtagtcatttttgttcaacctatttgtctgttgatttatttaaaacttactgttagaaataccagttccctaaattatcataaaccaattaattccatgttaataatgagagacccttctgtgtcgcaggatgagctgcgtgatgctgtgctgcttgtatttgcaaacaaacaagatcttcctaatgccatgaatgcagctgaaatcactgacaagcttggtttgcattccctgcgccagaggcactggtaaggaactccatatgaacaattcaaaagttatttaccttctaattgcttggtcagagttatgcagctctgctattctgcaaattatcagggtttacatattggacatgctgaaaacaacacaactagatctgtttgcaagagtatagtgcattttttaatgggttaattggatccatgccattacaacttcttcgattttgaaaaacaccattactattcgtctatttggagacatgtatgtgacacactctagatgtttttgatggtttatttagtcttgtggttggggttgaatgttacaaatgctatttgcatctgcattatggtttacacatctattgtgacactggttaccttttgaaatttatgaaatatgcatcatgtcattaaaatatttgtttcctggtgtcgcaggtacattcagagcacttgtgctacatctggtgaagggttgtatgagggtcttgactggctttccaacaacattgccagcaaggtatgttggcctattctaatgtcttagtctctgcttttgttgaaggcctattctggcctgaactttggcgtttaacttagggatagaagaaagctgaaccatgttactcgagcactgcctttatatacctcaataaaatcgctccgagtacttggccttaaaccttaagcatctgcagctgatgacatgcattttcattatttttgtgcaggcttgagcgttttggcagctggatatctgaacaattcactagtgccggtttacatattatataacatatacaccctaccacacatagtgtgggtgcctgtgaaggaaaaaactcctttgtggaggctagtaccagattgttccttttcgtgggcactataagtgcttatattttgtttggttttacaacatttactgtgctgtccatatgtacccgtttgttctgagatggtctagtaaattgatatgctttgtcacggacttggtgtgagcattgtattttagtttttctatgatctagtgccagtgtagatattattttcctcagcttcaaacttccgtttttggttgtcgacatcgttgttgcgtcacggatgcttgcggtgaggaaagtgatgaggtatatggttttctgactgcatatgcccattggtaattgtgacattgatacgccattgctgggttgccacaaaccaacaggcccgattgcccactgggtgcgaggtttctgtgagacagaatcacaataagatgacatcagtcaagaataatttgtaggtcatgtagtatgggtatatacactatatacgttgagtacaggaaacacgcattcattgggatgttgtaggccttgtgcaaaatcttacgaaacaaatgccaaattgaatatctgtgtgtcaagtggtattcagtactaccagttttctgtattgagtaatgactggcaaagataaaaggttgcctcagatcattacatgtctttgcttgacggaaagacaagcaaaagctaattcaaagcatcacctcttctgtttaagaaaggcagtcacgtcttatgcaagtcattcattcaagcaaatactaatgaatttgttacaccacgctttggggtgttgtacaaagtcgtcacggcagaatatgcagacaaaactgaacattgatacgaactgccgagctcgtcatgctccccaatcaaccgaagatagtcactgtgatgctgccgtgacagatatccatgtgtggtatactccatgagtttttggcctggaaagcatattaccaatgtaaaagatatttctcttttccaataataaagctatatgttctgaatcaagtaacagcatggacaaaatctaatgatgaacatgtattgatattcattttaccaa

SEQ ID NO: 8458 - DNA, 4220 bp, Oryza sativa
tattctaagatcaactaagcatgtcgacagattaaaccaagaacaccaaagatggactgaacaaattgtttcaagcctcactccttattgccaagccaaccggcttatcatctacagagctttcttggcccatgtccaagaagccgcaaacgaagcttgagcgatgcaagcaagcaagcatatgcattatgcatccactcacttaccctctccatcccttcccgcgccgacggcgtctgcggcaatgtcattgcccacggctatcaacctctccttctcctcctccgcagtcgccgaggcggccggcgcatcagacttctgcgacccggttaacctcgcgagtagcacgaaggacatgccacccagcacgttgtttatgcaccggagagcaacgacggacaccttgaacaccgacggcggcgcggcgttggcgagcaggtactcgacgccgttcagcgtctggtaccgcaggttgctgctgacccccatgtggatcgcccaggtagcggcgttgagcagcgtgggcggcgccttgttcggggtctcgaacgccgggtccatgcgtttccgcagcgagatgaggccgttggagatcgcggtgccggcgagccccgcggcgaaccccacggcggcgaacgtggcgcccttggatagcagcgtcgcgacgcgggagcccaaggagtaggcgccggcctcgaacatgtggctggggagccccgacgcggcggcggacgcggcggccgaggcgccggcggtgggcgcgaggaggtacatgaggacgaagttgaggatggatccgacgacgagggtggagaagacgaagtcgagctcgttgagcccgaagttcgggcgggacgccatgtcgccgagcacgcaggcgctgacgccgacgagctcctccatgagcaccttgaacgggaactgcggatccgcggcgacgcgtgccgcccacccggcgaggaagatgccgaggatgccgccgctgctgcccccggaatccgcggcgtcgccagatccgccgccgccgccgtaggagcgcggcggcgggggcagcctgccacctggcccagacggaccagacggggacggggatcggaggcggaggaggagggcggacgacgacgaggagagcggggagaaggagaggctaccggcgcggggcggggagaggcgcggggaggagtcgaggtgcgtgggcgccgtggcagggaggaacttggcggcggtgaacgccatggaggccatggcgatcgggaggggagggcgccgcgcaggcttggcggcggcggcggggaggagagtgagatgggctttcgatgggggaagaagggttttggtggttggttggtgtagtgcaggctgtgctgtgcaggagtggtagtgaaaggtgtttggtgggggtgggtggccattttgtactgtacaacatgcgatgcgcttgcaacagaacgacggctgcacctggacgcgacgcgagagcgacgagacctactccttctgattggaaaaaatcgacgcatatgattctcgaactgcttgaatgcaaaattggaattttgccgtttcaaaattgaagtacggtgatttcttctgagattgtctctgattccaactatggctcaaagccagattgctagttatggctgtgtttcggaggtatgggttgggaaaacgacgtaattcctctgttgcatcaatatgaatatagtaaatgctagaatgatttgcattgtgaaacggaggaagtaatagtttagcaaataattaattatgtattatctaaaaaaatgaaaaatggattagtatgattttcttaaagcaaaattcatatagaaaatttctaaaaaagacactctgtttagcaatttgggaaccgtgcgtgcgaaaagaagttgagaacttgcaaaaaggaacacagcataattagaatgtttcacagtttcactgtttcaggctgtcgcgttttttttttgtcaagtttaggtagagttgtcaagcactctggcataacatgcgaaagtcagttatctagcaggaattgtcagaacacacgcgaaaacatttctgcattctttcagggataacattcattcagggagaagaaggatgctcttgcggctgtcaatagaaattagccactgcttcagagatcaatctgttgacatggctatgttgtcgcaaacaggaaacggaaaaccttaagaccagtatatagcagttacagagcacataccataaaggaaactgctcatcacatcagatggagataaagagaatgttaccggttacattttcataacagagcacctctttgggaatatacaacttatccaggaggccagttcatctgacgtccccctagaagatgaatatggaggtgatatacagactgacctacataacacagaaaaagtcagtccaactatcttaataagaaaggcctcaccgtctcaatgggatcaagcttatgctcacatccgttaggcccatcattgatgacaatcctgaatccatcatcaaggttctcctgctttgcaatggtcttagcagcgtaaagaagatggcccataacctcaacgtgtctttcttctgcctatgacaattgaaataggtgccagttgtagtatcattcagcaaaataatgtggctactcaaggatcatgatttgttgaaatgtgatatcatgattcttataaattattttaccacaatcaacgtgtacacggcaagtcggcaagatatattaacatggtagatgagcggatgacctgcgtggcagtgcccggcctcttagcgagttggtagagttttatagttactaatccgtagtatgttacggacatgaggatgaaaaaaaagtaaaatgttgtgttagatccaagaagcctaaggtataatattgaacttaaggtacaaagctacagagagagagagagagagagagagagagagattattatccattagtaaaaagaggcaatagtctactattttcaagcatctaccactctgccataacactcattctagtgaactgggtacatagctcactgtgaacttcacatatgaagaattcaagatggaatcaactaaatagaacccattacgatgtttaaaagataagatgaaactaagtacctttgagagcctagacaatccatctttaaccttgggaattattataatatgtactggagcttggggtgatatgtctctgaatgcaagggtctgcactgataagattcaaaacgtgacctattagcagctcattttcattcacaatcatgttcaagcaaacaacaaacgaattagttagtacatagcagtgattactaattaatgcagataccaaagttagttatcacggggaccgagccagaaaactagaacagttcttttcatgaacactgaatggagagaggataattaaccttccatatcaatattagctgtgaatgtgaacaaagaattcgaccacggcacaaaattctttcaggtgactagtgagataaatataaatgaaataacatgtacatctcgaacctttctttggaaccttcatttcatctaatgtgatgacacacaaatctgttgtgttcccagaagatgagtaatgctttctcccgcattaaaaaaaatcataaaaccggttaaaaagtatactttttttttatttaacttcacgaaagcacaactttgcaagaataaatattgaaaaactaaaactaaatcatatgacattggtcccactagtacgacaaacaatcaaacttccattagcacatgctaagttgctaactctggaacggctctctgtgataatgcctttgttgagcagcaccgccttgatgattctcacctgctccacctttgagccctctattttgaaatgcgaactgaagggaaaagaacatgtatcgctatggttgataagtacatccagatgtagcggggatagggggatgagttggcatggccgttcattgtgtgcagcttgcccagttattgtgtactaagtaggaggtggggtgtggtaacaggatgactccagatgtccgataacaggatgagtgacagtgttgtagattttcaatagttactgttccaaagttgtagttttgtgaagttggaacagaaggttgtggttttcttatgacaattttgaccccaaaaaaataagtcgttgctttgtgaaatttactctttcccgttttggagaa

SEQ ID NO: 8459 - DNA, 6178 bp, Oryza sativa
ccgcaaaattttgtcaaaactgcaaggaagagaaataggtgtctgaatgaaaggtcaaaggtcatccatggaaatccacatttcatgaaggggataaaatagtaaacacaaccagaacaactgtggtaaagccttctcaaagaaaatagatgaaaattaatattcagcaaacgctgactagtaggcagattttagaaatgtaagaagcttgacctgctatgttatatagtagtagttatcgcagaacaattctctacaattagatatcatgcaagaataaaaaatgcatgttcatataaatatcacttgatgtgcaggaactcaacttctagtctacatgggttgttgtattaatattttgtacttttgctaccagatgctgatgcaatcaagcattgctcaattgttatgtggctctgttctaataaatgagcttctgttgaagaattactctctccgtatataattggtggccacagctgcactgcagcatgagggaccatttgaataagcccagtacagcattctacatttctcagatatctcaagatctcgattcattctagaaccaggtgaagttagttactattagctatccaacataattcaaatctaaccagcaacccagacatccaaggaaaatgcaggcccctaactctgagcaagaatattttgcgctgatctagccctgatcttcagatgtttcttcccaggatgtttatagctatgcaaacgcaccaaaatccattattattactgcacttaacccccacaagcagtgcttaacctcccccattatgaagaggatcggtttctgcagtgtccgcccataaacatggatgcttacaaccgaaaaaaaaaactaagcaccggtttgatagtttgatctccttagcgaatcaactcctcccacataatcaatctaaagggttattcaaattatataacgatcagaactgcattaacctaataactcatgctcgagctacatttttgtacaaattttacagcccccggtaccgaaactgcacaatagaatctgttcatccaacatccaatatcttccgtgcgcttactagaacaaatttctcgcagaactggtcaagtgaacaagacatcatgatgcgcatagatgagagagagagatacagagagactgacatggttggtccgtcggaggggccggcggcgagtgcggcctccttttcgccggccgtccgagaagattgggacaaatgagacgcgagaactgcgaggcggccgccgcttccgctcgccggcggcggcagctgcggcggcggtcgactggcactggcccggctcatcccttccccgacttcctcgcccaatcgctgacttactgctgcctccatcaccgtcacgctcgcacctcagcttttcaacagatttcccgcttactaaaggtcaaaacgtattttccagctttacgctatgttgccagtgtaaacgtacacgtgaaagacgcctgcacagactgctctgtaccgcattacaaccgctcttcttaaaacgatgctcccaacatactccctaatgtttgacgccgttaacttttttaaaaaattttgaccattcgtcttatttaaaaaatttaagtaattattaattctttttctatcatttgatttatttttaaatatatttttatgtatacatatagttttacacatttcacaaaagttttaagacgaacggtcaaacatgtttaaaaaagtcaactgtatcaaacatttaagaaatgagggagtattttactagtgctctttactagttcacttattttggaacggaggaaatatacaataagcatttaattactactagcttattgcatttaattactactagcttatttcagatcgaagaagtatatataacaagcatttgattgctggtgttaatccgaactcttatgattctcaagcccacaacatatgagaagacccgagctgccaagggagcaagtcctatcaaagcatcaatctatcatcatctggataatgtgagaatgacatatacggatgtttttttttgttttcttctatagattctgatttgaatgggatgagattcgtgctgtgaaaattacaaaaagagagaaacaaatcgcatcctagattccaagagtaaaagatgtttcaccaacagatgctgctgcgggaactgttgctcgaaatggcatctgacgaacaccgggttcaggatgtgatgcagtgagtacagcaggggcattcaggataagtatgtttcagcaactgatagcagatgatgttggagacagacagcgacatatgaagttaaccaccatttttcgcactaacataaattagccaaaataattatttctgacaaggatagatatctcaacaatcagatcatagtccagctagttctatccagaaattgaattttacagtaatgttacaacccttcatcttagtgaagtatttgggcttaaagattgcatcctccttgcagttctatggaagagcagccgatgtcaccaccaagtataagaaagctctgagaacctagatgtgtccagcaaatttacatactcctagctaggaaagtagcaaggcctcagaaagatagcagtgctaccagaacacatactaggctcctgctaatctacacaatacaaatcactaagctagacataagccaagaagaagctaggaaatgattctaaaccccaggaggcaaaacttacaagcaagagcacttcaaaaactataaaataaaatactgcgggcatgatcagaaatctgcggagcttgttctcctgagttgatacttgggttctggtacaggcacagcgcaaattaattcatccaactcctgaagatagcatgagaggggaaaacaagtcaatgctgtgtatggataagtaacccaatatggcatcatcagaatacaaaaatatatggtgtaaaatatatggaacaggacagtgtttggctgatagtaggattaagcacaaaattagcataatatatagtactagctaaattgatatccagtggcaagtgctaaaactttgaattatcattaaaggagtactactgccaattttcttgccacatcagatgcactgaaacaatgtggtaccagaaaaatatgaaatataaatagacatgagattaatacttctagctttccagggacatgattcagtccgttggatccttgctaatcttcctatagtacgaaggatgcttaaaagacgcatggccatccagggttaatgggatcaaaataacttagaaaatatcttttattgctaacactgctttgtttgaggagctaaccaattagtcagagggatgcaatatgttagaaccagagatgcaatatgttagaaccagagtccacaacagtattctgcaagcagaattcttcaaatgccataggtaagaagttactttattggacagtcatccaaaagttgacatgcagaagacaattcctacacacaaacaatgaccatgacgaagacctcttgattgtaacttgatacactacctatgaagtagtacagctcatcataccagatgataatattgctgttgattagactgcgatgtatttctatgttttccatcacaagattactcctagtataatgctgccccattttattatcgacttagagtgaataatagtataaggtagtcttttcgaagatatttaaggaaaaatacaagatacccccaatatccaccagaaaattagtttcctcccttcaggcacaaataagatactggctcaaataaatgcttgacgggacatgcctaataattagatcaactaatagaatgaacagtatatggctcactcctacagtcctacctaaaaacagtcacctcaagtggtggaagcaaatacttaagattatattattattatagagctgtgaaaacattgaaaaatcataaggtgtagtaaggccataaaagggtcttagtgatgtatgacaagtacatatcaacaaggtagcttgacaatatgaaatagtaaaaactagacataagagacagtacaagtgatagtatttatttcctgtcacttaccaaatagtctgactcctattcagaggcagaaagtgaagacaaattagggaagaattaattggttaatttataggacaagcatgcaccggggaaaaatacttgataggggaaatttgcaacattctgatataattgcagtggaaaagacagtaccttttgcctctttagcctcacattctcctcttctaaacgagaaaccttgttttcaagttcattagtgtaggcctgtcacaaatgaaatgtaattatgcaatcatgtgggtaatacacaaactcacaggtcacatgaagaaactaaatttaaagtaacagtggccttcttaatcatcatatgcagcaagaacaatgctaattaaaaatttgccacaaatagaaaggtgtaaaacacatattgcacctgcttcctggctcttgaacgggcagctgactccctgttcttgatcatcctcttctgccttctctccatcaacttatctgccacatcccctgacatgcctcgcttccttccaggcgtctgcgaatcggacattccgccgatcattcctgaagaagtctggccatcagagtaggatggctccagaatagcaccggggccaacattaagtggctgagggaccaatcgattcggaaaataagcaccctgcacaccttgctgcccatggtgatgagcatcagtagatgcaatctgctgcttatactgctctatccagtgtgatccaggtgccagatccacagtcccggttgctgtaacacctcttccaaccggatccacattgcctacatcactaagctccttgagagatccttgggtgacaaccccagctttgaccaggaaatcctcgagcgtcacctccccaagcgtcggctgcctctctcgccgccgtcgacctccgccgccgccgccgcccgtttcggcattcctcttcggagcagcctggatccccttccacacctcgtccaccgtcttcttgctgagctcaggcggcatcgtgatgctcccctgccgcaggaggcccgagcccggctgatgctgctggctactggtggtggcaccggcaccgtcggcgatggccaggccgtcagggaacacgctccggagcagctcgtcgaggttcatgctgtgcagcggctcgcccagctggctctgcacctcgtcgagggtgaggctgtacatggatccctgcctccccagactccgcatccgccctcctccgcgccgcgcgacgcccccgcctccggccttcgacgccattgtctggctccccatgatcgagacgagatttctgctgctacgaggtaaagaatggataccttcacaattgaattcgatccagccgcgttcagccccggcaggcagaccgacctgcttgtccccggtcgccgcggtgcaggcgaggaggtcggtcaggccaggccgcgcgcacaagggaggagcgcggcgtcggtaagggagaggaggccgtgcacaccgtgcgtccgttggccgcgggctgcggcccttctcgccggcggccggcgcggggcgaggagccgaggagacgatgtgcctgcggctcgcgctgccgtttctgtgtgtgtgtgtctctcagtcgctcttgcagattggaagttgggaccagggaggagtgtagtagtaggtgcgggaagagagaaatagatatggagatggaagcgggggatgcgaagtgggggcacgttggctattcatcattttctcgtgtcctttactgaaaataaaatttggttcaaacctttttctttttttatttgcctttttctatctaggaagactgatattagaaaactaaaaagagccactagaactatcattcgaataatatccttgtaaaattaagaaaacacggtgttaaatgcttgtctataaacttctgattacttaatatactgcagtgggaggctcctgctgttttccataaaaaaaatccaaaatgcccttttttatggttatattaattaatgtgaaaattctataaatttcacttttcaaaaataggcatatttttatgattattcgatgtaattattataaagttgaaaatggatttaaaacaatatccaaaaaa

SEQ ID NO: 8460 - DNA, 10818 bp, Oryza sativa
attcctgcagccactttaggtgtatagatttactaaaagaggaaaagaaaaaaaaacccgatcgctggccgcgattgatcgcgcgttagccttctcgaagatcatgcgtgttatggtatagaatccgaagatacaaaacattagtactccattcgttttaggttataatgcgttttgaatttggtcaaaatcaaactgttttaagtttaaccaaatttgtagaaaaatgtactaacattttcaacccaagacaaatttattatgaaaatatattcaaatattgatttgttaaaactaatttagtattataagtatgattatatttgtctataaacttagttaaatttgaaatagtttgactttgaccaaagtcaaaatatcttataacctgaaatggaggaagtagtattactcattatctaaatattgtattgggtgagtctaatttgagctagttctcagttaaagaatgatgtttttttctactagttcatagcaaataaacccttcactcaatcttaagttgagaaatagcttaagaacgagttgaacttggctgatatggctggttgcaaatccatatcggatgaaatgggctgaatgagctactaacacacgcggagggcgcaatttttgacaagcgatgttgaggtgggtgggtttttttaaaaacaaaataggttatgggcataatcttaaaataaggataataattatggtggtttatacaatttttcgttgtttttattctatccatgctcatccatctaatcaaataagaaactggattatactgtccattcaaccaaacaaaaaattaaccaccataccttatccctaaaaatataaatagctatagcccatccattcttgactacaaatcaaatacatcttaagtctatttaataaaaaaataaataataattatataattttttatcaaattgtatggcaaagatgtcatatattgcatacttttttttaataaggaaagggtcaaattcattacttgtgtgcttcagttcacataatagatacaatgactttcaatatcacttagaagcccaactaaaataagagaaaatttcgtatatatccctgaaactttgtctaattccttctatgtcactgaattttgctaattcccttgtatacatttgaattttaatttagatccttccataccatttccaatagttgaccaattcttatgaaaaaaaatccattgtaccttatggtatgaaaaatatataaatttttggagtatagaaatttgttgtatgagacttttatatccatgagtttctaatgtgaaatattatttataaaaaaattattttcagatatgacataaaagatttatatttatttttaatatttaaaattgtatatgtagcttattttctatagtagtacaacatatttgaatctatttatacgctacagtaaaataatttgataacaaataaattaatattattttttatgtcatatctgtaaataaattttatgataaataatatctcgcacaacaaactcacatatataagagtcttatataacaaatttttaccctccaacaatatattctataattttatatgtttgagttacaccaaaggacaaaatggtttttttatagaaatttaacggtcaactaacgaaaaaaatatgataaaaaatctaaactaaaactagagaatgagtaaaattcatggatacaagggtacaaggagaattttctcaaaataaaacatggtgctgaaatgctgaatgacaagcgttaattagtacgatgattcttcaattaattacacagctctagtgtgtaaaaggaactacgaaacgaaaaactattgtgtcagaactcagaagttaagttgtaatcgctatcatccaatcaataggtaatagagacagaatccctactccagttgtcatcactgtatcagaaacgaacgtgcagccgtatcatcatccaaccaacagctgaagcctaaacacacaaccgaaccaaaatttcactcacaccagagacaaagatttaacaaatttgctcaactaccgatcgaatgagtctgcagtacagtaatattcttcaacttggatcattgacatatagatctgttggttataagctcatatatcaacagcttaaaactagaggattagtattgtaaaggacgtgtttccctaccgaacactgccatccagcagaccaatttgcaacgatccaggaacgaaatgagccaccaatcaaagcttagtaattcggctgtaaaccggcctgtccctcctgtgcacagcaagtgcttggagcacgaccagcttgcgcaatgctcgtttacctgagaaacgctcaggagtttttcggctaactccaaaaggtagtgggctagatgatttggattcgaaatctcaccccttctaattatttgatattagattcttccctaatatttacgttcttttttcaatgctcgtttacctcggtgagacgcccgtgccatcgccgcaaatcggtgagacgtccgtgccaccgcctcgccatcgctgcaatcgcgctggaccaaccatcgtctagcaccaactaggcaactaccaactgatagtattatggacgtcttaatattgtcttcccgggctggatcacaaacatctctgatctctctgcagaaacacaatcgtcgctcgaatctgcttctcattctttttttcttgctgatcatcatgggcgctgctgctgctgctggcttcttcttcgtcctgctgttcctctctgttcaaggtggtgctgttggctacacgagaagcgattttcctcgggatttcgtctttggagccgccacctcggcatatcaggtgacgaactgaagatttgtctgaaccgaatttcccttacccggttttctgaacagtgcgtgcctttgttgtgcgtgtgcagtatgacggcgctgctgcagaggatggcaggagccctactatctgggacacgttcgcacatgaaggtcagtttttttttttgggttgctgttgtgcaacttgtgctattcatcatctgttcatgctcatagtcatatactccatccattccataaaaaataatcctagtatgaaatgtgatacattataatattatttatctgaatttagatttttaaagagtgtaaatttgatcttcgtttagataaaaattgagaatttaccttcttgacccatacgtggttgaccttcgatggccacatgtcattggtgacagatagagccagtggtactaataagtgaatagtgacaatatttttattggcaaaatttgctacaggacaccgaaagattgcggcctttgctgtgagacacccgaagatcgtgtatttgctcatggacactacaaaaaagtggtaactagctgcaggacacttctcccattattttattatttctggtcaaaacggagagagagagctgtgtaagtaccaaaatgccctggacacgtactgttcttcctctctctctcttcttttcttttcccattcttcctcgcgacggcagcggaggggaaccgatcgacggcgagcggcggcgggcgcggatgggagggcgctccaggcggcggcgggagcggcacggagggggcgcggcggacaggaagcttcagatggtggcgacagcgggccggcggtcggcgtgcacgacggcgcgcggggaggtggaggggatgggggagaggcgggcgccggcgaccatggcggagaggtcggccgtcgtggcgccggccgctgcctccgtcgccgcccgctcggtccgtatcctcctcagccaccacgagctctgcctcagccgaccgccgccaggcgagctccgcttccatgcgaccaggccgttcccaacgctacccaccatcgtcgtcactgcgggaatctctcggaggatcagagctcgcccgggcggctgactcctcgcgcattcccctttctcgctgtcgcgaccgccatcccccgccccagcggcagagagcttgctccgcctggaccaccgccgccgcggcctcacgctgtcgtcctcaaggtgctgccggccggcgccacgacggcccgcctctccgcgatgcacgccggcgcccacctctcccccatcccttccacctccctgcgcgtcgaccgccggcccgcccccgtgcgccgctgcccatcacatcccctcacgatgaagaagaacagacaaagagaggaagaagaaggacaaagaaagagattgacaagtgggcccatgggcaaacttgtctttaaccaaagtttctctctccattttgatcggaaataataaaataatggaagaagtgtccagcagttaattaccactttttttagtgtccatgagcaaatacacgatcttcgggtatctcatagcaaagaccgcaatctttcggtgtcctgtagcaaattttgccatttttgtttgtgcaatcagggaaaacgaaagacaaaggtacaggcgatgttgctgcagatgggtaccacaagtacaaggtacacggttaaatttctcagagagaaactagcagcacgtcatatttgcaaataaaaaataatttgttaataaaaattttatatacgtgttcttaacgatttaaaagcaaagattaaaaaataaactacgataaaaaaaacccaaatcaacttatttttcgccaacgcaaaaacaactccaaatttagggcccatttgaatcataagaatgcaaaaatagatgaataggaaaaatgcatgattctaataggaatgtaagtgcaaaacagataattacaaaatacagaaaaaacacaggaaggaccatttgattggaccgcaagaaaaacgtaggaattggatgagagagatagactcaaagataaattttcaaaaggttggagctcttactaaattttctctaaaatctctataggattatccgttccataggaatttcaaacgataacataaaattcaatcatttgtttcaaaggtctttatagaaaattttactatagaatcgaaatcctccaaaattttccccgcaaaaaaaaaagaaatcctccaaaattcccatgtctttcctctaaatcaaaggagcctttaaggttgaaaattttaaaatttagctgataagcataagtataaacaaaaagatgaggccatcaggccgctattggcttgtccacatattgtctctctatgtgtttcatgtcttacagacatgtgaacgcgcctcactattgtagcaaattcatgtatcttcaaagttctattcctgacaaccgactaaagatagaaacatggttccttaagttccatccctaatgcttcaccaaatcgaaatgagaattatcatcttagttttttctcctttccttcatcaaaacataaggcctaatttagttcccaaaaatttttctcaaaaacatcacatcaaatccttgaacaccctaatggagctttaaatatagataaaaaactaattgcacagttcacacgaaaattgtgagatgaatcttttgagcctaatctatgattagtcataagtattacggtaacccacatatgctaatgacggattaattaggtttaataaattcgtctcgcggtttccaggcgagctatgaaattagttttttcattcgtgtccaaaaaccccttctgacttctagtcaaacatccgatgtgacacccaaaaattttcttttcgtgaactaaacaatgcctaagttgaaaacttcggcttgtaagaactttacatgccttcctttttcagggtgatgtcaagctcatggctgaaactggcctagaggcttacaagttttccatctcctggtcaaggcttatcccaagtatagctatttctactcaaaactaaattcttgttaataaagttactactagtgtaatatgtatacttaatatgcagatgggaggggagctgtcaaccaagaagggctaaagtactacaataatgttattgatgagctagcaaaacgaggtaaatcttgcgaatcccttttacaaactataaatattgcaaagcgaaaaagaactgaaagaactttcatggatgttgattgctctgctttcttcaggaattcaaccccatatcatgctttgccatctagatctcccacaagctctggaagacgagtacgatggatggctaagccctagaattgtgtaagattcaataaccatctatatgaagtacaaaaatagtaggagtatggtgatagcttccataggatgagctctagactgctgatcagtagcaatggcacaatgcagggatgatttcactgcttatgcagatgtgtgcttcagggagtttggggacagggttttgcattggactactttggctgaacctaatatcgctgcacttggaggttacgacacaggagtattatctccaggacattgctctgatccttttggattgaccgaatgtacagtggggaactccaccgtggaaccatatataacagctcataatatgatactaacacatgcggctgttgttagactgtacagagaaaaatatcaagtgagtaatcatgtgcttaagaataccagtagtgtattttttgaatgtatttatattctctagggacagtactaagcattgcataggtctgatagaagttaaacagattatgttcaaagatgtagtgtatgattttttttttacaaaaataactacatgcatgtccagattcccttcttattttcttgctgttactcctcttatgtgaattcctcgaagtgctctgaaactgtctttcatgtaggctctacaaaaggggattgttggtataaacatgttttccttatggagttatccattaacaaactccattgcggatttgcaagcagctcaaagatacaaggatttctcgtacggatggtatgatcaatgttgcaactcttttatcttcacactgaaactagcggactgcacaattttgcacaaagctagattttatagaagtttacgactcttgcttccattttcatatataaatgcctgtatttttatacaattgtattgataaagcaacactattataatataaacccaccaaaatcaatcggtgcacatctttctctttttttcccagttaacgtagcaatttttagaaatgaacctagtggttccttttagctccctctttgtaatggataatagatatttgacatagacaggaatatatataagctcaccgttgaacttacgctgtgttcttatcccaggtttcacaacttatctccctcgttttccgtgcgcatgattttcaaactgttaaacggtgcgttttttaaaaaaaaaattttctatacgaaagttgcttaaaaaatcatattgatctatttttgaaaaaagaatagctaatacttaattaatcacgcgctaatgaattgttccgttttccgtgcgcactgttctggttgggaacaggctccagcgaacacagcattagaggataaacaactcttcttgtttgcaggatactgcacccattggtatttggagattacccacaagtaatgaagaaaactatcgattctcgtcttccatccttcagccaagtccaaactgaactaatcaagggtgctatagatttcattggaataaaccactactattcagcctacgtgaactatcgccctttggtagaaggtgttcgagactacgttgctgatcgatcagtaagcgctagaggttagccaattttctgattttctgttaatatgaacataattttttagctcttttttagataatagaagcttgttcctcgaaaaaaaagataatagaagctttattcataaatttgtagctctaggagtgagtagtttgattcattcatataaggacggtgtatgaagacgtatgtagacaaaaagaaaatcacagaaaatgataatgcatgacatatttctatgacaagaataaaaatacattttcatatcccgagttacttcctccgtttcacaatgcaagtcattctagcatttcccacattcatattaatggtaatgaatctagctagatatatatgtttagattcattaacatcaatatgaatgtagaaaatgttagaatgacttacattgtgaaacggagggagtactttactaagtcatccaatgatgatcctgaaaatgattctacaaattttcagatgggtagttttaccatcattgagaagatacgtgaggtaccatattttttaagtataaaatttggtatcttcatgtactaagtatatctcgaggtaacaaaaattttagtacaaatttaggtatcttaagttactttcttaatgatgataaaattttctttttcataatcacttttactagagtaaaagtattctgtagcttatcagttctatatgtttatgttatgcagtttataaaacggatccaccaacggagaaggtaagttaattttgtcatctctgatttttcttttgagataataagcattgttgattttcgacctttgtaaaaacttcctaaaaatgtgataggatcttagcctagcttagttggtcgatggtgtggatgtatgcctggatcacccaagttatcccgtccttatcgaagcgaatttggatgcctattttcttcttaatacaaagccacctaattctcatagggttatcccatttcttatattaaaaactgaattgtgatagacacgtaatgttttgcattaagtgatgcaatcaataaagcgtataaaagaaataaagtaaactcgaagatcattgtcataatttttttttggtgcggcgataatttcataattgaaatactcttggatatacgtacctcatcctgttggcagtgacacatatatctcatctctttattgagtgcagtatgaacctacggagtatccaaatgatccaaaaggattgcaactagcgttggagtacctgagagagtcctatggggatttcccattttacatcgaggagaatggtaagtacagtttccaagtagagtattcagaacaggaagtacaatatgttggaaatttggtcataattcggcatattttaatccaaaataataagataataaacatgatatttacaataggatttgatccagtgatagtggtgaatgtaatcaacatgagcatgcttaacgttgaataagcatcaacaatcacataatgacacaatgttgacattgcgatgaacattaacagtaaaacttctaattgaaataatgtaataaggttataccccaagaatggtcctccgctggagtttgaggcagtattgcctccgttggtgttgacgggagtctccttctccttgtctccagtgttcgacatgttggtgaagatgaagtagatgttgacgaacagtgagtagtcgcgccttgcgctccccaaaaacctgatcgcccgcccgtctgtgcaaacgtcgcagcaacgcgtggtttcggaggcctactctcccaacgcgtgtgcacacactcgtcgggatgggattaccgtagcagcaacagcttttgaaaatggatgaaaatgtgtcttcttcttctcgcgggagatcaaatccattctcattttataagaggaatggaagatgaagagtaagagtcatggaataggaagaggaatggagcaactaattgtcatcaactagccatgaaccatcctccactacacaaccatcaaccaacaatcaattaagagtaattgatgtaagttaccaatggaataggaagaggaatagagcaactaattgtcatcaactagccatgaaccatcctccactacacaaccatcaaccatccatcaattaggactaattgatataagttaccaattccttaatcaaatggattaattctcaaaactcttcatcccattgatatcccatagaagaatgaattcacatgaattcctagcataatgagccttggaatttatttgatttaattgatttaaatggattaattacccaattaaatctaacaatccccaccaaatttcaaggctcatgagaatgctctctattccatagcagcttttatataccagtgtttcggtgaagactgttaagttgaactttcacctagaaaaggagctacacctgaccacaactgaacaatggactatgccttgaattgtcagtcttgtgcagttaggtttcactcaattccataactgatactaggcaaccattagtattccctcgggttggagcttataagtcatactccaggcctttcatgagtatctagagatcacccaaatctcatagactgtgactagcagtcgaactcatataggtgtgttccttctaagatgttctgcaggtcaacatctctgcttggaaaagccactcggatcacattaagacataagccatcctaccatgcaggaaagaagagaagcacatcatgaaaatgagcccttttcaagggtctcttctctcagtcacacaatagtttgtttcaccatccaaattcacgggatctccgatcataatggacaggtttccactattatgcaaccttaggtgggtatcaagcccatttccctcgatgcactgtctatcacattacgtggtagccccttggtaaactgatctgccagatttctagccgtttggacatagtccaatgctatcactccggagtttttctgctttctgacagatttcagtcttctcttgatgtgtctagatgacttcatgttgtcctttgaactgttcactttaataatcactgtttgattatcgcagttcattaggatagctggcactggttt

SEQ ID NO: 8461 - DNA, 6729 bp, Oryza sativa
acatgattaatattttatgcgtgacttgtctttttatttttttttatatttttttcaaataagacggacggtcaaacgttgggcacggaaatcagggtttgtctttttttggacggagggagtacagttctttctcaaatggtgacatttgataccctgtgtacgcactagtacgcggtgcaggagtgtagattctaatccttcgaggggatatttcctcgtataccttttttttctaaattcgatgcaaatagttgtgaaaaattatgaaaaaaattaacaatgtagagtataatgatacctactagtccaccaaaattcatgttcaaattcgatctacacatcaagaaacaaaaaagacaaatttagatataaatagtacgctactattcatacgctgaatttgtcttttttatatctcgacgtgtgagttaagtttggacttaagattttgtggagttgtatatatatgttgtatgaatgttgtcaaattttttcagaatttttcataaccgtttagatggtttttgagcaaacgagagaacatcccctcgagggattgaatagtttccccgcggtgcagcatccaatgttcagtttgtaaaccagatggcagtcacagggcttctgccaattgcagataacatttgcccataaaaatggagtgatacatgaattgttgggtcacgactaatcatgtattgctatcaactaacaaaagaggtcagacgacgtctccatgacacaagagagcgtaagacagcgtaggccatggggtccattattctggtactccgccattaggagagcttagaactggaactgcatctccttggtgtacccgagctcatcaaggtgcgcagccattgccttgttcatcggaggaggaccacacctcaagatctggaacaattaaacacatattatatgtaagtgtccaggttgagacaccatacagaaagcaaaaacttctttctaaacaagaggttccgaaaatgaagatttgagttttacttgaatgtcctcggcaggtgctggcaaatgagctttaatcatgtcctgtgacacaaacccaacgccaccgttccagacttcaggaggctgcacaagcaaaaaatcaacattggaatctgctgcaaatgtctttatcaagtaccatgcatgtcgtaattcctaatatacatttgggactacgattttatagcataattttatttcaagcagaaaaaacacaaatactaaagcaaatgcaactaagagcatgctcttatccaaagaaaaaaaaacgctccttaattattttaatatcatccaggaatctttaaatatttttatgtgaaatctttttcaattatctcaccattgtagggtactatggctaatggataaacaacccatcccttgttccaatcagacaattcataacataaattcagcaacgactcccaaaaatattcaagagaaatggcgaacgtggaatcctggagaccactgtgtccagcaaagctattgatatgtatctagagtactgatgttgatacacaaatcttgtaaaataatagaagcatagggttcacctgattcaagacatagtagatcttaaagcgatcagggtaggttttggccatgttgtccagttcttcctgcacagattcaacacacataaatttgggactgcagtaaatagcagaacatatgcagtcaccaatcatcctaattggttacagataacatgcatagtggcataaactattattgcaacctcaaaaatatttcgacatgtataatgaatagagaactttcttgcaatattaatagaataaattctttgctcaagcacatgcagctgtgctggattattccgactctcccattcatatatcatttatagaagctttgacattacataaagaaattgtaaaatatctcagctacaaagtactatgtataaattattccactttcatgcagtacaagttgcatgagttttgcatttgaagaaacaaaccagttaacagttatcataaacaatacttgaaatttcaccagctgtcattggcaactaaatgaaatgtgtatgtgcatggtgtccactagtgaatatatggcacaaaagtcaattaaatcacatgatggcacagtaaatctgaaatctgatggggcgatgctaacagtcagaaagaccacaaaattgtatcatagatatattgtagaggcagcaaaaagagagtcttaacaaataacaaagaagtgattccaccttcagaagaatgtcgtcatgcgtgacatttgcatagactaaatgaacttttgtgatatcattagggttctcaagaattgcccttgcaacctgtgagaacataaaaaaaatgtttgtcagtactaactactaagtgacccgcttgcagcaacattaactgcaacatagaactttggaggcatatatgttacttggaacatgggagtgatgcctgatccaccagctagcattccaaaagctctcacttgcccaacttggtatctgaaacgaccctagaacagagaagaaaccatgttaaactcataaaccaaagacaaatgagcacccaattcaattgtgaatgtcacctaatcaataaatgtaagcacataaatgctggctaaagcataatagataacacaaaactctttcagagtcaataaacacccattatagacttaacacaagttgcttggaacagaaagaaaacaaccttaggtcccttcacagacatataatcaccaactttcatttcacggaaatggtgtgacattcttccttgagggtacatctgcattatgagaaaagttaaatggcaaatcctgcttgtgtggcacataacgatatgttccaggattgacaaacaagcattcatacagtataaagaactgaatacaatttaccttaataacaagctcaaaatgccctagatcagaatccaatgtagtaggggtataaggtttgattacttcttcgcctgtagcatcttgtcctctaaaagaatagcacatacatttttccaatttatgtaaaaaaaaaagggtagcaaacttcataaagaaaggcataaggcggaatccaaacctgcaactgatatgctgaccaattggaaggcccaatacagaggttggagttggaagagcaaatttgaatctggccacgttatgacttatttgcttcttttccacaagtttaaacttcttgaagttctcaggatccaaacagcctgaggagggaaaaataaatggcaccaaccatcaataaaggaaagtagcatgaataccaaaactgcacaaacaactactgaaagataactatagacaatgaaacagcaacgatacagcacagtgtggcagcctacagttcgctgctccgttgaatctttgtcagtctggttgcgaggaaggccagaagatgggcattcgtaaagcgattcagaactcaaaccacacacacagagagtgatgatgagaaccaaccaggactaatctggaaccccggagaagcagatcagatcacgcgcgagagccgccacatcacaaactcacaacatcggactatcagaggggacagatgcacggagccaatacatacccttgggcttcctggaccggaggaggaggaaggcgccgcccgcggcgaccgcgacgacggcgacggcgatggccaccgtggtctggacgctctccccgtgcaggagatccatggccggggaggaagctgcgcttgcgacccccctctctcccgctcgctcgccgcggcgcgctcggaatcggtggcgggtttgggtgtgggtcgcgggggtttggtttggtgcaggatggggaggtggattttaggcagcggggtcggggatgaagtaggtgcgacagtgtgtgcgcgcgtgcgtgtttgttggggagtctggtggtggtagcggagatcgcgaggtcagcaaacgcacacgccggtcacaccggactcggaattcgtctattaggggctgtttgtttttcagggaattaggcctgtttaattcagcttaagattattataatctggattattaagagtaagctgaaataaataagtagattattacgatagattattataatctataagccagattactataatctaataatctcctctgaaggagcttttttcagattattgggtggctaaagacccactacccttagatgccttcaataatccagagaaacaaacagctcgcagcttattctatgtcagcttattataatccagtttagagtaatctgatttaataatttagattacaataatcttaagctgaaacaaacagggccttattccaactccatgtcacatcggatgtttggacactaatttagagtattaaacatacactaattacaaaacccattccataaacttggactaattcgcgagacgaatcttttgagtctaattacgccatgattttaacaatgtgatgctacagtaaacttttgataattatagattaattaggcttaaaaaaatcgtctcgcggattagctctcatttatgaaattagtttttttattagtctatgtttaatactttaaattagcgcctaaacatccgatgtgacatgcgctaaaaagttttagccccatctaaacaccccctaaaaattgtgtcgcggccaccactattgagcactctactatctactagtactacctgaaagcaactacagaatgctgtactctattgaagcagccgtttaactgaagttctggtctaaccatttgaaacttgaaaccttttaaaaataaaaatcgagtttctaccacgattttagcttgttggatggggatggatcacgtgctactactatacggctatactactgtactgtacttggacgcggttggtggcgcttccgatgttcagatttccctaaagtaccaccggtaatctagccgtcaggtcagccaccagattcctcctcattactgtggtcggatcagcggcgggttagtggttttgccggtgtgcttaccggcggtctggccactggcatatagtcctactgtactctgtcaaaaaaaaaaaaaaccctaatttttcgtgtccaatatttaaccgtccatcttatttaaaaaaattatgaaaaaattaaaaagacaagtcacgtataaagtattaatcatgttttatcatctaacaataataaaaatgctaattataaaaaaatttcatataagacagacagtcaaacgttagacacgaaaagacagtcaaacattagacacggaaactcagggtttttttttagggacggagagattatgtctgtatacggtcaaattggtcatgcatgccagagatcgttgcaagtttgcaacacggcgacagagagcggcaggatgcaggcgcgcctcaggtcacaggacaaccacgaccagcactccccgtaccgcggatgctgacagattcacaacctcacgcggtagtatatacgagtactccatgcggtatatacaatgatcatttgattcatcgtttcacgtgtgtttcgagtcctaaaacaaaagagagcggagtaaagatgggttgagggagagaagagaagtgagttggcacgttaatttccggatgaaaacgacttgaatgaataggttgcaaatttgaaatacggcatgcatgaaagttactcggtcgagggctaaatgtgtgtttggttgctcacattctagtctgatagtagtatgtctcttacatctagattgagtttggcctgtttaaaaggatatgcgtgcaaatatttggttgtttgcattgggcgcagcctagctaacatgtgattttttttttgattgattgtactggagaacagtttagaagagattttgtttgattatttggatggatcttacgtatggtactcttttaagattgaggtgattaccagctagaacttgtggaagaaatgtccttccatttagataagcttaacattgttatcattttttttcactgtgaaaatccatctaaaattcatggtacgagcagtttacgaagtaattcatctaaattcagcgagttttttttaaaaaaaataattatcaatttgagtttatcctgtacaataactttggtgtattaatgatgggtaaatgtagaaaaataaaacaaaaatgaccaaaagagagagggggagagaaaggctctcgtcatcaaggtcgctctgccgccgctccaccaagaaggttcgctactgctctcgtgaatcccttccggcgctcgctgcctactataccctcgttgctcctcttgttccgctcatgcccccgccaagcttatatcccttgctccgtccaatcactcccaccgctcctcaagctttgctattcccccgctcgctgtgctcttcacctctgcgcgctcgccttgtcctccaccaaagaccaaaacctagctttaaataaggtgaggctgaactgacacgtcggccaccttgcacacgtgggtgtggttgtgcagcccattgcatccaccagatttgcccgagttgtaaagcttgaatcgagcatttccgctcaacctgactacggagacctttttgcatgggcggggttccagaaaggtgcgcgcgcacacacagtgaaatgagtttgttgccacagtaatttacagttttcactgtagcaacagtaaaaacagtgaaatgaactgtgcatggttactattcacga

SEQ ID NO: 8462 - DNA, 8361 bp, Oryza sativa
cagtttgattttgaccaaattcaaaacgcattataacctaaaacgaatggagtactaatgttttgtatcttcggattctataccataacacgcatgatcttcgagaaggctaacgcgcgatcaatcgcggccagcgatcgggtttttttttcttttcctcttttagtaaatctatacacctaaagtttataaagcaaatgtttataagtcaaaagtttatatacccaattcaaatttaaattcaaattcaaatattttatattttcctcttttagtaagtttatgcacctaaagtttacacatctaaagtttatccacctaaagtttgtagagcaaatatttataagtcaaaagtttatatacccgattcaaattcaaattcggattcaaatattttatatataaaatatttttatacataaagtttatgcgtgcaaagtttatggtataaagtctatgcacataaatgagactattagatttttttttctaattttttttactaactttgtgtttttttttaattttgtgatggaaggaaaaaaatagagaggtgtatagggggaggggtgggttgatcgctcccccattagatcccccgtgatcttagtgctcttatcaatgttaggcaaaacatgatttcctgtcaccgagcacgagcaatttcttgatcaaccaatccgtgcatcctcttttttttttgagatttggagggagacgtttctccaaacaacttttaaaaagaaattataaacgtgttgacgattaaacacaagacctcataattaaaaccatatccccttgccaccactagtgcatcctcctcaaagatcgcagcgacagcgagaccgttgcgtgaaacctcactgctgagcaatctgcagcggttgccgcttgctcttgaggaagtcacggtaccagcgagcagaacgcttcgctcgccgcggcagcgccgcgtcgtcgaaatccacgcggtagaggccgtatcgcgtctggtatccggacaagagctcgaacatgtccacgaagaaccaagcgaagtagcctctcgcattaaccccgttcctgcatatgcacgcacagcaaagcaaaatcaatcagaacatgtatcatcagacaataggtcttattcaagaatcaagatggtggattgagcatttgagctgaaccatccggcgtctgaaattttaattttcatgtggttttgggctctgagttttggatcacctggtcgcattcaggacgccctctatgtagccctttatgtaatccaccctgtcagtgtcgtcgagactgtcattgctagatgccttccctgaaaaaacaggaaggagatcgagctttaaccttgaaggcagcaaacttgctcacagcgaattattcattagtcaagagattcttaattagcaggtgatctactaggatgaattgactccataaaactaagtgagaaacagtatgtgctgctcgttctgattactctacgggaaacagaaactgtactttccattctcctggacataaattggcaagtcaccataggactctttcaggtgctgtagcattagttgtaatccgtgtggatcacccatagaccgcgttggggcttgctgcagccaataaagagaggagatatatgagtgatgagtcactgccaacaggacgaaccacataattccaagagtgtcttagtaatgatattcgaatttactttatttttgtccctcgctttatctttaaaagaataatggataagagcataaatagtggttttagaccgttactgtctaatttttttcatgtcagatttagatgacatatatatacaaccgatacaatgatgtttagttttctataatagatctgtataatcaattatttcaccctatagatgacatgtataataattatatagcattaatctctggcctcgttttgatgaagccatgtaaatatcaatctgtatttttttcaccctattctatccatatatacgaggcaaagtttttgccctcttttaaaaatatatatatatagcattaagccgtatattagacttaatcaacagacggcatacttctatatcttttccacgtcacaaaaagaaaaatcctatgtagcatcttctcctagaatgtgacgccaccattgtttgtgcaataaaccttaccccttgcaataaaccttaacctaccacctttcctgtttatcataaaccttaccccttgcaataaaccttaacctaaagtcaaaaggcaacaatgtatctcaataaccttactgatgaccaaattaacttacctgccccgacgatggatccgttttagaagctgcataagaaaacaccgagaaacaaatgataagctatacagtacatctaataacttgtagaatcatcttcagaatcatcattggatgactttacaaagttattcagcatatatgaaaaagataatctatcatcacatcataaaagatatgacgtgcattatcattttgttttgatttattttcttttgtctaccttcatcttcatgggccgtccctataaaggaatcaagctacacactcctaggctacaaatttatgtgcataattaaatagaaaactggccaacctctgcagcttactgatcgatcagcaatgaagtctcgaactccttttgccaaagggagatcgctcacatagagagaaaagtagtgatttactccaatgaaatctagagtacccttgactagttcagtttggactttgctgaaggatggaagacgagaaccgatagctttcttcattacttgtgggtaatctccaaataccaatgggtgcagtatcctacaaacaagagtagttgtttatcctctaagttcaacggtgagcttatattcatgtctatgtcaaatatctagtatccattacaaagagggagctaaaaggaaccactaggttcatttctagaaattgctacgttaacttgggaaaaaaaagagagaaaatctagcttcgtgtaaaattgtgcagtccgctagttcagtgtgaagataaagagttacaacatcgatcataccatccgtacgtgaaatccttgtatctttgagctgcttgcagatccgcagtggagtctgttaatggataactccacaaggaaagaacgtttataccaacaatccccttttgcagagtctacatgaaagaaagttgcaaaacactttgagaaatttagataagaggaataataggaagaaaataagaaaataagaggaataataaaataaatcctttcaacttttttaggattgcacttaatgacttaaaacacacacatactctcacaaatgcggccctttgaaaagctcacactagaggcaaatatctgacctcactaaaaatcgtattgatagcatacttgcttagtgtcttaggccccgttcgatctccagttttgaagatggatttttatggcacgcaaaacgagaaacctcgttagcacatgattaattaagtattgactattataaatttaaaaaatggatttatatggttttttaacaacttctatatagattttttttaaaaaaaaataacgcactaaccctaacaaatcctagattctcccttaacttctaggattggcttaccagaagattggccaataatgcacaatttaacaatttgaaaagcatgctaacgaaaaacgaggaagttgaagtttggagttgaagaatggaactgagccttggtattgattgcggagaatataagtgcggttagaaatacacactaccgataattttaagcacattattacttacttgatatttttctctgtacagtctaacaacagctgcatgtgttagtatcatattgtgagctgctacatatggttccacactggaattccccactgtacatttggtcactccaaaaggatcagagcaacgtcctggagcgaattctcctgtgtcataacctccaagtgcagcgacattaggttcagccaaaatagtccagtgcgaaactctatcaccaaattccctgaagcacacatccgcataagcagtaaaatcctccctgcattgtgccattgttactgatcagcagtccagaattgatctactccaactagttgtaagcttcaagtataatcactaccagtatagtcatatatatatatagatggttcctgaatcttacacaattctagggcttaaccatccagcatactcatcttccaaagcttgcgggagatccagatggtaaagcatgacatggacttgaattcctgaagaaagccgagcaatcaatattcatgagatagtcaatgtcacattggtcgattccggtctttagtaagtcagtgttcaccaagcaagctggagcaccggcccaggtcgtggcagtacttgtgatatttctacttgggacgcattttatttggatgttttatggatgttaaataccattagacgggctactttttattggcattggaaagtggaaacacatcacattatggcagggcaacgcttcacaatttaatgccgaagacgcaaagcgtcacttttcaaaaggaaggagtgcggctgactgaatccatccataaaactgtcaaggaaacgaagttcgtcctagtgcaggttttgctcgagcaacctcttttttcttcttctttcttttttgtgcttgctaatatagttcattgtttaaacacaattatgttttatcaatacaacatgtaatgctctgtaatataagtaacctgaaaaagaatttgcaaaaattacctcgttttgttagctcatctataatgttattgtagtacttgagcccctgttggttgacagctccccttccacctgcatatcacaactaagcaacaaggaactacttctttgttaacaagagttaaattttgagtagaaatggctgtacttgggataagccttgaccaggagatggaaaacctatatgcctctaggccagtttcagtcatgagcttgacatcaccctaaaaaatcaggcaagcaaaattattacaagccaaagttctcaacttaggctgtgtttagttgtaaaatttttcttcaaacttccaacttttccatcacatcaaaactttcctacacacacaaacttctaaattttctgtcacatcgttccaattttaaccaaatttccaaatttggtgtgaactaaacacaaccttaagttctaccagaaagaagaaaaaggtgaaacattcaaagtggaactcgaggaaccttgttcctatgtttagttccttcttcaggaaaaatattgcaaaaacacaacattttgctacaatggcgagactcattcacatgtaagcaagacaaggaaaatatataaaagggcaatcttccgaagtcaaacctagcttctactccacctaagaaattaaatcgtgtaccttgtatttgtggtacccatctgaggcaacatcgcctgtacttttgtccttcattttccctgattgcacatatgaaaatactgtcactattcagttttagtgccactatttatttatgcttatcagccaaaatttgaattttcatccttaaatttgaagttgattttggggttttttcgttgaagtttatttttcagcatttgcttttagaatggtacgtgatcctggttagctcgattgtgtatttgtgtatgagcatgaagcagccatgaaaagatgatgaacaacaacagtgtcccacgcccgcgcgtgtgactgtgttcagcacttcagcttccagggagcaaaaacgactgacctgcatgagtgaacgtgtcccagatgctagcgcccctgccatcctctgcggcagcgccctcatactgccgcatgcacaacaaaaggcacagcgaaaaaaactcaaagctcgcagaaaaccaaccgagcaaagcaaaaattcagttgagatagaatcatagccgttacctggtacgccgaggtggcggctccaaagacgaaatcagcagggaaatcattcctcgtgtagccaccgagaacgccgtgctgcacggagatgaacagcagggcgcagaagaaggcagcagcagcggccatgggcaagagaaagaagagaagcaggggcagggctgctggttggttggttcgaactggattgtgtttttgtgcagagaaatccgtgtgatccagttggggaagacgataagacgtcctcagcaactggcacgcccaagttgggactaccagcgcatgttcacgtcgtcctgacgagtgaacaaccgactcgctgaggcagacgagcattcattctgcccctctgttctctatgtcgggggcagtggcacggacgccgatcgagctgccgttcgggttcggcagcgaaacctggtttcgtttcgagtttcagtgaaaaactcagagatttgcgcaatccgatcgtgcttactactactagtactgatttgctgtgactaaatgctttggtaaatcctcctttgaaaaaaaatgctttttaaaatttagggcacttaccatgtaagccactcctagcaatatcctcatgtgggtcatatgggctaaggcacccaatgaaaagtactccaaccagccctaccaaatctgaggcaacaaggtagagataatctagcccacaacggtcctatcctagcccacgaagccacatgtatgtttttcctcccctacccctagctattttctcagcccatccactgatcatccacttctcccctctttttttcttcgccgcccgtctctctctcacctacctctcgctcgtcgctctccctctgcccgtcgccatcgctgacttccccacctcgtgccgctgccgtccaccactccggcgatcagatctctccgctttgcgccgtctccagttccattccactacgatgctgctaactccgccccaccacggcgccgtcgactctaccccaccgctcctgccgccggacggctccgcccaaccgcgacgcctccatatccgccccatcgcgcccgccgccagctctgaccaccgcgactcccgcgcccacctccggctccgaccaccgcaatgccttcgattctgccccaccgcgcccactgctaactccgaccgccatgacacctctggttctaccttgcatccgtcgcctgctccgcctcaccatgccgaggtgagaggggcaagaagggaaaatatagagaaaggaggtgaggaacggggcaccactcgagccgtgtctcaaaagagtagtcgaggagccagaggggcgcgttcccctgttggggtcacgcgttccttcaggagcatgactcatagacggaacggtgacgctgtgagcgaagctactagctggagttacccattgcatatgctctcacaacgtagaggtgcggtcacagagacagtcacagccgacaatccgacatgcacaacgaggcagattcttgagaaaaaataatgagtacagtaagaagagagaagggcagaggaaaatgcggcatcagaccgttactcaatcgcagcaaatcaatccaccatccatccacgtcgcgacgcgtccaactccatccaactcgactcgacgccgacgccgacgacgaggaaagcaacaaccaaaagcttgccgttaaaaaactccaaagttaatccccaaaaaaagaaggaaaaaaaaaacacccgacccgtcggcttccaggcagccactaatcccaaacgccttttttttttcttttcttttttttttcgcgtcgcctttccttctcccattcctcctctctccagagactcgccgtcgccgcagccattcccatttttgcccactcctcctcctcctctccagtaaaccctagcccacccaacctccaatccccccccaaccagcgcccgaatcgcagccccgcgaggccccaatcgagctagggttcaccgatttcgggggccgagccagcgaaggctctcagttttcgctgcgatttgtggggtgaaattttcggggggattttgatttctttctctcacggtgggggatggggagccggagggaggaggagaggaacgagaagatcatccgtgggctcatgaagctgccgcccaatcgcaagtgcatcaattgcaacagtgtggtaataatctcctccgcctcctgcttgcgtttgttgctgagaagcttgattggtggttcatttcgttcccggatcgttgcatggtagagcgtggaattggtctgctgggttgtagtgttctgcagttagcgcagatttatgaaatccatttgtctctggtgtgaacttttggttcgtccgtatgtttaagcttcaatgttggttggatgatgatagggcggctcgttcgtttctgatacagggat

SEQ ID NO: 8463 - DNA, 13808 bp, Oryza sativa
tattgagaagccacttggtaattacagatccactttcaaaccacaggcccagaaatatgggaagacaccttgggtactgttgacatactagttgcaagcattggcacaggtggcaccattacaggcactgggcgttatctgaaaatgatgaacaaagatattaaggtccgtactcttgtcttcattaagctcttattctatctttgaagaaaactgggatatgttgtgtccaaatgacaagtgctgcaacttccattttcactaggtctgcatgaaataaagaatatgccattctcatccctagtaactttatcagaattttcggagatatttggagtggaaatggaatttgaaacacatgccgtttacacatgatacatgaccacaactgtgtcagaatgattatcttattttgttctaaactaagatatacttttccaccaaattcagtcattcagcgatgttgctttagaatttattctgttatcattgttactcactaactggttgatggtaccaattactccttaatttaactttggaagtgcttgtgtgctcttccaaaaagtgaaaaacacagcttctaaagaaatttatgtcttagttgcagaaactcaccacatgtgttaaatatctgtactattcaatgatttgaggacaacaaagcagggaaatcctttgatcttattataccttttttgtaaattacttgttggacaattggtttcctcaaccacagagatttccattaggttaatatcaatatatctttgttttaaattcacttatgtgtttggcactgccctttaattatcaggttattggggtagaacctgctgaaactagtgtaatctctggtgataatgctggtaagttcaataaccccattccaatttagcaatcaacatatttgggaattgagcatattaagagtatattccttggcattgacatccttttggttgatgtcaattaaaacaggttatattccaagcatattagatgttcagctgcttgatgaagttgtgaaggtccgcaatggcaactttaattgtccttttatttttgaaaaaaaatgttgacagttgacagttcctgcagtgacttaattatgattttgaaaaatgcaggttaccaccacagaggcagtcgatgttgcaagggaacttgcactaaaagagggcctgctggtgagctgctgcacattaaaccctgttattttcagctactttatcagattattgtcgccgattatttgctacaggcctctaaaaatacgttctctaaaaaagctttattctacatttctactgcattgcttatatcgcttgttctaagctatttgttaagtttatcatcaaaacatttaatttatatatctataattgtgtagataatccactacaataatccggtcaataatctatttcaaactgggcctaaatgtattaactttggagttattattgattcgatattatcttgatgtcagcatcttcctcaaattgccatatatgtgatacataacttgttatggggattattttacaggttggcatttcgtcaggtgctgccacagttgctgctattaacgtcgctaaaagacctgaaaatgctggaaaattgattgcggtgagagcttttatctattaaaagatgttgcagcttagtgaagtttgttcatttgtatcacaatgatcttattataatcaactcagatggttaataaataatgaatttgcaggttattttccccagctttggagaaagatatatctctagcattttattccgtccgatatatgactcggtccgaagaatgaggaagagataactaacttctgccactccaggaagaagaaggttgccagttcttaaacctaacatacttccacggcataacagattttgaagggtgaggttccaggtagattacaacgagtagtgcctgaaattttgaaacgccataggcactggtcagcctcacagaaggttgaaattgcgcacggttgctgacgagtagtttgcaagcctgcaatttggttccagggaatcgtgtccaaaactattcataactgtaaatcatctgcaccaaagcgtctggaaccagaccacatccacgatggaatatgtagaattagatattgcagctagcatagtaggatctttcttcaatagtttaggcttggtaatggaacagatctgtaatgtgatataccttttgagctgatcttgttgacttattgaacgaaactctacacagatttactacctgtcttaaaatatactccctccgtcctaaaaaaaggcaaaccctgggtttccgtgtctaactttgactgtccgtgttatatgaaatttttttataactcatatttctattgttgttagatgataaaacatgattaatattctatgcgtgacttgtctttttaatttttttcataattttttcaaataagatgacggttaaacgttgggcatgtaaaccaaggtttatctttttttaggatggagggagtacagagtaacaacttttaagtacaaatctgactattattttatagaggatatcaatagtttcttcaaattgtgagttaatctgggccaatatggcaaatatcaggtttcattgtctgcactatgctctagccaaataatctatgtggactctgggagtctggagtcgaccgtccaaactccaaactcaaagccgtccgtaaagcaacaaaaggctcagggcaagtagtataatgtacatatgttgcctctaagagtgccacattagattgaatgatgaggtggaggagagaagtgaggagagagaagataagccacctctaaatcaagaggtaacctctacacaaatttcaaaaagaatgtgagagtattatagatattggtgtttgtgtacgggtgatacgttgtatgagttgtctcttaattcatgagtgaataaaatagataaatttagatgtggtaatcacatctaccgtagcacttgccctcgtaaagcgagcagcgggcccagttgcagggactgattcggaggagctcctttcctgatttctctagtccgccgaggcgccgacgaagaacgcgggcggcgaggaggcgcaaccgcgcgacggcgtagctcgcgcggccgcacggggcggcgtcctacctgcggccgcgcttatccccaaccctaacccgacatgtcggcgtcggatctccccgacgagctgtgggcgcgcgtgctggagctcggcgcgggcgcgggcgcggcctcctccgcgctggggttccgcgacctctgcgccctcgccatcgcctcccgccgcctccgccgcctctccctccacccctccctctggtccgcgctcctctcccgcgacttccccacccaatcgtcgcagccctcctccgcctcctcctcttcctctcagcagcagctccaccccaaatccgtctacaaaactaagtaagaactccctccctgtcccgattagctttcttctcgtgcgtgtgggggccggggtgaccggagttcttctgcaggttcgagaggcataaggtgcggatggcggaggcgaggcggcgggtggtgttcgaggcagagggccgcgtgttggcgtgccggaggcggctgacgcagctggaagagtcgttgcaggaggaaggggagaagatgaagaccgccgcgcaggagctggacaacctcgagagggtcaggtatgttttttttgtccaaaaccctatcttctcgtgtgccttatttgcttgatgctagagtacaacttagagaaagtagaatatgtaatacactatcctaaaaaaacatatttctgtgcatttgcgtagttcgtagtttggttctatgtgagcacataagaagatctatttctctgttttatttagataatggaattcattctggcctttgcttcaaacaagatgtattgcttttgcagcttgtccattaatctgttgattttcttgtttatgcaagagctggtctgagacctctacggtaaaaaaaaaagcagcccgtgttgtgtttttaaacggtagtaggtgaaccctgtttagttcatatgaattagttgttgcggttggtcatattaatccagttcaaaggcatttctgtctgattataaattcaaatcacttgcactgtcacattccagaacatagtaactcacacacaaaacaacatggctccaatctagagtcatccagggaatatttctttgtgcttcaacatggctgaagcatagctgctatagttaacttgggaatattcttggtgtttcaacatgctgaagcataactgctatagttattaggagtgtttctttgagcttcaacatggccgaagcataactgccaactgaaaggaaccgccccgaagttttataggagtacaggatagccaccaattgtgatgaatgataagaagtgtgttcaaacttgaatggttattatgttagataaattgagttacaggcgccaagtggcttttgagcaactgatcacaatctcacctgtaaaagaaccaccttttcttgtactttgcctccaatggaaagatggagtaaaacaatccagttgggccaatgggacaaatgactacctttgcatggaatccctccatcccagtggatggtacaccagtaacctgtacacaccttgcctgattagagaattttagcatttcttctattccagtctccagaatccagattacccacaggatacttgcataacatgaatgactacatacttttttttcttcattagtctatcaactggtttgttatattacagtatcatctttttccaagctctacagccattccttgattatgtgctatcatgggttctcgctactatattctcaattcattgtcatttgagttgtctacaggagagcttcagtggcattaaatgtatggcaaccacaagttgttcgtggacgtcaaaaacaattggttcaacagtgcacagttccagttgattcccgtcttagtgatgtaaacatggagctgaaagtttgtaagcaacaaatagcaacttataagaacatttatgtatgtgatcttggacttgactgcaattgtaatgattgacaatgctagccttactggaattgtgtttttgttgctattatcagaacaaggagaaggaaaaactgaatgagtatgaggaagcattgaagagagcaatatatcatccattgcagagtagccatacaagttcaattgccaatgagccacaagcaaagagaaagaaacgaaagtaagacatgcaagtttgcctgtgcaacctttcgtccgatcttcctttgtttgcaggtatctactaagaggcccaatcttgttaaaacggagcagtaatgtttttgcctgaattgctctcttgttttgttatttacatgcatatatacttattgttctattattgccatcattggagtggataacagttcataaggaagcatatgccaccttttctgaaagttcagttttgtgcttacatgatgcgattccaccgttccagattcgcacaacaaaggcaaagttctcctgatgtttttgtttctacgtgcaggtatgcatgccactgatataaccatggcaaatgcaaaaagactgaagagagaggaaaaaaggtcctctattggcctcttccttgccaggcaagttgataggaagctccattgatctttcccaaatgctgaaagaatctattctcatggtggtgtgtgtaccgtccagccgccagcggccagctgtttataccatagctgaatagtcagtgctgctggtgcctatctgtcattcacgaagctgtgggcggtcagctgttctagggcagcaggacgacatacatctgatcaaattgcttccgctgacctttgggttgaagagatatgcacatgaagcaaaccatgttccctttttttttaccttcagtttcaaaatgttagtatgcaattaattaagtacgtggaagcttgttttctgtaagctacttcgtatacaagtcaatcaactcttccgaattgtaccctccagcaaggttctgcctgtagaaatggaaggtcgtgattgttttgtacacataaaacataatttgcattgcaaactgaaatcttaaaagcaatgaaatctttaaagctgataagctccgtttatctccccatcatcagataacaacatcaagtctactttgcacacacgccagagacattgaatttcatgctcatcagctcatgcgtctgacgtggtgagcttagtgaggaaaaaaaaaacaggagacgatgggaaacaaaagcacccctgtccgatcctatatttgttgcagttcattcatttcatcaccagttttccctggaccaaaaatccatcctccaaaaaactcaccgcggccgacgtggcgccgagcgccttccgccttccgtgccgcaccctcctgctgcgcctttgacccggccatccgttctctctagccccactgcgaggtggccccacctgtcatcgaggcagcctattaatacacacctcccctcccccgcgtccgagtcccagtcgcatatcccgccgcgtactgggaccaaggggaacgtgggccccacctgtcaggtgggccgtatataacgaccgcctcctcaccccggcctctcgccaccccagaagccaatccgcgcgaggcctcgccgtgatctcaattctcccccaaattcgcaaatcctccgcgtttcgtcgtcgccgttgccgtcgccgccgagcagggcggattcaaggggaagctccggtgagatccatccgcgaagcgcgttccctcgcggaaccctcgctcgccgggccggccgatctggtttgtgcgggggtggttgtggttgtggttgtggttgttgtttggtcgccggaatccgacgagttggagatctccgagggataggaatccgtagcgttgcgagcgccaggcgaggttacgatgcctgcggtgctcgccgcgttcgccagcctccgcgcggccgccgccatcgcctccgcggactcctccccctgctcccatctcctgaagcccccctcctccccgtgttttagtagtagtagtaatatttttagtagtagtaattatctttaacgattgcttccccatcgtcgcgcgctcacgcccctcggtcctcacttcgcgccgttcgcgttctcgtgttcgatttggttgtgctcgatccgatctctccctttcctgcttccgatcagaagcagtcggccttgttggaggtggtgattgctggttcttcgaggaaagaggtattaaaacgatcccaatttattgccattcgctgttattgatgttatggtgtttatttcattgaaatgtgcttctatttcaaattttgatcattagaatatagatttatgttctcactatttattgccttgtaattcacagcatgccaatattatagggcatattcttatatttacccttgtatttgatgggcaaataaatcttgtgcttgattttttgtagagatagaacaggatagacatttaagcagttaaatgccctgtttgtctatacctgtttcctcaaattaaatgaacttgctatttaagtcaaatatacgtttgcagtcatgaaaatggtcttataaagctgtgttaactaaattagatagtgtttcttgtcattataaccgcataaacagactctcatctaacattctaacttcaacccgttttcttttcggcagaaaatcatctcctgaatttggaattaagcttgtggatgggcggatctttggtggactctagcgccgaaggtgttagcagcagcttatgtctctgccacagcacctctgaaaaggcaggctttgagcatagctcatgtgctagctctggagatggaaattgtgaagctggaatagattttgggcaagatgatttggttgtcaatgaaattggaatggctattgctgaagtgatgcatgtctgcagtgatcatgatgatgatgaagggacagattcgggtgaagactttgatgaaaatgagggtctactttctctggaatcagattccactgatgatgtagtggatattgataatgaattggtcatatcgcctaccttttctagttgcaatgcatctgaatcatcaatcaacaaatcagactctggaaattcttccattaatgtaagtatttgactgcagccttgttcaacctaacttgttcaatataccttgccagttgtatttgttttagttgtgatatctacgcacctaatttgcaatagctactcagtttcttttagcatttttttaataagcacattaaaatctcactgccttcttatatcatgttgtcacttctgctttaagaattggatagcatcactggatgaacagtttcagttgttgtgctgaactgctgatgccacttgtatcatgtcccatcaaaatctattccacttgattttgagtttatttgaaatcatcaatgaccataagatctcagtgggctgtatgtgtttttttcttcccataaaagatggggccaaattgtgctttctaacatcacatatatgttcatgtgcagggcactccaccgttggtttctgcaatgaaaggaagccgtgcaaagttgggaatcgtcacaagtttgagtgtttcatgggcccctgatgtatatgatcctcctgttacttctgggtctcacactgtgaaggggcatcaaagaagttcaaggaagagccactacaaatacaagccggccaagagcagtagcagccgcagcagcagtggaagcaaaaaggacaggaagcattctcgccacagtagcagcagcagcagcagcagtaaccacaaaagagacaggaaaccttcctaccgcaacaccgttggtggtgtaagcgtcggcagcagcagcagcagcagaaatactgatgctagtgctgctcaatatcgtgatctgtacagcagcagtggcggcaacagaatcgacattgctgttcctcaatacagcaagctatctccgttggtgccgtctgagagtgcaacatatcgtaatgtgtacaacagcactagcggcagcagaactgaccctaccgttcctcattgtagcaagctatctccgctggtgacatctgagagtgcatcacttgcagggaccgttcctgtgctgaagacattggagccgatcaaacgcagctccagctgctgcaaggagcagcctttgagctttctgtcacgccagtttgtggctgcaaagtacaaggggatgttctcactatggagtcacaaccagctagcttcttaatcatctgttgatacatccaactcgtaagctgttggttatcaacaaaatgcaaaacttttaccgcttatgcctttattattttgatttgtgaccacgtgtcttgttctttgttacactgtttgctccgtttgttgaacatccgaagagatgttatcgaaagttgtcgctcgaagtatgtatgcatactcgagctcattatcttcccttatttatttgttcaatcggcacggttctgtttgaggctttgaacatcatttcatcggttcaattctgtccagtttatttcgtttacatttgttcgggtaaaactggtatcctagatgtttcaacatcaatccttctagccagaaggatgaggttgcgaagcacattaacattactgaaagtgtcatgactgctctaattcagcccgtaataaagagcaactggaaaaaggcatcccctgttatcgtttttcctctcaatttacataaaaaaaatattttcagaattatctgccctgttgttcagaattctaactaactcttgacatcaagacactttctatttattgtaaagttaacatcagaactgtggaaagcctcttttcttggctttctggtgtcttaaaacaggctgtcttgatctccaattaacggaaaatctgtcttgctgtgctgtagacgccaacaattgacattgtagttgcattaccagttagagcgggcagccatgaaccatgcctgaaacaaaaaaagatatggtccaatacgtggataacgtaaatatgcatgacattccacagttccgacctctggctctgaggctctgaacgatctttttaccttttggatgcaccatgtggtccatgtctatgtgattagtggcaatgctatgttaatgttttgaactgctatgttaatgcttttgccgtgacgtctacttggcataaagcaacaaacaaacactaaccaaacaatgaattgcgtacgtatccaactaaattaagtgtttaaaatgaccaacttgcataagttgtgtaatgcataatgcaaccaatgttgctattaatgtatggacaacaaaccatgataggcacgttttaacaaacaatagcaggaaagtagccttctccttttaggttctgttggttgcatagaacatctactccatcactaatatgatttctttcccgttcatagcagcactaagacaacgaacattgcataaaaaacaaagtaaaatcaagtggagttcaataccttgagaggttgtatacttgtatcagggcaagagggtccagtcagttccaggattcctttttatctggataccaaattatgctcagtgatcagtagtcattattgtttggtgatggactccaaagagtttcaacgccacatccctcacccccagctgtgggacaatattcaatcggttgaggaatcaccaaaagtccttgcaagaacaacttccctcaacaaatctatggaaacgaacacggtccctaacaatgatttctctatcatatgacttgcttactatttttgctacttcatggcaatctggacagaatctcaaattctttaccacccgaatgacgtgaggcgcttttgtcttcaacaaaccatatgcaatggctaacctttcactgtgctcacaaagtgcaacttctttttcctcttcaccaacatcatgaagcacggctgcagtccaaggcttgtggccagcacgtaccacacggtcagctatttccctcagtaacagtcttatctcctttatttcagggtgtgaatcatcactcaccacaaacttgtgaaggtaaccattaatttcaatcgaactacagccagcaacaacattaacattgttttccttcatctttttcctcatatagcttactctatcccactgggaattcgatgcgtacaaatttgagagtagaacatagttttctggattgcaaggttctaactcaaggagcttctttgatgctgattgcactatatcaaatctatttgagttcttactggcaacaagaagagtcctccaaattactgaatttggagggatagccatgccagtaacaaatgaatatgcttcatccaaaaggctagaacgacagaaaaggtcaaccatgcaaccatagttctccattgaaggtttgatacccaattcttgcatagtagaccaatatcgtcggccttcattcactaacccactgtgagcacaggctgacaacacacctataaaggtgacattgttaggcctcacctgacatatttgcagtttacaagaatttaattagagctattagaatggttatagacttaccatatatttgtaaagactgcatgaattctaccattttgttggaaactaagttgaacatgtgaactaatacatagaggacaatgtagaaaccctccctatttttcgcgaatgcaaaaccctccctatttcaaaccttcatgtagcaatgtcactatcccagaagatatcatgtatggaaccaacaaattttgcacccatgagctaagttttatggtagcatggtacaaaagacaaaatatatgctaaacaaagaacatgaattttaaggaactacatcattgcgaatataaattagtttcttttgacacccatatttaatgggttttacattttcacgtccaagtaaatgtatatgaaaaaatcatcaccaaaaccaattaacagtcactacagatacatcagtaaaacgatctttttaccttaagctctagcattcttgagaaaagcttcaaggcaacctctacaagaccatgtatcgccaatccaacgatcattgcactccatgcctttgtatctctctccgccattgcatcaaacactccctttgcccgctctatcaacccacactttgcatacatatcaattaatgctgtgctcagctcaagatcgactgtgatacctttcctatcgataaaagcatgcacccatctccccaaatcaagcgcccctgccttggcgcatgccgaaatgacactaaccatggtgacctcatccgggttcacatctgctgcctgcatctctcggaacagccccaaagcctcgttaaccatcccgaccctggagtacccgccgatcatggcactccacgcggccaaattcttgtccccaaccatgccatcgaacactgtcctggcgagcgcaacctcctcgcacttggcatagaggttaagcagcccggtctgcacgtaggggctcggttcaagcccccggcggaaagcctgcgaatgcagctgccggccctccccgagagccggcacgacggagcacgccttgagcgcgaacgcgagcgtgaaggagttggggagcggggacccggcgcgcagcattcggcggtagaccaggacggtgtccgcggccggggcggcgccggcggcggaggagagcgcgcggatgagggagttgtagcagaaggcggtcggctcggggatttggtcgaacaggttgcgggcgtaggatggcgcggcgccgcaggaggaggaggaggaggaggaggaggaggcgaggagcttggagagcgcgaaggcggctgtgaggcgagggaggcggagcctgatgaggcgcgcgtgtgcggcgcggagcgcgaggaggcccgggcagcatcggcggacgagcgcgacgacgtgggcctcgaggaggtggcgcgggagcgaggcggcctcgcccggtttgagctgctggtggtgcatgcgctgcgcgtacgcgtggggatcggcacgcgcggcaaagtagacgacgccgcgacggctcggtagtagcagctacactaccaccgcggcgtgtgctcgtgccgtcgtgccgcgctgagagatgaatcaccgggcaccggcacaccgcgtccgttgggctcggtcggcctcggcggcggcatgcggcgaagaggagtgggccgcatgtttgcatggctgtggttgggggctgggatacgggccgtgggctgctgcgactgtggacgcgcgaggaagagtgacaacatcgtgggaataagtatccactgtacacccctcatcttttcatcgagtttacatagtatccataaaccgcactactgaaaatcttaaccctataacttacaaaatcgggttaaattagatcttattgcggtatgaattgatttcgctgatataacatcctaatcaacatgagatagatctacgtgaaagtggccacatcaaatttctacttcccctcatcgtcctcctcttcccaagtagctcgccgacggggtaaggggcggcggccggtgagcttatatcagtttttaaccccccatggtttttcactgtgattaccactgggtaacggtgatactcctattcatcaaaacggtaaaggaaacccggctaaaccggggctgatccgccactttgcgggaacacgatgctcccccacgtcgaaacagcgcgtccccaacccaacccaaaaaacaattccccccctccctgacatgcgtcctactcct

SEQ ID NO: 8464 - DNA, 12251 bp, Oryza sativa
ccatcatttcgtggaccacttcaacagcaactggtatgttttatcaatgattcaaggttctttgctctgcaagctttcctgatttgttctacaacagtttgattttgattgagaacaagcatatacattttttctgttacttcccaacttatgacagatagttttatcctttttattcctggtatctagtttaccatgatattgttggctcattgctgaatggacaatttatgaaatttggaacctgttagaaagatgatgctagactggatttttttttatctgtatggattgctgagattattaatgcacacagacagaatggtcttgtaattttgcatgtaagccttttagttattttgcttgttaatcttgttatagtctgtattcacctacagtgagtacttttttctacaatctattggtttgggactttgggcacaaatgatgatgcctgtcgtggggcgctacctggagccttattatgtcagttttctaaatggtttgttttgctttttaactgttcttttgaattttgtttcaggacatcgtgccatctcagcctgcaaaatcaacaaatccatttgacatggcatttgagtctgatgttgaagccagtaacatggtgtgtattaattatactatgatgtggtttgtggtcatgataattataatatggattctagcttttttttaatggatataatcatattttaagacatttggaataaacaactaggaccaattatctaatactctagagacatttatttgcgatctttgtttttagacatgttaacaatagcttagttggttccatgctgcaaacttctatttttcttttgttgtttctttattcactatttctttctgtccttttcagttcatggatctgacctcgctgcaagaaacgttgccaaatccccatgtcaatacagattattccaacttgactgagtcatggatacctcataattctaacatgccttatatttcctctgggccacagggtatctgatcctttatatctccatgatcctcacgcacaagaacacaagcatactctactcttaatgctaatacaatatcggattctgttgttgtttcaggagggttatcatacatggcaacacaagtacaagactccctcatgctgtaagctcctttctaacaagttattgtagttagcattagggcttagtttctaaatgacctcctgtaacaggaactccgcacaagggtcatttccgcccagaaatccattcgaatgaatgctgatagtggtggacagataagcgaagcagtttgcaactgcgtggaacctaaatggaccatggggtagtcgggtgtaccacacgcatcgaagtatatttgtgtcaaatctgcacattgaagtgaatatatatatctcggatttcatactctctggtttcctgtatatgagaaaggagtgttcagaataccaaacaggcgggctggagttcttttttgcctgaagcaagctgccctttttcattgctgttaccctgtctgggaccctggtgaaacctgcgggtttgttctcacctggctgtcatttgaccttattggggtgtccttgttaaacccaattgtcattaaaaaaggtcgtagacgcatacccatcaaatgactagatcatttgcattctttggttcttcagcatgaacttgtgaaaatgtgttggttcaccgaatggacggattgttgcgaggtgttatttattgagaagtagtagtatattgcttttcttggtactacgttgaaactgtttatatataactaaaacttgtcattggccttgtttgtatcctccgggctattaaatagccctccggaatcttgctatttaggagtattaaacgtagattaccgataaaatcgattccataacccctggctattttgcgagacgaatctaatgatgtatattaatctctaattagcagctgattactgtagcatcactgtagcaaatcatggattaatatacctcgttagattcgtctcgcaaaatagtttaggggttatggaatgggttttgtcagtaatctacgtttaatactcctaaatgggttcagtaatatacgtttaatactattaaatagccctccggatcctatcagagccattgttcatcagttggctaatctgttgtgagatgttatgtccaggaagaaaaactgacgtgatttgtacgttggaactgggttccgtttgcgattcacaatcatttcattgcacttgctgcacatgattcctggcttccaggtccgcaggagcaaatctttcctgcgttcatgggatcggggatctgcatttcgggatagtgtcctctcgttggcacttgcaatgaccggaataaattctctataataattggtcatagcttctttgaagcaatgaccggaataaattctatgatctaaaaatatataagagataatctttacacgagtttaagaaaataaaacaaaataaaataaagtagattgatatagccaataaataaaataaaattcagggtatctgtgccagcgtaagaaagcaaatgcacgaaattggaggtatcgatgacatgttagagttgctctatagaggccatagacgacttcatctttgaaaagctatctgcatgttctctatatttgaccatgtaatttcggatccaatccaaaatgttgcagtagagaatgcaaacaaatttcaaaaaaaaaaaaaactagacaagggaagcaaacttcacccaaaaaaaaattgtagtcgcagtgccggtccagttttcgaagatgcttataggggtaggatttacgtgcgtgcgttttttaggggtgagtgtacatgtatagtgagtgtcttcttaaaaaaaagggaaaatattgatgaaaaaaagagaaaaatcggtgatgaaagcgtgcctgaagctgaaccaccagaccgtacgagcagaggaagccaggaaggaacaaaagctcgtctcctacggtcctaccctgccctggttggggttgtcctaaaaccctacctaaaatccccaccccgcttcctcctcccaacccctccccgacgccaccatgcgccccttccaccctccccgccccaacgccggccaaccccaccgcccgcgccccggcgaccccgccccgcctcccctccccatgcacccgggcttcaaccctccgcccgtccccaacctcgccgccgccaaccccatggccgccgcggcggcggccaaccctttcctcgcgatgcagctcttcggccaggcgcagcagctccagagcctcggcttcctcgccgccgccgcgctccagcagcaccatcaccagccgcagccgcaggcccccttcttccccgggggaggtttcccgccgaaccccaaccagttcggggccttccctgtccagcacgccgggttcaacggcggcggggcgtttcgacctggtggcgtgggcgtgggcgtggccggcccccgtactccccgcccgatgatgggcgcccctggtaatggttacaacagcggtggcggcagcggccatggtaccggagctggtgcgccgagacccatgctgaatggtggggggaacgatcggaatagcagtgctgggaagggcggtgaggtgaggaattattttgctgttgtgtattgaaatcgatagattgtctatgaacgaaaagtagtcttttagcctatacgatcattagggactgtgcaattcttatattgaggaaatatccacaattgcatattttaccagtatatatgtcatgcgatcatatcttgctgatattttttttcctggtgggttcatgggtattagtaagaccagttaagatcaacccatattatgtggtcagaagtatgatgtctcggtctctcagacttttagtacgcaaacgactcttgactacatctggatagtgtatgttcagcatgaaagatataactgaatttacttgtcatgctctctgtttctaacaattgcctgacctgatctatgatgagcacatgtcggctcgattccaaatgaccttctgttcttttctgcaatgttcgttgaacctttttgtactatatctgcaagttttgctcgtgcttctttatattttttcatattgatgtgcgtgaaatgttacctactaggttctttcggcatactatgactgagctattaggaaccgattagataatggccatatcatcagtaaaatctcatggatagacatggttttgcacctcattgtttattgcaattgtgtttcgttattgtacctattcaggtttggcttagcattgtattccaatttctgtttctctgcaacaggtaaaccacactaagatcaagccagatggcatccctcgttttacctctgaaaatggtgagaggaaaaatacaacagatcagaaagcccgattcaactctggaagagattgtagggatagcaggcaatttggcccatctggtggaaggggaaggggaaggggaaggtctttcaatcaaggtcgtggaggaggtagtgaatattgtatatatgccatatggttaagcatataggcaatacattgtatcaccttttgcttttggggacgcatactccttactgttgtcaagtgagcatgcagcatttcatgttttacttatcttgtttttatttgctgcaatggtttcataactctgtattattgaattgtgcacatgttttgatcatcttagctgcatgcaggataatgaatgcctttaatacatcatacctacaagattatcagtatttccagctaactgctgaattgatgtatcgcctgtcaggaaacaacaactggagagatgcaaaatccaacttcagaagcagtgacagtccaagtccagcatcaggacaacgccgcaatgacagtccagcatctggaggacaccggaagtatgtatactggacactagtttttttaattaaaaatattattgtaattggtaatctttttatgtgccttagatggtcacaattctggtttatctgtaataatgattatttagttattgcttctcccactcgtagcgctgaccgctaattattgcgtgtcaacaatgcattgctcaactagtacgcttatatttctgttccatctaacgagctgctgttctacatttctaaaccatgtcgatggtttccagaaaaaaaaagagttaattcagtgtgtaaatctagggaggaaacccatttactaaattacagggttgtacagaatgtcgtaaactttatggtcctttattacctgttagttgtggttttctggttcttgtcttgattttttttaaaaaatattcatggagtagtgatgtttttagtgtcaattgagtttgttcctgcaggcggcctcgtataatttatgatgcaaacgaagttaaacagtggcttgaagcacgcaagaagaactatcctacaagtgtcaacataaataaggtcaatgtttgtctttaaatacctctttttattaggcctcagcaactttatgtccacatcagactatcagagaagcatcatcaactgaccacttaatgcagaagttgtctgagagtcgaccagatggtgagaagaaggatgaagaggcccaaatgcgccgtcaggtaaagcaatctattgctatgattcatcatgcatcttctttaggttcaaagggagagggggttgatctagctttgaatggttctataagtacattttttttaacaaactaaatagaagcttttgccacagtattctgattgtgaacttttggggatgaattatttatgttggcaaatgtaagttgctcatgctcttacgtgtgattgttcattctcttgtgtatttcaggaactcaaggaagtattagaaaaacagaaagaattgggttttgaactccctgaactaccacctggctatctatctgaacatgaggatcaaggcaatggtaggagaagtaactggaaaacacaacgcagggattgtcgttttggaaaccgtgctgataacaaaagatcaaggtatgaccgcaatgattttcagtctaagagacccaaggtacggaaccaaactcattgtgatgatggggcagtgctcaagagcagggagccaaccctcttgcagaaacttcttagttcggatgtcaagagggacaggcataggcttctccacacgttcaaattcatggtccttaacaatttcttcagtgattatcctgataagcccttggagtttcctagtgttaaagtaaaccagatcgaacttgaaagcaacattgctgaagaggacctagatgacttgatgaacagcgagacggcaaaggacagcatccttgatttgaaggaaaatggtgatcagaaagactcgagctcaattgatggagaatcagacctcgatgacgacaatgatgatgaagatgaagaagatgatgatgatggcaatggccagtgctgagagcagcgacaaggatgagaacgaggacgtcgatgcagggcagatgtaatacgccgtttttttaaaacatgatggaagtaaacgactccagacgtctacacccaaaggtatactcaaccaaaatgtaatgcacctgaagtcagaggtgcaagtatccagcagggcacaggccaactgtgtttttggtgtatagttggcgttcacaaatgatatttatgtagctgcctttgaaattttgttatcagttgcatttgctattatgtgttttgctgtttggagaaagcacatgtgctccttagaggtggccacgtgttgtgtcaggagccgtgttatttcaggctgaaaccccagagtaaaagagggtcagggcaccaatggagaatggtacccagggcccaggctgggcaacctccaacataagcgtgacagttccttctctttaccggaaaagcggcagcaatacaatctttctcccttctgctctgaaacagaactccactcaactgatgagtgatgcacatcagcatatggcctcccaacacagcacaagtccagctagctacctcctgcactgcacggcgagccatctcttcctcacggtcacggcagcatgccatgcatgcaaccttcatcagttctaggctcacttctgccactacccagtctaccaccaccttcaatagccttcaccttcccaatgacggcccatcaatgctgccagcggaggcgagaagacagagacccagccttgtttgtttgggaaagcttgagattgagaagttaaggtggtgtttggttgaagggactaaagtggccctctcacaaaaatataagtccctactatagggacttatacttctgtgagagggactaaatttagtccctagttcccaaacaccccctaagggggtgtttagatggggctaaaactttttagcccatgtcacatcggatgtttggacgctaatttggagtattaaacataaactaataaaaaactaatttcataaatgagagctaatccgcgagacgaattttttaagcctaattaatctataattataaaaagtttactgtagcatcacattgtcaaaatcatgacataattagactcaaaagattcgtctcgtgaattagtccaaggatatggaatgtgttttgtaattagtgtatgtttaatactccaaattagtatccaaatatccgatgtgacatgaacttggaataagtccctggaaacctaacaggccctaaaaatgttagcttttccctgactcttaattcattttctagattttagctagtttttgcttgtctcagtgtctctctctctatatattttaactttgttgcccctttgtgtcatctcagtttccactctaaaaaaagagattatgttagctattgatgtttaaggaagctaaaacttttctccccaaacaagagcttgcccagattccgctccgatctccctccaactgaatttccgagcagaatttaaggcccccgcgaaggcgctgtacccagttctttcccagtccccagtccccactcgcggccagactgtggcgccttgccgcccccgcattgatgccgcattcaaagtagacgcgcgcgcacacatggcagcagcgaccatcaatctatccgctcggctctggcctcgcaaccaatcgcccatgcacgcattcaagctgcggttttgccccggtcgggttcttctccctccctcctccgcgatattgctgcatgcggctagcgtggtggagtgggatcagtactactactgtgccacggctcggccgcattgaagagcgtccaggagtaggagtagccggtgtgatcctagctaataatcggcgatccagcgagtgaatgagagcaagtttaaccgtgtagcccactactagctccaattcatctatagccaatctaatagccaattcatacaatagttgcttactatactattaatatatggtcccacctgtcatacacacattatattttggagtccgcgctgtagctggctacagatttataactcactgctcttctctctcatcttttatcttattaaaatatatttatagctggctaatagcctgctattgtactgctctgagcgtgatacggaggacgagccggtcggcgagacagccagccaggcaggtctgggtcgatcggcaggacaggggtactggacccagccgggtggatttcgattaaattcaccgttggatttgaccacagtgacccgtgacgtctttgaagagtggatctctgattctgtgtgtagtgtgttgggagatttcttcttcacttgctattggttcagtataaatgtataatgtactaacaacagtagtagcaagtttgatgaagcctgaaagacatcacagcactacagctagatttgtaccactgcgggccactcgggagaacgtacgcacgctagaattttttctggtatctacagaaatggaactgattccgtatagtagtagaaatgtagcatgagaattctaaccgggcgcgtacaaaatcgcagtcgtgctcgtctcatcccgctgtatataagcaggcgactcctgtgtacccgcgcacacgcaaaccatttgcatttgagccttttgcttgccttctctcctgtcctgactgcagcgagagatcagtagggagagggcaatggcattgacggtgcggctgcacacggcggtggcggcggtggccgtggccgtggtggtggcgatggggatggcggcggcgcagatgtcgccggcgggggcgccggcgccggcgggcgggatcagcccggcgtgcatggacgcggtgctcaacatgtcggactgcctgacgtacgtgatgaacgggagcacggcgcggaagcccgacgagccgtgctgcccggagctggcggggctgctcgagtccaagcccgtctgcctctgccagctgctcgccggcggcgccagctcgtacgacatcagcgtcgactacaagcgcgccatggcgctcccgggcatctgcggcctcgccgcgccgcccgtcaccgcatgcgcgcgtacgcacaattactccatcgcctctcttttgctcctcccttttttagttcgcttgcaagggtttaattctgcctagcatagttgcaaaccgtggattttgacgaatagtagaacgtttacttgcgtattactagtactagtaatgtttttttgggaatactcaaaagatttgcgcatctttgtatgaagagaataattacagctgaacgagaacacagaaaaaataattaatactccctccatctacttttttttgatagtcatattttatcttggcacacagaccaaggataagtaattctacttatcatccatataaacatgctactagtcattccttataaacaagcgattcactgatatttacgtttctcaatgcgcatgtagccaatcatgtgtgtaagaatggagagtcatgcattaaatccgagaaagtcattaaaatgataggttgttgaagtgaaatatgcttatcaaaaataaaatttttagatttggaaatatgactatcaaaataaatggagagaggactattaatactagcaatgtgcgtgacacaacaccaaaagttagaaaggagaacaacttaaactgcatctgttctttgttcacatcagtctgtagctagctaggtagcttagctagtggaaatgtgatcaccctaatggtttattaccctgtccaaagctccaaatatcatttcactaaccccaacagtatatcttaccattccattcatcgaattttactgttttaaagaccgtataaaattaacttttggttacacacaaaatgcagttcttggagtacctgtgcctatggcgccttctgcatcgccgatggcaggcctcgggccatctactgaaccacaaatgcctggtaagtactactgctcatgtgctttcttggttcagtttcatatcatatatgtatattctgagtatccaggctcaagaaaattctaaacagctcatgataattaattgtgctataacaaacaataaacggagagaaaattggcatgttcttaacttattttagctgcatatatatctagatccttctgtccatggtagcacggtacagtacagcatataatagttccactaagtatccattagtgctcataatttttttttgaacggaacggaagtgctcataatttctcagctgattttgcttacggaagttctgtagttgagcagtgtcattgtaggctactacagtgctagggatcctgagtcctgacgagtcagcctgtcactagtcacacatttgcttgatcagctaaactctgcttctggcgatgcatttctgcagagaaatcgccgtcggcctcgccgtccgagtcgagtaaccatgctcccggccgcttcaccgccctcgccgcggtggtcctcgccgttgcagccgccgggatggtttagaaaatgcctggattttcggccgatcgatctcaagatttagcccgacgattcttgtttattcttgccacacatttggctgtgtattaatttacaacacgttacagtacgtatgcgcaatgaacgatatttttctgctttgctttaaattcttataattaactagtaactcttccttgtcgtaagttgctagagcatatggtgagactatatgtacacacgtagtgatatctggccatccgcagtagctacttggggccttctgttaattattttcagtgtttaaatgcttggtttttggaggcgaggtggagaggatttttggaaagatgtgagctggagatgatcaaagtgtggggaaaaaaagcattggattcgccggtcggcaatacacggcggccggccccgatcggccgtaaggcgctgtaggttcatgaatgctaagattccgatcccttcattcaatcgcttcccaactgtttgagaaattttggttgcgtctcctcgtggcgggccatgtgatttccggttgctcctctccctcccgtgcgtgtatgtagggacgacgcacggcacgggggctggatggatcacgggatcaagcggatgaggcgcttgtgatctcgcaacaaagagctctaccaagccgtacgtccgtcgctagccatcgtgccatgccatcatgtgttccgggatccaaaacatgtcgacgccgccgaccgtacgtcgcgatgcgctcgatcgctgcgggcacatgtgtcgctgccagcttctgctcgatcatgtccgcccagcacatgccccggcccgttcgcgcctcggcttcgtgcgactgttcgtgggcacccgctcgttcgacgcagacgctgaggcggcggcgagctccgcactggactccgcgggagcgccgaagcgtcgtccgcgcctccaccatccggttgcagatgctggcaggctgaccgctgacggcggcaactcgacctgctcacatgctgctgaggccgcacaccgccaggacacccaccgtacgaactactccctcaatctcaatatacagtaacctaagataaatttaattttattctagaattataaatctgaacattagatttatagttttatgatgaatctaatcgtatcctaggttgttacatattaggaagttgaaaacgatataattcctgtggaaacaattctcgattggtccgtcagaaattcttggttcttcatgttcatcaatttaacgatttagcgacaacaggacaataacaaattaaaaaaaaatcaatat

SEQ ID NO: 8465 - DNA, 9440 bp, Oryza sativa
tgtcagatgaggataatgcggaaagtgacgatgaggtgctatatagacgaacagtcatgctctagtgagtgtagtttcttcttcttgtctttctttgaaaaaagctgcagcatattagtactttgtgaacattcacaagattaaaaaaaaactggccatttttgttccagatttggtggaggataatcccaaagatctttcgtgatgtgctcctgacagcatcatgcacgcaagtgagttctaattttctatgttttctatgtcaaataccatctagtatagccctgataactaaaaccgactgcaagggattgaagtatacttactgaaactgttattattcatgcctgattagtgacgaggaacggccatctgatcttgtatattttgctcagcattagtagctgcaagatattgcatcaatggctactccaataagctagaagtagaggggctataacagggaagtaaaaatgaaaagataatgagttgtaatcaggaatgtgcaagtaatcatacccttttctgcaaaactaataaaatggcagactaggagataaatttaaatctctagcatcaagtcgtcaacacactttagaggctatctttgagacacagtgagactttcactttccaagtaagcttctcaaatgaatttgtgatagaatacgtcctctgttatttatacccacttagaaactaatcataaatatgagtaatctataaaaattgttgatgtcgattctaattatttgcttcattttgttcatgacttcaaggctataccatcattatcggtaaatagctgcctggttatttgcatttgcaaactgaaattcgctaaccacgcaggcatcctcaactgcaagatgaaaaaggctttggcgttaatggaacattctcacaccaacagaggtcattggagtgctggcctaagcaacagctcgaagggattaacaaaggtagcagatgtactccgtgacagcctctggctttggttatgtgcgacttgaggcgaaagctggagattcgtagaccagttttggtaggagatcaaagagtagctgtggtagagtggagataatgtgccagtgatgaaaaatcctgttcactgaaattttactctaggacaccatatgatcccaacataggattcagatttttgtagcctgtagactatttactgtctgtaattcaactgctgagaaaagtattgcctaatgaacttattactagcacggtgtgtacagcttacattgtgttccacataaccacatttcagtgtctatggttttgttgccaatctgaatgtcattacagatagatagagagttcacttcagtactggaaatcactctgaacctgataccacctctacctgccttccctagctaaatgtgagggagttgagctgtccttttgcacagaatgagctctgtgccagtgactgttcaaagcatttgtaggaaaagcaacgatgcagacagcttcgttggcagaagttcgcacaaagcatcatagggctcttaggtaaagcatcggtgctcatagcactgatgcgtcttgtatctgaatgcacttcagcagcttgtggtgatctttatttctaatcagaagcaaagttagacagccatgatgagctgcccctatgactatctgggcatctcttctgattattgataaatgttcatgtaaaatgcaggtattgtacagaacattgttgaagaaaaactccaacaactcacccagttaatccagtcatcagataggagcaagatcaagcatcatgtcaagatcagtcaatcaagtcatctaattagaacccaaatcacattagaaaaaagatcagaatcgtgtggtaaaccagatcttcagactaacaaatcctcacacactaacagaacaaaaagtttctgcaaacagaaacagaatgtcagtaaggacaagaggacagaaacaaatctttatctgcttttttctcccttattaacctttcacttttttctgtcttgttagagtgcaccgtttttgtgcgaacatttactcctttatccattaatcaggagtccaggaccatttcctttgctccatgcttgtttccagctctccatgtgctctgcattgccagatgcctctttgcaaagctgaccttgcattgcattgcccacagctcaaccatgcaatgttctatcttcatatcttgctaggaggattagcactcactaattatctctgaagaaacatgacttattatcactgattatcagtgaagcttttaccaagattgtgaaaattttctgacaagtgttgtttgatcaaattttaatcgagttatgcaccagaaacttaatcactgaacttgttagtactttatttaaaaagttgtataaggttgattcataatgcattatgagaaacgcctagggttcttccggctagcttcacaaggtggtgggttagacgatttgggttcgaagcctcacccattctaattatttaatattaggtcattctccaatattcgcgtctaatgcattattgacgccactagcaaggccacatttgtgtacttatactctataaagccattggtgatgtgcttgtacattgcacccatgcatctacacacgcatcaagctaaggacatggaaacgcttgggaggaggaggagagtggccgtccttgcatggtgcaatgccattgcaatggcgctagctctagcgacaccggtggcggctgtcgctgccaaccacggcgacacggcggcggcgaaggacaatgtggccgtcgtcccgaggattgccgcctcggcggcggcggcggcgtcgagcgtgaacgtcacggccatctgcatggcgacgccgtacccgagcgcgtgcgagacggcgctctcgtcggcggcggcgcggggcgcggccaacgacccgttcgcggcgtcggtgcagttcgcgatgacccgcgccgagtcggcgcgcgcgctggcgcgcaacctgtcggcgtcgtcgtcgaggccacgcgtggcgccgagcggcatggacgactgcgccgagctgctcgacatcagcctcgaccagctccacgacgcgctcgccgcgcgcgccgcggacgcggccggcgtgacgacgtggctcagcgccgcgctgacgaaccagggcacgtgcggcgacagcctcgccgccgttcccgaccccgcggcgcgctccgccgtacgcgcccgggtcgccgcgctcgagcagttcatcggcacggcgctggctctccacgccaagctcaacaatggcggcagcgggagctcctcgccggcgccgccgagccgcgccgcgttcccatcctgggtcaccaagcacgacaggcacctcctctcatccccggcgagcaccatcgcgccggacgccgtggtggccctcgacggcagcgggacgcacacgagcatcagcgacgcgatcgccgccgtgaccgcgccgccgccgccggcgcaccaccccacggcgagcggcggcggcggcggcggacggagccgaaaggtgatctacgtgaaggctgggaggtacgaggagagcgtgagcatcacgagcaagcagaaggacgtgatgctgctcggcgacggcaaggggaagacggtcatctccggccaccggagcgtcgccggcggctacaccacctacgcctccgccaccgtcggtgcgtacccttcccactactcacgtcgacacgacgcgccaccatggacgatatggatcgtcgtacgtacgtacgtgcgtggtgtccagatatcttccattccatgcatgcagagatgcccatgcatgcatgacagttaatagttcgatcgatctagtcgttagatgcgcacactttttatagcctttaatgatcgccaatctcgtcgaaattaatcctcaaccgtccaaatgctaacgacagcgatgttgcacttgccaattgccatcaccttttctctttttttttctttttttttttttgccggtgtgtgctgtacactacactcccatgatcaaatttcacaagcagaaatatctcattttgtactagtagagtagtagaaatggatataatcaattaactgaattataacaatagtgaattggtgattatttgtgcagctgcaatggggtcggggtttatagccaagggcctgacgatcgtgaacagtgccgggccggggaagggccaggcggtggcgctgcgcgtcggcgccgacctctctgtcgtgtacaattgcggcattgaggcgtaccaggacacgctctacgtgcactccaaccggcagttctacgccgccgacgacatctccggcacggtggacttcatcttcggcaacgccgcggcggtcatccagggctgcgagatccgggcccggcggcccagcccgggccaggaggacaccgtcacggcccagggccggtccgacccgaaccagaacaccggcatctctatccatcggtgccggatcaccggcgcgccggacctcggcggcacgccggtgtatctgggccgtccgtggcggaggtactcacggacggtcgtgatggggacgttcctggaccgttcgatcgcaccggccgggtggctcgagtggtcgggccagttcgggctcagcacgctctactatggcgagtacggcaacaccgggcctggcgcggggacacgtcggcgggtgacgtggagcggcgtgcacacgtcgatgtccacgtcggacgccacgaggttcaccgtggcaaactttatcgttggggatgcgtggctacctgccactggagttacctacacttcaggtctgtagtggcgtactagtagcgaaaaagaaaaaaatgaagatggtgttgtgttctgttctctgtatcacctgattaattaacttggagctaaattgcatgttgttaactagtaatttttatttgctccggtatttttatgtgttctacttgatgttatgcatgtttcagattacaatgtttctggatgtgttgaggttaattggaatggttctttatgtataaaggattctacaccaaattgaaacaatcacagaaactcgatgttctagcattgtgctgaaggaatacagaaggatccagttgataattgagacgaacaatactaaaactcatttatcagcaagaaatgataatgagtatatatgaaaatggatagagtttcagcttattcatgtagcaattcttaggccttgtatgtctgaatttcagaaaccttatttcagagcttccccttctgatctttcctgggctgcagagaatcgacgtcttcgaaaactcgaagcgtcgacagctcgatgaaatcggtgacttgaacccccataggcctgcatcacagaattgacagcacaatagtaagtttgatcagaaactctagtacgatatcaatctttttttctgaaataaatggtaaatcaagcaaagtgtttgccagcaccatgggaagcaggccttctccggcagccgcatgccaagcctaggcccttcatcgtacccttcgcagatcatattccccttatcatctctgtaacataccactcctctcacctggtcttcaaatacctgaacaatcacagcacagcataatcttgtgtaaaaaccatgaaccatttagcaacagttgcatcagctaattaagttggctgtacttaccatcttggcaggtgctgcagtttgggagaggtgagcattgctgcagctgcagctgtgcactggagctctgacgaacttggccatggttgccttccttgtgccaaatcttggggtggaaatggaggaagaaaggtgatggcaagagctcattgccgccatttggttcatggccttgctagtttgggaaggagaagggtggtgaactagttgcatagagggcaagcttttcaatgatggatccattggattttgacttcttggtgcctagcgtgtattattggggatttctattggtctgtttgctgatgctgagcaagatggcaatttttatatgcaatgttgctatatccacaagtgatgctaacaaattgaagatttgtggtcactttattgcattgtgaatcctgtctagtggacattgtgtaacatgattataaggttcctttttctggtgaaaactaagaatagcaaaaaaggggttcaaagattggcatggcatattatggtgttaacaactcggcacaaacattgtagtgttcatttagcattgttcttttgttagagtagaaagtaatgtttcggcttatcttgtatccttttgggccgtgggaccagctgtcccatcgtggacattatcttcatagtctttaataatatactatcctatttggagaaccgacaaatccttatctggtgatgtggtacacaaaacaaatactagtagtcgatttattttgatcaccaaatagtgtacgactgaggcattttacgcagtaatgaagttggcttcatcatgtggttattgaaaacactaataacattgttatattttatatttataaaattgcatgtggctttaaacagagatgaaagataatagtaataagcaaataggagtaccataattttatttacacccgaaaatcggccgctatttacacctctgatgaaacacaagttcccattaattcatctctgtttggacagagccccggaattacactgacgaaccctagttaatttactgtggtaataataatatttccagagagcaactctaacctggtgcttggggaggtcgaccaggtttactacatctgcaagtctcttctgcagcagggcttcaggccgcagcaattcatcccatccactgcaaaatgcaccacctccttggctacatgtttccgagccattccatcacctctagggccagaagcccaagcagaatacagtgactggatatcctcttccgacaacccgttccgactgagatcgagcaccttcagttgctttgcagaaatgatggcatcagcgagttcttggatggcatgacagccagaagaggagtttctctggcatgaacttgcacagctcccgtctgggccggtcgctgcacgggtgtcctcgtggactgcctcttcgtcttcgctatccggcacctccatcttatcagggtctatgtgatcgttcgcttcagcattggtacgttggttttggtcagtacctggtgatacatcctgcgcgtcttcatcgtactgcaatgttctctgtagtgccaggtttgtgttctcagcaacgcgtagttcctccaattggtcatttcctgaaagtagcaggagactattgaggttgatgcataagcttccatacttgttggtttttatgtagtagttgttcctcacctgctagtgcttgaataatgcccacggtgccagcaagcccaagattgcatctatcaagggtgagagatctgagactgcattggggattcgaaagcaatgccctaatagcatcacattcctgcgccgtatacagcataatttagtcgaccaagtttaccagaatatgtataagtgtatcaaggcattcgagaataggaaggaaacctctagggtaaaagaattgcctccaaggttcaagtcaacgatattaatttgagaaagatttgtacagagttgcgagaaatcaggagttgtaagcccacagtttgataaatccaatctcagcaattcttgtgatgcacaagagagtgcctcagtaagcttagttgcccctccctacaaaaaaaaaaatcttcacagataagaagaatgttatttgtataatctgaaaatactaaccatgcgtgggaagcagggctgtgtacatccattgtggatgtagaggccggattttaatccattttctaaaaaaaatgcgtgggaagcagactcactgatccaatgtaagttccacctagcagaaatcctgataagcatgaggattgtgcaagtacacacagcttatcaaccattaacttactcagttttataccagtcaggcttagttctgaaaacctgcagtgatgagatatatggctcatccattatttcactgcacatctattcctaataggtatcaacaatgattgaacaaatgtttgcgaaccttttcagagaggcaagtttggagagaaggctaagcattgtatttccagaaattggattgttgtttcctgtcaaaaatatgaaagtttgaaacataagaatgctgtacatgaaacatatctgatagtttttaactatgcagagcaggagtaataaaagtacctaaggagagatgtgaaagggcagacccttcatgcagtgcatctgccatcttctgaactgttcttgatgtgatagaacattgctcgacattcaagctgtacagtgctgttacgatatgtaaacagagcacacattctataagaggaaattaaaggttggtgccattaaagaaaaatatggctggcaaaaacacagaaaatgccataaacagtacctacctttgcacttctgtaggattgtgaaaaggtaagaaccgcatgcatctgtgaggcgattcccagacagattaagtacttccaatcgattagtcataacagcgcactcacatatctgtatcagtaaataaggagtaaatgatttcagaattctgttcctaaaatgaacgtgtgcctgaaagcaagacagcttattttggtccgataggcaacgatagaataatttgttctggtaaagggtcaaccctcgagtttcatcagagtatggaattagaaccatccaaatggtttcagttagttttaacaggatcattgagatttgcgactaagagggacatccaatctcaatgcagaaaatcaaccagcacttgttatagcacattcccgttgagtctaaactctaaagtaagtaatagagtatagcttctagtgatctaaatttctcacacagtaagactaaagagagatatcacaagttaaattggttttcggctgaaattcttccaggaacactagtagacgtaaggactgcgtgtcgttcgggcctttctcggccttgttaaaagcattatgggacatctctccccaagagtcaagttttcctttttattgtagaagaggatccagtccattttaatgttcaatttttttgagctttcaaaagcagaaataacttgtagtttcactttgataaacaagtttagggatagtaaaaagacctgaaataaagcagttggaccaaatcgattacaatgtaaatccagtgtcaagccaccatatgtttggcttgatgaagaaaatatttgttgaagcctctcaattgtttggtttcctgcagttcgtgaacataaactttagtcattgtaaaagcatagaggaattaatatggtacacacacatttagcttgaactggctttctgcgatgccaccaaatcattggtgcgtagattacataagataagacaaa

SEQ ID NO: 8466 - DNA, 14214 bp, Oryza sativa
atgctatagttaattaagtttatggttaatctcagttgtccgacaagacacacgggaatcaagatgactactgaaatatttgtaagacttgtaagcaattatgtagagtaaaactcaaccagacagtcatgtgcaattacaacacggtgttgtgttctacgatggaatataaataaataataactgagcatttcatgttgatacttagtacaatgcaaatgcaggcaaaagcctacatgtagtcagcacatatgttcatattggtaaaggagttggtgcaaaacaagttcagcacagttgaaacttcaataatgcaagcactgaacacacatggttattagttaatgcatattaagttctaagtccaacaagaagcttcacaaaacatcgatacttccatcaggcaaagcaacaagagactatcttctgacccacacaacaatcccccacaataaaagactgaggaagtcacctttatgcattaactaatggaataacgtgatcatgttctttttctaacaaaacagtaataaaataacatcataagcggaaaatagatccaactttaaagttaatgtttgtggctaaagatcgcatagttagttatccctcacttacttttggccatgcagttatcatccttgccttctccataagattatccagccaagcatactgctcaaggaggagcttcctctctttagatgttccacgagcattagatgtgtctctgacaagctttttcagcttctgctcgtatatcttcatttcctcaagtactttggctgctttggtaacagtttcaatattctgatggatttggtccattagtgcatcctcatcttccaagcactttgttatttgaagagctttattgtaacaaagctttgcatcttcatacttttgaacacgggaatggacctcccccagatttataaatccctttgcctcgccttgagtatggcgtatttttctacatatctctatgtccttctcaatatggcccttggctctgttccagttgcgtagttcaatataaacattacctagattgtgatggagcctactgcgagcatcgtcatactggtgtacctcttcctcatcacatatcttcagaccctgaacaagtaatttctcagcttcttcataattatccagttccagttcaagcatgcccatattattgtacgcatcaataagctcctttaggaagagagacttctgagacgatggattctcctttagaacccttgctagcttcatggatgatttgaaatatttcttggcattccgaatggcactgtgatcattttcagatcttagaaggatctcatagtaagttctgccaagctgggtgctagctctctgctgctcaacaaggtcatcagcctccttggcaagttgtaagtgcttcttctgtgaagcatcaaacatcaatgataactagaaatatggattcatgtaatagaaaaaacatacagctgctttgggttaacaagagcattatgatgagtgttagaaaaataaccaacagacaacatgaaacaggagatcagcacttaataccatgagttgagtgaacaaattactccaaatgatcatatttgaacaggggtgctggtaagtctataacgggcctgagtacacacaaccagggtttacattaccgtcggtaaccgcgcggttaccgtggttaccgcccttactgcgggggtacggtaatagaaataccgcggtaacctccttaaattcaaataaatttaaaaaataatttgaattttacggtttttcactattaccgcgcggtaaccccggccccggcggtttgggaaaccctgcatacaacacatgctaacaattagccattccccctcacttcacataaaagggtaatctgattcacatggttggctcctcaaaggtttacatgcaaattagatgcaactaaaccaaccatatgggacaaaacccataggcgaacctgagccagattgattaagatcaccaactaaccaaacatgcagacaaagagtgcaagattcacaaatatttttttctcattttggtaataccacacaaataaacagcagataaattataaatctcaacactggccatactgaaatccataacataaaatgtttgcatagtccagcaaatgattcaaaccatttgtgtacatttctacaagcaaaagtccaccataagtttgccaaagtaaagcataatatcgaagtatgcagcttaatctgatattcagttaaatattcaaatgcttgactaaatcattcatatacagatgcaacaccaaatggcccaaagcatagtggcattgagatgagcaaaattccctgatacagtggtgcgtcagtgctaaggtacgccgtagaaaccatagcgcaggttgtaactagcaacaattcgtttgccggcagaccccaaaaaaaaatccaaaaactcaatgcggaaattctacaacttaacccacacctgcctataacgactcagacatcagaaaacgtgatctgatcatatgcgtgcgatgcgaaatggaaggatcgtggtaacctggtaggtgagggcctcggagaagttgccgaggcggaggtggacctcgccgagcgactggcaggaggggaggaggtggcgctgggggaggtacttgacggagaccttgtagtcgatccgcagccaccggagcgcctccacgtactccccccgccgcttgtggatgtcgccgatgacgttcgcccaccgcgcctcctcctcccggttcccctccgccaccgcctcccggtacccccgcttcgccgccttcagctcctcctcctcctccttcgtccaccgtcccccgccgccgcgccccatcgccgccgcctccgccgccgctagggctccagctccagcccgattttccccttcctttttttctcgtgcgggttttggggtttccggtgggcgcaaaatggaagcgaattctcccgccaaaatattggggaaggcaaaggcacggcaccgcgccatgttgttgggctgcgtttctgtgtgggccttcagtgaaatgacaacgtgggcttcaagctgatttgggcctttgcattttgggccaaaagagaatccctctgaatttcaggttaaccgagcatttgaaagtgcactcgtaggaacatattgatattgctattttttttatggactagtaataatactcgtgttttgtaagtgtgtaacgggctaggcacataattaagaattgattgggtctgtgggaaggaaacagatggagaataatagtaagataataatgaacacaatgtttagtttatactcccaccgtcccaaaataagttcaattttatactattcatacccaacatttgacttttcgcgttatttgaaaaaaactttaattttgaatgattagttttttattattattagataataataaagcatgaatagtctcttatgtgtgactatctttttttagtttttttcataaattttttaaataagacggacggtcaaatgttggatattgatactcacggctgcacttattttggaaagaatatatactatatcagtacaacctattggagttaactagaattcatacacgcgtgggaaagaacggctctgatcagctgaacctagtctgaaataccgaaacgacgaggggttttctgtaaaattcaatggcgtagatcggctgagctcgcggtgaatctagcacgtttaagatatctaatattccgagacagtgtaatttggctttgcatagcagccagccagccacaggaaggcaagccaaacgggccagcacttgttcaccgcgcagtgctcgtcggccgccagctcgcgcggtcgcgcccatgtctctaaactctctctagatcaaaggacacagttttttctaaaaaaaagttcatagtaactgcagctttttctaaaaaaaaattaactcttccatctatgtgtttgagagaagagaaaataaaaggactgaaaatatacacaaaataagataagctattagctattagcatgagaataattaactattagtttttttacgaaactattaattgttttagacttaaactaaattaatatatttttaagcaactttcttatatataaaactttgaaaaaatacgtaccatttagcagttcgggaacatgcgtgtgaaaaacttttatactctatccaccgatctcaaacgtagccaaatactacagattttcgtttatatactgaaaatttgtagtcacataaaaaatatatatgtcaaaagctgagaaacacatttttcaacttttagaactaactatcaaccaaccactactttgttcaagagtgggagattgtgagttgttttccacgtgcacgcttcccgaactattaaacggtgtattttttgtaaaaagaaatgctatagaaaagttgctttaaaaatcatatgaatccatttttaaaatttaaaatagttaataatgaattaatgatgtgctaatggtccacctcgttttgcgtatcttctcaatctcctcaattcccctcctaaagggtatgtttggtataacttcaactcttaaatttagcttcaggagttgagtgtggagtggagttgtggagctgattaaacctaactacacctctctagttcatcttgtgatagtgtttcacccagctccgcttccattttaggtagagctaaaactgtttgcctgggctaccgctctaaaagaaataaagctatagctagaggtgtgccgaacatacctttaggggctgtttggtttttaagtaacattaccataactcactttagacaatgttaggcaagtgtggctgaccacgcttttcgtggcctacaaattgtaagccacacttgtggcaaagctaggcaaagaattgagtctatgacatataggataagatggtaagaaagtgtagcttgtcataactatggcaataaaccaaacacaaggttaaagaggtgtgacagtctaaagtgtggtctggcaagttaaagtattgaacaaaataacccctaaaatcttatactcatgtaaggcatgggacaaaccgatcgagtgcaaacggtcatagtagtagctagccacgttacgtaaagttacagcgcgcgtgcgcgcggcggcgcggcagctcttttctccgcggcggccacgacgagcgtgctgccagccggtgatgaaacgatgatgtcggcacagcgcgcgtggcgtgcgagtgaaccgtacgttgctcgatcgatcggttgctctcgtctccgagattccaccgagcctagctccgtagctcgtgctcgtggtccatctatcccgcgttagattttgtcaatctatggtcaatcgtcatggtcgtcggccgctagctgccgtacgtacgtttgtagtaataaaatatgcagtgtcgattgacgtcgatgcaaagcatttttcgtagttttgctgcgttgaaggcagccaacaattgatttgttaatatttatagtattaaatatataatattttatatattttttatttattttaagatgaaaggagtagctagtttagatgccaatttacggtgtagccagtaaggctttgaaattttctcacgtcatacatgtatatagccttttttttttctttttacaagacctagcgggcgcattatagtcgacattgtgtctgtatgtacagtgtcgtacagtacattgcagcagcaagatatagaaaatggaaaagaacatatttgccttgtttagttccaaactttttcttcacactttcagcttttctatcacatcaaaactttactaaacacataaacttccaacttttccatcatatcgttcgaatttcaatcaaacttaaacacacccattatatatgtcgagcgtgtacttcctggaatcggctgtaataaaaaaaaagctatgccctctttgaaaggcgcgacaaagaaattgaaagcatcgctgcaactctatgcaagttgtcaaataaacatgagccctggtattgggcatatttgcaaacggaatcccatcgagaaataagttaaaaagtatatttgcataaagaacaatttatgaataaaattattatatacatgttctttagtgatttaaaagtaaagactgaaaaataaactacgataaaaaaacccaactaactttaaattggttgaaaatttattaaattggttgaaaatttaaattttgactgataattataaacgtaaacgaaaaaacgaggcgtatgttaccaactactcgctaggttctttcgccctgatcttctgtcaaaaatggagggccctgagatagtgagatgccgacgccgccggccagccggcttcggctactactacagtacttgtcgccaacctgccaattaactggttgctcgatcgcctaagaattagcttcacaagttcggatgcttaactttccagctggttattgttcagaacagcaaaatgaccactcgttttcttgttagttctgcagcaatagacagtggctgttactacatgatccatatactttattaattaaccagaagaaaaggagctgggggaaaatgttacatgaacatcgtattcaagattaggtgaactgaaacattcaaacatgcacgctaatgctagctccagaaattgtttgatgttttcctgaagaacaaaaagggactcggcacgatgtctgaagaagctgcaggcacaattacacgcgcgtcgttggatagagtcagtcgacgagatgactagaaagtagaaactggactaatccaatatgtaaacaagcgtgtctcgacttatagacttttgctgctgctggcttcaacgatcgatgtcaccttgctggctggcctacttagtaaaagaaaacgactgtgtttttggtggtcataactaattaggcgagacactgatgaaccaaaaacaatgtaacaaagtcgcagttctagctgcacttaacacagattatttaattacctcacctaattgctcggagaaaatctcggcaacaaagccttgtcgcaaaagccagagtaatagcagaaccgatctttctgggagcaactgatactttccaggaaatcttttttaaaaaaggatagtactactagtattaacacgttgttcagatcatgcacacgtctttgcaaggtaaaagtatgagtaaaacacaagggaacaaaagcaagatagggtgattagcaacttccaggtaaccgttttgtctcctctcgttaaccagcgaccgagattagcacacgccacacgcgccactagctttgagcggcgttcggccgagttctaaagagccactcagaaaagtctactttcttatttcttacgaagaaattgttatacatatgatccaactattcgactcacgtacgactaaatttaatcgacgactataaacagctacactgcgtataaacatgttctttttcgattgatatatgtttgcatgtatctagttatatagaagatatgtttcatgttaaattatttaatataaatactttttaaaacatatcaaataaacatttttttttctcgtgtcacgtttcgccgaaaatcagggacgaacttctttgtcccagccgttttctccgccagacagccaaggcggaaacgtgcggagaaaacggccggagaaaaggccggaaagaccaaagcagtaacgcaacgcgatggctatcaacagggtggcaacgcgatgcacgcacgcaccagcagcacacacgctccacgcagcagcagcagcgagagaggagatatttttggtctctcgggtggttggggcatggaggatactagtactaggtacaattcatcaactggtcacataaaaaacgcatcagtttgctattaattttaagtgcatgcatctaccgtgacttgttccatggaggaacactgcaagtacagtgtcgtgtagtggaccacattgtgaggaggtggtggttaatttgggcttaatccctggaattttttgattgaaacctataggtcctcagtttggtgcattattacagatgagatcctcttctgaaccttaattagttaaagaaatatgggaaaaccttaattagttaaggagatatgggaagtagggtaatattaataaaaagatcacgcggaatgattttcataaatgattaaccatgaataatatttcgaggttattattactcgtagtactccctccttctaaaagtttaacacctatttcattctttggtttttccaaaagtctaagtcctatttgtagttattatgtactaaattaaattgttgataggaaaaaaaagtattttaatacttatttgttgcatgtttattggctttgtcatatgataaatgaattaattgtttcttgttcttggtgaaaaagaaataggacaatttttttttgaaggagggagtactacgtactactccctccattccaaattgatctacatattttataggtacactaagaccaagaaaagctaataactctctcatattacatttactctagcaacaaattcaatacatgcaccatcatcactattttctagtcaatagcaaatcgagatattgcatgtgggttataaatacttgtgtgcatggatgcatgcatcaatgtccatttactctaatgcacaaataacgaatagacttaatgaatgaacacaaatatgtagatcatttaagaataacccaaaaaaactatatatagatcaatttggaatggaggaagtatcagtttactcatgattacgctaattattccactcaattctcactttctcagtgccagcaatcaatgctagccagcctactccggcagtcgatgcattcaatattcaaggagtaaaacgcaaaaatgaataaactgaaggtgcaacattgtaaaatgaccttctccgaaggggcgaactgaaaaactccaaaggcagcacaaatctcgtccgtacctgccccgcttctacccaagcgccttccgctgcaagcatccactggctgacaggtgggccccaccacgtgcccctcctccacctcccgccatataaaaaccccaaagccccacccacccacgcttctctccaatattttgtcgaaccgattgagggaaaaaaaaagagaaaaagaaaagaaaaaaaagaagaagaagagagaactcgaactctcgcctaccatttcgcccccctccgcaagcaatccaccactgcatcggcggcgagggctcaccggcggcgagccatgtgcggcggcgccatcatccaccacctgaaggggcacccggaggggtcgcgccgggcgacggaggggctcctgtggcccgagaagaagaagcccaggtggggcggcggcgggaggcgccacttcggggggttcgtggaggaggacgacgaggacttcgaggccgacttcgaggagttcgaggtggactccggggactcggatttggagctcggggaggaggacgacgatgacgtcgtcgagatcaagccggccgccttcaagagggccctctccagaggtatgggcgtcgctgggagcggcttgatttgtgtagtttacttgttcttcagggattgattgctgttgtaaatcgttagttctacggccgattgggaatttttttggggatcgaggacgctcggtggatggattgggaggaaaaaaaggggatagataattttaggggttgatcctgagagatcagatttggggtgatactcctgtttaattggtgatttagggtggaatgatgtgcctccatgtcttatttgtggtgatcagggcttcatgtgctgattctgtctgctaggattttagagatgccatttcagctcttgcactgttcgatcttttttttttctttttctaaattgcgcaatccatatgattacctttttctccaaggagttgaattcgcagtaaaggggaaattattctccgttctctttggaggtctccccatctgggttcttagttgttagatggatgaccctagtatcgcttgatgtggttgtatgattgcgagaggattgttccggacgtaattcaactattagtcgaagtaaaggatttttatgatgttgactgtcaagtcctacatgccttagcatatactcctggctgtttagtcgtcctggtgcctgtttttggttctatctttcggtcaatagcgtcaaatcatttttttgtggtctttgttggcctcttttgcttagacatactagttcattttatttatggggatgttacctcttgtgtaaattgtctaaatcggttgtatctagtcagtcgtgtgagctaaaccacagatctttgttgaagtgttgcaactcagttttggtgttccttgtttacaattaatgttgctgcagcatattgatgttagtccgtaaagcacaactttagactgcaattgcagaaatgatgaggtccattcatgggttttttttcctacaatcttgaatttcatgatttgagatatgctttcctaaaatttgaatgtttatacgcatggttgcatgttccaacttcatgtttgtgaccaaaagaaaataacatcagcaagagaagttcatctgtgtaatttcttgccattgatgttgaccttccattgcagataacttgagcaccattaccactgccggatttgatggtcctgctgcaaagtctgccaaaagaaagagaaagaaccaattcaggggcatccgccagcgcccttggggtaagtgggctgctgaaatcagagatcctcgcaagggtgttcgtgtctggcttggcactttcaacagtgctgaagaagctgcaagagcttatgatgctgaagcacgcaggattcgtggcaagaaggccaaggtgaattttccagaggctccaacaactgctcagaagcgtcgtgctggctccaccactgctaaagcacccaagtcaagtgtggaacagaagcctactgtcaaaccagcattcaacaatcttgccaatgcaaatgcgtttgtctacccatctgctaacttcacttcaaacaagccgtttgttcagcctgataacatgccatttgttcctgcaatgaactctgctgctcctattgaggaccctatcatcaactctgaccagggaagcaactcatttggctgctctgactttggctgggagaatgataccaagacaccagatattacatcaattgctcccatttcaaccatagctgaagtcgatgaatctgcattcattaagagcagtaccaacccaatggtccctcctgttatggagaacagtgctgttgatctgcctgatttagaaccctacatgaggttccttctggatgatggtgctggtgactcaattgatagccttctcaacctggatggatcacaggatgttgtcagcaacatggacctctggagctttgatgacatgcccgttagcgatttctattgaggaattcgaagtcttctagtcggagcatgtacacagggaaaaaaaaggtaaggattatcaatttgattttttctctctgaatatgcacgattttttacattgctctaattttgcttgtgtttttcaggaataaatactattggagattgggaggcacctgcatggcaccttgggggtagcatatcgttatgtttagcttagatgcaaaaggctgcatcctgaaactctttggtgattggacctgttccctatccgctgtctatgtatggcagccatctatgagactcaagaactgcttttttttttccgttctagttttctgtcgttgctacctgtatatggctatgaacatcgtgaatccatggccattatgttttaatctatgttgttgactgctctttctttcggtctttgctgtgctgcgctatgttggtgataactagctaccatattgattttctgtacataattcatttgttgaatccgaaattaaatagtgcattgactatatatttatatattatatcttgttagattgcagccttgcagggttgttgctcttgctactgggcgcgtgccatccagaatcaggatttctggaaagatgcttcacttcctcttttcttgatgtgaataggcagtatgaccggccaggtataagctttgtgataacaagaggggtatttggcacatgttgtcactttttcttctcgagatatttttgttaagactatgactaattcagagcgaagacctacgagcttcgtgactgttagatattttttaagaagggcgaaatttcaatgaatgtttaactgcagcactattctagatgtctttggtccaagtcaaaatatccttgcatcacacttggatcatggtcaatgtcagtacagtctttacgagttgtggacttgtggtcccatgtcatggtggttggtcgtgatttgatgccgacatggttgcgcttgcgcatcgcattcttgatttgttacggctgggtcatgcccttttccttctctcgcatcattttttgctatcctcataaatcacatggcttcccctaaagacaaaaggattatcaaacgtggtggccactagtgttccatcaagggagcatcacaagccaaacactaccaccgtttgtctcccgttggccagggtcattgtgcgggacagagcgagacagctctacctaattacctaaagcttgttaagatttcaataggctgccgttgtatatgaacccttcaacaagtttagaaacttttgagtgagagagcttgtgcaatgcatgttccttcagctgcaccaactttgacttgcctctcttgaagctctaatctcacctaccttcgctagaaaactgaaaactgaggttagcatcgaactctgggtgcggcaggttaatcacaggatctaatctgatggttcgctcctaacacattctctgttaggttggctcctaatcgtattgtattaccttgtactgttggttgggattctgataccgattgctgagcatagcgaatcattcattaaaagaaaaaaaggaacatattcgttcaaatctcgaaggactaaacattcacaagtattatatgtagccttcactccagatctcacatgacctcgaaaactttgagaaattaaaaattacaatggaggctgatgaggagatggcatacgcatttgatttgagtggagtaccatttcaaatatcagagtatgttgtgacgacaagcgcggatgataatcaacgaaccaagccacatatagtggacgatgctttacaatccaccttgtgacctcaacaacccaaaacacgccaagcataaaataatatttacatatcaaacggaatgttcccacaatggtacatttttcgaaagaacaaaaattatatatccatatgaatctacctctactttcttttcaaaaattgagaaaaacgcctatctacttgctcctacaagaaagatgggaacaaataaccagaatgttatactttcctaagagggctatgggatgatgtggacatatatcacaaggcgaatgtctgaagtttgctgtgccatctatctcttctcactcctaattccctactcaaatcaccaattcccgtctcatgaccacttggaaaagacaagtttggccttcaaagtagccaacgcgtaccgcgtacatgacacaagcatcgggtaattttaataccaaaaggtgtctccgtggttaacccactgcacgaaatgctcaggtaaattctgagtatagatatcagcatcttgattttcctgaaaagtttgaaatttcgcaattggttatgttattagcacaatgatattgcatatttgcatacatgatctctaccctaccactataaattctcacacaattaatctccagaattggtctgaacaaatttcaacaaaatcaaagaacagaatttagcggaatcgaactgttgggaacatatgctcaccatggtctcagaatttatgccacttataacattctccgctgaaaggttcacatctggagtactaattgcaatggacctgttcaagcacaatccatcagcattcaatgagttacaaaaaaatgtttcagaggatatcttcaaattagcatcagtgaacatactggaagctcagaagacacttgttaattggatttaggaagtgtggcaacataatatttccattttactccctccgtcccataatataagg

SEQ ID NO: 8467 - DNA, 4741 bp, Oryza sativa
tgcaacaagtatctgatttatctactcctgcaataattctttgcaaagtcttaggtacacatactgcaaacaccgcctcattagattagaaatttttacaaggcctacttcagtttttatcttactgttgaagtgttatatgctatacagaagatcagagccagaaactagctaagcaacactataattgttccttcaagatacaacaaatatatgtttgagaatgtcttagacattacataaaaaatcatattcatttcagtctggcttcacacattacatatacataaacacaatggaatattgtcaaacatcctctaaagaaagaatattgtcaaacaaaagcaatcgccatagaccataccaatggcagatgcatatggagcaatcctttcatgaaaaacaggcttgtagtgttctggatgagcataatagtcagcctgaaaaatgataccaattgggaattacagtgatgcagttgtaaagtaagggaatactaatgagatatttaacaagaatgaaaaaaagtttacgagtaatatttgaaattaattttacgataaaaggaaagttttaatcaatgtaatgaaaaatggatagcacagaattaaaaaattatccaaattgcttgatggaattaagaaacaatgaccaatattatgagacaaagggattacattaggacacaataagataagttatattatgtacactaatacaaatacacactgtaattatctcagtattttgtagcacactttaattcatcttatgtttctaaaataaaagaattgtgcattactttgttgaagcatctggtgggatccttgggagtgaccatgtctctagaagagacaacacaaccatacagctggaatactctcttgcttgattgtggatgttgagacagacttctagcctgaaaaatgaaacaataaagcataatgaggtgtcttaagaaactaatgcttatgtttacaaataaaatcaaatagctaaagtatcctatcatttagtttttttttaaaaaaaacagagtgaaactagatgtatactatcattcccacaaacaaaaaggtgctggcagaaactacattcagttcaaacaggtcaaaagagaaacttacgaaaactacgatgcttagatagttaacactaaaacttctgacagagaaggagtaataccgcagaaagctctggaagcttcccagcatcaacaaagctatggggcagtaacttgaatatctcttgcgcaccctgagaaactgtcgtgcatgaagttatatatatgtgagggatacaatgttacaatgagaccaattacaggtctaaagagatgctatttttcccagaaagtaagattacgaaatgggcaacagctaagaacttttgtctcttcaaagcaccacaatatatccaaacaacggatattcccaacttgagcttatatgatgggcaaaaaaaaaaggtacagtaaattaccatttccagttccagtgaatacaaatactattgggcaaattccagatggaagtccaaatgttgctatctcttcaccaatggcaatgactgcagccttggctgcagcgagtgaaggatacatatgtgattgccctagagagagaaatggggtcgagtatccaaggctcaagtaccctgaaatttaaggtgaaaaatgacctgcttgaataatccacaacaccaaacaattacttgtgaagactaaatggtgcttatgacgaaaaactgctacctaagatagtatgtgcagatagcagatttgggtggcactagaatatcatatcatgtcagtacatgaactgagaaattaaggcaagcattcttcatatcatgtcagtacatgaactgagaaattaaggcgagcattcttacgttgtccgagaccgtgtaagaagtctatcagtccagctctcccagcaaatttcccaaatgcaagcaatcttttcccatcatctccagcaattagctcataatcaaacagggatactcttttttcaaggatctgagaatgtgacctagaagtttagtacctccacaaaaaatgattgtatctgttaacggaaaacatggatataagaatatggtagctacctcatctaatagtggcatattttctttctgggccttatgggtgtgagaaaagaatccatatgctctatgtggaagaatcatctccagctgcataaaggaacatagataagaaaaattcataatcgcgatactggtacaggctacggtgcacagtcgattagagcatcgaagatggtaatgtaacctttggttgtttgattcctataataagaccacactctgacaggtcttttgaaatctcacacccaacatcctcgtattgagcatcatgatggatcctctttgtacttggttgcacgataatccgatttaccccagttcccctcttgcctcctccaagcagaaggcgagcacaatgggatggggttaatggtgctctcctttcccacatattagcagtctcggcaagaatcccaacaactccattgcctagtaatgtgtcactgttctgtggatgaaaataaatacagttagaatgtgaatgaacaaaaaactgcatggtttgatgtctgatagggccaagcaacatacttcatttcccgcagaacccatagagaagccctgttaaggtgccacagtgaagaacctgctatttacaattcctgagaatgaaatgcatgccaatcagggtatggagatttacaacaaatgattatagttgcaattatattttacacaaacacaatttagagcttctggaagttgcagctttttctagaatctccaactcccgaaacagtctagcttttcacccagattctaagaatcataagctatagagtctaaaaaatgattataagccataagctgcaaaacccagcttttccacattctcactagctggctactcaccaactacttctcaaattctccagcttgtcaagactacactctattgctgaaattatcttattttccaaacatttaatttgaagtttgatcaacatgacctaaatatgaagggaaatagtttctttttgtttcttaaaaaaagataaagaaatatcaagtagatgagctctcgaactgttccattgttaaacggaacccctcgtttaaacactcatgttgtcatgtgccaagtatcaatcaaataataaaaaagcaatagtgtaacgagaaagaggaactaaacatctccctttgtctataggtggagactcacagtctctcactgtgcaccatggtccactactccactctgagcctctgatgatgacaaccaaggaatctgaggtcctaatcaatgactccaagaggaaaacaatactcataccagtactatctttccaacatgattgacaaaacagaaccgttgattcttcatggaatctccggacggaccggacctcggagacaaatggcccaacggcccccaactccgcacctcactcgcacccatgccctgtacgttggggcagggatgatgatcaataattgatcatgatatgctgcattgctacctcctcacaggctccttgctgctatactattactggcctcacactttgtttctggccttctgttcacagcgtctctcgctaagcgaaaccgacgcgtaactcgtaagcgttggcaggtgtcacacgccgcgggcaaatgcgcatggacgccaccgccgcggagcacgagaggctcctgatcgtgaatccgcgccaccgcctcccccagcggccgcaatccggccgagctacccggaatcctcgcgaatgtcgtcccgatcgtctcctaccctcgggaaatcccctctctcccccgcgccgcgaatccccaaaacacacagagaaaaaaaaagaaagaaaaaaaaaagctcggctaggttggtgatggcgtcgtcgcgtacctcggattgccgcggaacggagacgacgacggaatcgtagcaggcggcggagtggaggcgcagccggagggattcgaggaacggatgcgctccagcttccagtttccaaggaggtactagtaaaataggaaggcggaagaagaagaactgcgcgatttggacacgtcggctgcggcggcgccactggccgtgggatggcgacgccgggccgacgacgccacgggagaggaaggcggcgtcgctggacctggacctggacaggagttggttctgggcggagtggaggcgacggcgacgaggacggggacggcaatatgaagctgcagcgtggccgtgtacgggggcgtggcaacagttggcaaatttgtcctctcccccctttccaagcatgagggggtgaaggatttatccagtgagtcagcgcctcagcggaatttccactttccagttgaaaagtttgtattgtttgactagttttttttaaaaaaagttattaaaaaaataacattggcagacgcacacgtacactggtagagaaaccatttttggtcggtcaacccatatccacaatagtcccggttccattaaaaaccgggactaaaaatgattttttagtcccggttaataagagaaagatctttagtcccggttgttgttaccaaccgggactaaaaatcatctttactcccggttggtaactccaaccgggactaaagttcatttttagtcccggttgattccatgtcaggctgtgtcagggccctatgatctttagtcccggttagt

SEQ ID NO: 8468 - DNA, 25511 bp, Oryza sativa
aaagaacaggatatctcatctgctagacggcaactaccacatccaagttgagcaccacgatgtatgcaaatttaacccagttacctacgctaacatgtttttaacttcagtatttgataattagtataggcacccataacttcaacacatatctgacccatttccgatagttcagcctacacaagcctttcaaaattgtttccaaaaagcatttgtgaaaggaatggatcttctgcagaacaccaaatggcatgcgctaaacatgaagggtggacatgatggaattcgcaatcaggaaacaagtcactgtgataattgataaagcttactagtggaaattttgaaaattaccaataatagcagcagcacgcatatcagaatatggttcttcgccagtaagcagctcccacatcacaataccaaacgagtatacatcaatctacaagtaagcgccatatcagtttcagttggaatataaaaaatgaagaacattagttttaatgacttatgatccataagggtgcttataatttataaagccagtgttcttaccttctctgacaccatattgcttttcccactcagaagctctggtgccatccatggtaaggttcctctaacaccgccagacaccaaagtgtgctgcttcacctttgatagtccaagatcaccaatctgagcagaaaatggaggtgggatgacagtcaggtaacaaccatttgaagcaagagctgaggaaatgaagatgagagggcagggatcaaactttgcagattggtcgttgtggatccctcatgttgaccagtaggttctcacactttagatcaaaatgaactatattcttcccatgcaaatattccatgccaaatgcagcatccatggctaatataactcttttacggcgatcaattgtcctgtgcagttgctttaatttagaatttggatatttgagaataaaagaatcatagtgttctttgattaaacaagtaatacctgtctttttttctcaaaaactgtttgagagatccattgatcataaactcagtaacagttgctaagcttccatcaggaccgtcacgaactacaccataaaatgaaaccacatttggatgatgaagtgaacttagaatctgagcttctttccagaaatcagcaatctgcaaaaccacatatatatctgaactagagatcttctccatagaatacacaaaagcaagaaaatcactatccagagggttttaacagaaatctttaacaaggaaaaaaaaagctatgaaatcaatcctaaaagttctaaggtgttaacaagtcaatcaagcataccaaacgctctctctcagatggtctgccagcaaaacagctagcctttatccttttaatagcaacatcacatcctctccatttaccatggtaaactgcaccataagtacctgaacctagctccctaatttcctccaagtcatcattttttatagtctgcatgatccaaacagagcatataagcgggatacaatgttgaattaaaaacaatactacatatcaagagatcagaaaaaacacctgtagtccttttgataaagcttctgcttcagcggttgtagcctcaattccagaacttttctgctgctcaccacttccatgcacatcagaatcctgatctgtaccagtattctgcacataaaaaggattttagttaagagcactaggtagctaagccagtaatgtgtaaaggtcaagtattacttacaccagcaggtgtctcctccaacttctttccattgccttcctcatcacaagtcggcaaaagagtgggaccagcatcttgttgagccttttctttctcttcagaatcttctaatgcagccttcttaacagatgcagccagctctggaaggaaattcaatctatcctctgaaatatccccacattcctgcagtgctgtagcccctccttcatgcactttacttgtgacagtttcatattcgacaggcttcctctgtttgggatcaacttcaggtacaactccgatatggtgggtcaaggcacttggatcattcatagcatgcaaagaagttgtttcattcgcatttcgggtaaacttctcatgctctggaccttcaagtttcttcaatggattgatatccatcctggacaactgatcagtgaggggtaatgcagctactctgcatcaacttgtgatgatagaacagatcccccgcatgctctttcaggatgaatctccatcagtggagctcctggttgattttggactgattcaggggcaaataaaggctgaacatactggccactgtttggatttgaccggttttctacaacagcagggatatcatgtccaacaactcgatatggtatgcttccattgggtgagggccatgggtttgggattctatcatatgcaggcatacctggaatccgtggactaacatcacctgtatttttgacaaagttgccatttggaattggcaggtgtggtgattcatagggtgaacctgtatggacaggactatttgttctttccctcaaagattgaagtggtggcagattttgctgcatttggtaaaaggggtttgcaccatatgttgaagagtggctataatgctgacctgtagatttttcaaattctggtgtctggacatatggcccaccgactccaacttgttggttatgatatggatcactgacatggtcactactgccatgaaaatagtgcggactttcatggctagatcgactgagagatgtaactgagctgttgtcaacaatgtatggttccatcgctctagcactaccaggcatatgcaaccttggatcttcatatcgctgatggctttggtttgcatgtgcatgccaagctctatcatgagaatgcgattcgttataaaacatgggaggagggtgaccaccagtctgctctttgacataaacaccattttccagtctaacatcttggtttaatacaaaacgctcaccagggcggttgcaatctggacatgaattagtagggtgaccagaatactcatttgtcatgctcgtttggtcaaaatgttgaataggcctccaacgaggatccacatatcgaggatcaccttgacccttatggaatggtgaacggcagtgatcatacatactgcttccatccaagaaattgccagggcgacccaagttacctgggaagcctgcgttttgctgaattacagcgcctggaggaagccagaccaaattatccacatgctgtggtgaatgaacctcataatgccgatattttggcgaatgccttacaaagtcatcaggaatcctctcatcaaaatcttctgctccaacttgaaaccttggtgaaatgggaaaatctcgaggatcatgcactccatagtgccctggagagatatatgcagggctccaaggagaatccatctccccatacctttggctatgtgaagggcgaggaacattcaaatgccgcagaccagcaatatcaggaattccagactcgttgcctccaataccaaagagctgctccacggatacaggagaggaaggtgttctaacatcgccgaggctattaagtgcatcaacatacctcctctctgtctctctctcatctccattgtaatggacagccgctgctgcggcctcatcgtctaagtgctgtgagaacaagaaaatcctcaaccgagtaaacccctctcctgcagcaatgagcttgtcgtactcctccatcatgttcaccacatcgtcatcgttaacaaccgagaccagggcatctagatcctcatcaggttgctggtacttgatgatatcagcatcctcatagagctcacgcatccgcgctgctaggtcagtgtaggatacatcacgcggcagcataacaatcctggtctcgccgccgacgtaacgcagacgcccatcaagtgggcggggcaggatgcttcctccaaagctgcagaggaacttggccatgcgaggggctccatcagcctcggcgctgcctgcagagacgctggcaggggcagcagcgggcgccatgcgtgcggagactgggaaaaatgctaccaagttggggtgatttgggtgaagtacatcacacgattcaaatcaaacagttggtattcactttttttttttgcgccgattagtctcttcctgaagaacaaaaaaattttaaaaaaaagattatgaacacattcaagaaaaaaaaatctccatcttttatcagaaggatacacaacaaacactcattgaattccaacataaccaacaaatttctctcttttttgtctgattacctcagatcagagtgaaagatcgcacttcgatccacaaaagatgaacaccaaacaatgcaaaggctgaaaaaaaaaactctgcccacaaatacctgatataaatccccaaaacaaaaaatcttgagacaagctgaatgcaagcacagtcaagaaaacatttcgatgattgcaacaccgtggcaaatgaaaggaaccccagctccggctaaattcccctcgagcacaaggggaacaaaagatcgcaaccgattccacccccgatgaatatctggcgccgttcagcccgcagaaaagaaaaggctccccttttttctcccgcagaaatagggcgataaaaaaggataagaacgaacagaagaaacaaacaaacaaacaaaaatcaattccccacaccccccaagaaaaaaaaagagaggaggacaaaatcagcacacagcaaataaatcgagggatagacatagaaggatgctgctgcggcgttactgcgtacctatccggcgatctggcgctcaagcaaagcgagcaaccaatagcttcggggcggcggcggaggtgggaaaccgcctgaaggaggggaggcagggagaggaggagggagggaggaggaaggttgattcgggcgggcgcgcgcggatattctcccccagagatggctaggggggggggatcatgtcactcgcgggagcgcgagcgcgacgcgagggccatcgccgccgccattggaacgcaacagagagagagagagagagagagaggggacgaaccggggcgtggtcgggtcgggtcgggtggggtggcgtcgcgctcgtcggcgtcgagatgggtcgtgcgcgcgcacaggcgaggcgaggcgtgtggcgtgtggcgtggctgcggcgcgggatcggatcacgcctctggtgtgtttgtttcgttttgtttagggttgggttgggtcggtgtacacgcggcggcggcgggggaggggcgtgtttgttgttcgtttgttcgctggctgcttcggccgtgcggccgctcggtttcggtgtagagaggtcatctcatctggttggtttgcggctggggttcatcttccttccctgggcgaccggtagtgtactgtagacttttatttactcgtatagtgtacacgcatggaaagtatggaacgagtcgtcaactgaccgccggatagtccatccttgcagttagcacttgcaaggatgaaaaatgatgtcttccgacgcgtccagttgaagaaatatttctaactataaatatccagatttatagtagtaatttggttgtgttttaagttgaacaaagagaataaaagaacatcgtttttcacatgaaagcttaccaaactgttaaatggtgtattttttttttaaaaaatactttgtataaaaaggttgctttaaaaattcatattattatgttttaaaataattaatacttaattcattacgtactaatagaagtattaatatatattattataagtttataaagttttgaaaaaatatatcatttaggagtcttgaaagtgcgcttataaaagaggaggtattagtttagtagccttgactttgcattgttttaattagtttgaccactcctgttttataaataaattttgaagtattaaaagtatactatatttaccaaagtatgttacatggtaaatgcatataaatttataaatcccatgcatggtaattaaagagatgattaaaaaagatataggtggtcaaactaaactatctatttagtcacaattaccagggaaggcgtgatggatatgttgcagtatgtgccttaattagaaatatgacgtctccatgtcaatgtatatcattgaaaactgtcattttcggtgtagtactgtgtttatcaacggctattatctttcaataaccaataagaaaaggtcttttgtttgtaagagaggaatgaaagagatatagattagaaagatatttccccttttctttttatcctttatttcttttatttctatggatcaaatattcttttttatggaagaaaaaaaatagatttaactcatattcacgaagccctagatttttgggccgagctggatttgaaccagcgtagacaaattgtcaacgaatttacagtcaaggtgatattcgaacgcggaatgactttgtttggtcgttttcataatcccttctggtaggacatttgccctatctgttttctcatagacaaaatctgattagtgtttttttaaataataaataaaggtgaatagtcaatctaatcacccttattactgattattagggcatgtacaaaagtagagtcagatatgagctctacgttatctagagactagtcatcttacaacagttagagataatatggtctctaaccattaatgtatcaaaatactttttattactctcttttcctttcttttaccaccatgcaacaaaattggctctaataaatgctaaaagtcgactctgacccatggccatgcataacaaccatacccttttcttttttttccatgtcatcaaattaactggcttggcattagagagataccactaataaagaccattgtacatgcccttatgtttatccttgtggcatctaagtgggcccaatgacaactttgaactaaaataaaattttgaagttataaaataggcagattaaaacattaaaagtcaaactagtcttaaataaaacttggagaaccacgttaactatttacccaaatagtaaaatctgattactatttaggcacaacaatcccatttttataaactggatttgccctgcaactcttttcatataccaagtctcgataacagtgtgacatgctaaaaaagtctccagtctctactctctacccatcctttaatcgatccattgcatgtcctatatacgcagttaaaattggcacttttatttgtggcatcacttctctccaaaagcataatctcatgcaaaaaaaaagagagagagagggcatatattattttttgttttttgccgggccaccggcggtgaataaacgacccgaggaattttattaataaaattgacaggtcctctaaacgaacatgactttacatcgtccaagtcaaagcacacagcatgccgggtatatattatctgttgcaattatactttcagccaagttgtaattaagcttgctaacaactaagtggcaataagactgtatatcctttttcaatattcacatctgggaaacgcataaagagagaaccatggaacccatggcaccaaaaagcaaccacaaatcgcatcaggctatgactcagaaatacttatgcttgatatataccgtgaaaagaattggtgagatcacacccaaatttttttccaataatgaaaggagtgagactaccaatatcgttggtattatgctctaaaggaagaatcaaaccatgcgtatctctcagcacaaagagtgataaagagtgttatggaacttaaagatgggcacggagaatatgttcttcaggtttgtctggagcaggtacagaattataaggagttgcttccactaaagaaaatgccctaaaaataatgcttgaataaaaaaaaaaggtgctccatgctctttccattctgtcgtacattccgtcatttctagccgccagctagtatatcctatttctatagaacattgctattgaaaaggacaaagtatgagattaacatgtttcagtggaggctgcatgtatatgcatttatgcatgagtgagctgttttgtttagttaggatatactcctacatcgttccttttctgttcatagtaacatgtttctccaaataggttcatacaagtccctattggccggaacaaggaattcctattctcaatcagttattaccactacacaaaagggagaacaatggctatgtttatgcatttcctttactgacaaacccatttactacaaatatatttccccttttgctttcaaatgtgtttgcattatcatttttaggtggtccctcttaccatgttatcttcttttctcaaagaatgattttatgacttttaagatgtgccaatattaataacattttctaatatgaattttgatacatcttaatctatatttacaatacataatttctgaatttggtatatgtatctctcagaaagggtaaacttctctctcaaaaacaaagaacactacttctcgatcatttttttggagtttatctcacttcttactatgggaattagaccattcctagaaaatttacatgtacttcaatcatttgagttagggatatttttcgctatgtacggtccagcaacttttggcacgtagaccaaggttagccgcacgagtgacgcggcgatattaatttcagagagcccaaggccatcatcatatacacagagaagacgtagtcgcctcgcctcgccgcttgttcatacacagagaagacgtcgtcgcgctcgtcgcttgttgccttgttggcttggctatttggcacggcacgacaaaaacgaaagagcactggtgccgattcccaacaatgtaacggccgtttcgctggcaaaacgaaaaaaaggcagcagaccagagctatctgctgcctctttcgggcgccaacccaacctgtggctgcagttgccgttgcgctgtgtgccgcgtctgcgtttccgcggcagcgtgtgcaagtctcccggagccaaccaaattggtcgtcagctcgtgccttcacgtatccgccatgctatgcacgcgaaccatcctgtaatactgcagcagatggcatatgcgaaactgcaacccagataccacaagctttttggccatttcccctccttaccaatcctacgtgaaactaccatgaaatcaagcaagctggacagcttcttgctttctatttttctgtcaaccaagacaggtgtcacggcgatctcctccgtataggcgagtttccaggcatatgtctccggcgccgaaccaatcggcgccggccatctccgccctctcgagtttagtcacttcaaacatctcgttgtcgaatagaggcaggtcgcatcgcgtgattgggccgcctctttggtctcccctttccgtgtgtgaatgtctctgcatttctggcttctcccacagtgctctccgctctgctcgacgtcggcgtcgcgatcatcgtttccggtcctcaggtttggggctgcgttgcgcgccactcgaccggaatggcagccggatgcttccaaggttgacgctccatccagctcgccggacagcaacggctcggcggacggccggaggcggcaggatcggacggcggaggaggggttggaccacccgatcgacggctggatgggctccttgtctcgcatcggtagcacagggagtggctcagttccgtcctcgcggcagccaccactttacagattgtcacttcccaggtgatgtaaatgtgcaggcgcagcgctagctgccagctcgctttcacgatcgagctgacagtcctcgatgggcattgccaattattaccatcaggaaaagaacaacaaacagcatcatggctttcgatgctcacgagctgctgacaggaaagtggcaaccaaagatatactccattcgtcaaaaaaaaaaaacaactttagacaaaaaaaattatctaggttcattctcaaaagttatctttttttttttttgacaaaggaagtatctgagagcaggacacggtaattctgacaatggatgaggatggccatcgtgacaaagaaaaccaccaaacgacttggaaagtaataaagggtccgtggccagctctgaagggcgtcgagtacattccaaactcaaacgctttcaggcgttagccatccaacatcaatagttagcaatccatgttgatgactattcagaaccatgcctaattgccttaacagggggacacgcgcccacgacacatcagtgaacagtgcaatgcatatggctattaggctatatgctgttgtgatagtgattagctacgatagacagctacgtgtacgtgatactactttttaacaaacatggtgtaattttgaattttttttaaactctatggtgcatcttgtaaatttatgcttgtaggagcctttaccaaagaaagaaagtgtgcgtcaattcagaaatatactccctccgttccaaaataagtacagttttgcactgttcacgttcaacgtttgaccgttcattttatttgaatttttttatggttagtatttttattgctcttagatgataaaacatgaatagtactttatgtgtgactaaatattttcaaatttttcacaaaattttcaaataagacggacagtcaaacgttggacacggatattcacggctgcacttattttaggacggaggtagtacatgatactgccatgaaatatacgtgttacctctgatgttactgttgtacaaaaatacatctcctaatattgtagaataacattctgtatgataaaactttcccatccagggtacgaactaagtattgacctgtcaaaagggccgaggaaaaaacctcctcgagagaaacaatttccccctgcagattcaggcacttcattaattagccaaggaaaaatggcataacaatatcatgaaatgcaaggtagtaagaagcattcggtactgagatgagtgaaaaaaaagtagattcattgataaagtaaaaaaactatctacaataaccttcccaatgtacatactttacatattagtgtgcaaggcatacttacagaaaggggaagaatgcacactccaatctgcttcaacaaactaatggtacaacaatatggcaagtagctgattctctgcaaaaaaaactgccatggcctccaagatgttgctctaaggggaaaatccccccaaaaaatgctatttacattgtattcctgcgcctctccatctactatgtgttaaattaacacaggttaaactgttatccgtccaattgatttcccagtgccatcagcactcatgacactggtctattttgcaatgtaagatcagaaacagatgaaagctcctcctccaaagtgttaagaagatcaaggtactctctgaacacatcatgtgactgcaagttgtttgtaagcaagtcagggacattcttagaaagttcataaaccgtacaaacaagaatattttatgattgtaaacctgtaaggtgatgttatatgctttccacagtcgcaaatcatgtcgaaagagatccaccaaaacctgagaaacaagaaagcatgtgtgcagcaaggatgagtatgcttcttacaaaacattcaataatcaatccatggtaaaaatccaaaaaacaaaatgaggaaaaaaaaccctgcattgtcagatgcagaagcctgccacaagttagtcaaaagaacagtattttctgaaattgtgtgcacaattgttgaacatgtgaaagataggcagtacctcagcgcgtctcaataaagttgctagcacaacaatccattccttaaacttgacagaacacatgtgagcaagaaggaactcagcatcaagccgactttgaagagtgtccatttgaagctgtcatcagaatatcaattataaatgagaacaaagatccaaggcagataataatatcagcgagattgttctggtatattggttgctcaggtattgagtgatttactcaagtaagcactattctatttgttaaacaaacatccataattactaagcttgcccagattcgtaattttatatcatgaacaatcaattcagtacattatcaagctttgtaaaagtacaaactgcaggagaaaacagcagaaaactcgagaaaaataatccaagaccgcaaaatcttatctagtgtgtgatcttggttaatacctgttgtgttgctttgttttaaattgaagaatttcatctttcaggattacagagcattgaattttttaaaagaatatttttttttgcaggcccaaatgttatttattatgaagaaaaaaagtagaaaagctagacatgattcctatattgataggcaagacaaaaaaaaaatcatgtaattttttctttttttacaggaaaatttgctactaaatggaacacactaaataatgcttcatggtttgttaacgagaccttttgtccaatcagttcaagtgcagatgcaaaattctctagtcgagcagaccctagcctttctcgctgaagatattcctgcataaagttataaatatattaataacatgtggttttggatcaacaagactggtaatgatgatgaacagtgaaaatcttaccacaagatcaaactgagttcctttcacaaaagcaaccagcttagaaagctccttgccagacatcaaatagctagcatggttctccagaatattcatgacagaggcaatatgtgggctgagctctttcattgagttactgcacaaagaaagatttacagatgacatattttctaatagaaactctatagccttttaagttaacttcacaatgtaccttctcaaatcagaagattgtctcttgaatggtgaacgtaattgaaagtagctcagaaaccttggagaaagcttttcagagtctgtactggcattttcaaagtctctgccagatcttagcaagaagcgaacctaggtacatgaaggtatccccttactcatctgtggcattttattataggaaattaaaaagatatagcatgaatatcataccagctccccagcaagctcatagagagattcatcaagtgtagcctggatagtaacaagcactaaaaagtgagaactggaaatgtgaaacaagtaaacgtacagatcaaaaccagctgacagtgagaaggtaagagaatcacttgtagcaaacggagtgcacagtactgactgacagcagggccttccagcttcgcaatgacctgtaatagcaaagccattttcagcaatagttcttgcaggtattgatgaccctctgttgcatataactaggtttatcaaacttaatagatgaagaaattgtctgttcatgcaagcaataaatactggactttatagtatttaacgtctctagaagagtttaccgtaccagaatgtagcaagcagcagtcctataccatcgccgttggaagcattcctcaaacatcctagaacatgagggatcagttttactaaaagaattagcagaattattgtattgtattccaaatcttgatcaaattgagacactgttggtgggtaagttttgttttcactaaatttcattttgattctgatcatttccatgatacaaacactgtttgcaccatggtataaaagaagaatatgtgaggtactttggactttggagatgtttatagacagaatgaagaatcagatcttaaaaaataactgaaaaaaataaatcaaatgccacttctctccactcaaacaacaaggcagcacacttactctgtggatcgtccagctgcatggaaaagatctgcccagtgccgaccatcagttttcctagcaacactgactacaacatccatgtattctggaaagtttcgaagtaggtcacatgtcttgtctagaagagacttctttgcaggttcatttttctgcgaaagctggttttttgaagcactttggctgcaattggcaaaaaaagccaccagaaaataggatacagaataatatttcagcaaataacacaatagaatgaaatctagcaactcggtacacaaataatgcaagaatgctaccattaccaagttagaaccaatataccttgatatctctgcatcaaataccgtaaacaggagccattccaaacatctagagaagtgaggtttctctgcagacaagtttgccaaacgcagagcttcttcatgtttgtctctctggtttcaaaaattttacagaatgagagatgcatagggaaatgattattgccatatgagtttggcaaaccatgcatagttaatggtccataatacataaaatgatgcaagtagccaagtaaaggctccctgtaaacaggggatattcaaagtgaaaaaaaaatgtttttttttcccaaggctatggttcataatacatatggcttattctatgtgaaaactgtttcttttaatagaaatttcagaatataatatttcgatccctttacagaagtgattgatagaagagctaggtaagtgctagattcgcaacaaacaaaatgtcttgcagcacaactcggcaaaggaagatattacaatatagaaactatatgagaaactacatgacagtgcagtggtttgtaaattgttacaaaagaggatctcatataaacggactaaaccagaggaaagaacaagtatggccaacaacccataaaacctatactcttcttgtttcagcaatgagttctacggaatactaaaaagtgcagagaaaaggtggaagaaccaaaggaaaatgatgaacaaatgcgcacaacctagtgaattggttcattcagccagcagagcaacagaatagagacacctttatacaaattaaaactagtggcctgaaacaaggtttagatgctcaaataacaataaatggtggcagaccactttgggtgctcacgtcagtcttgataagaaatcaggtcattttctatttaaccatgacaataaacaggtttttcgcttggtttgcaccatcacataatccttagtgagaactcaatttcacgtgtaatattactaggagtcaaattttcttgactaaatgaagatttcatgatttaccactcttcttgcattaatgtcatatagttcctatatatagcatttctatataaaaagaattatgttttgatttacctgaaggagatgccgcagcaaacaatgcaatattgtttgggcttgaggagaaggttcaaagcatggaaactctgcagtcgagaaggacattctctgagaaataccaacaactacaccaacatttggaagaagaccaagcggatacacctcacggtcaaattcaagctccggatccagctgcagaaacaaatagcatgttctccattaactttgaatactaccaccaataagagttcaatgcaagaaagaaaacaacatatgaaactattatgattttgatcaagtttttccccaaaaaaaattgataaattcacagagtggatcgcaaaactcaaaagagatgtcaatactatcacaagatacaaaatctgtacctgcaagaaatcttcttgtttaaaaggattttctccatgggatgggtaccacacctgccaaaaaaaaagagaagggttggataaaaggatagcaagatgtggaaagatgttcgatctattaagagagacaagcataattccttaaaaataataaagaagaaaaccattaaaactaacctgcatccccttatggccatagtcaagccatgaaacctctttgataagattacccttctcttcgtattgggaacaagtgacccaaaataattcaactgaattagtaagtgattgttcatgtccatcatccatgtccaacacagaaagttccccattcatccgcaagattaggcatctgaaatatatataacaaaacaaataaaaattaaggagaatagaaatcatttacaattttaacatttgaaaaaagtaccttgaaggttgttgggacaagtcagaagatccattagtatcatgtttcggctttccttcatcagttggttcaggaatgaagcgcatcgaaacaggtggactctttggactcatgattgaaagttctcggactgttgaaagctgctgacccaaagaaaacaacaaggtcaaatgaaatggacaacacattcggtgcagtggttgaaaatattttgcttcacctgtaaaacaggactactagcaggtgacaattctcctgatatcaccacatggaaaatatgcacatcaaatggactgtaggtaacaagtatgtagtcctggaagacatccatgacaattggtcgaccaagaagtgatttccggtaaagtaatgagctataatcaaggtgatatcttgggaaaaagagaagctcatacctaagacaagtgcaacaaacatgtcatataactaaatagatagcaagtcatgcccgcatattggtatttaaataggaataaaaagctaggagatacagaagatggctctctgatatattagcacactatgcatttcagctagtattctgtgagttcaagcaccatgagatttgtgcatgaaactctcagctcaaatgtaatgacaagtaaaaattgtcatgtgtctgttaagaaaatctcaggctgaagacaataaacagacagaaacagagaaagtgaggaagcaagactaacgtatttgatgattcaatgtagttgcatacaataactattttgccaagccacaacaagcctttgcattgaatcttttgctcttgagtaacatccccaaaaacacgccaccttttattgcgcaaatcatacagcactagcccatgagagcctgcaactgccaagtacataccatcattgcttgcaacaacatgaagaactggccaattctgtgaaatataggatgcctgcttccagaaaaaaaaactatattataacaagtcttgaaataagatgcattgaggcatttttgcctcctaaataagtttgatgaaatcaaacacttaactggaacattaagatgcaacatcttaagttcatcagtatcatccggttgtaccaataggattcgatcttcaccataaagaatctggcgagtatatgttgtgcccaaaagtcctctgtttaggcaacatttggcaaatgagaatgcaagaatcctttctgacaagttttcttcaactgcaaatagtttatatccataatcatcccactgaatgtgtgacgtccctcccattagaggctcaaattttaaagcactaggtttaaccattggagatgaggcagaatttgatccggtttgacgaattgtgcacatcaaacgacatccagatacagaccacacagtaagtcccctaaatttccatccaactgcaaaagcacaattgtcaggcgtccaagatatacaagtaacaggaccagtatcttccactgaatacctacaatttttcccaaaggaaaaagggacagttatatatcagctttaacggaataactgaaatgcattgcacagtaaatacacaaaatcacacatagtaatgaatcagagaccaaatattaactaattggtacgtctgcataagtggagcaatcaaacctaagtacataactggagaaaacaatatacagattaagtatttaatctaaaccaccaggcaatccaaatttgcattgaagatatgtaattaaatggaaagtaacctaatgttctgttactgtgcaagcaggatatccttctaaataagcacaaatttgcaactatccaccagaaaattaggcagtaacagctatccacagaactaacaaatagttgtgtgagacttacccccaatcatacaaagaaattgtgcggatatgccttgcattttcagctaggtcatataaatcaacaacacctctactgcacccaacagcaagaatctgctgatcagaagccacagaagtgcacatcgcgtcatcagtgttcaaccatctctctactctgatgctgctggtttgctttaatcccttcttaccaactgcacaaagtccaatctgacagcccgagtacaaagcaactagcaatcttagcttcactgacaactcaacatgaataatggtggaattccctgtgcagcagggtgcaggacttgcatcagaattttctcgcaaactaggcgggtcaaacaccaaagcatctccgacagtgggagttctgttggatgaacatgcggagcagccaagcttgaagctgtccgagaactgcaaacaaacaatacatggaacatactaagcatagcaagcacagatcaagcaaggagataactatttccccatctcatcaaacaataacatagagaaacagtagcagaatacatttccatgtacctcagcattccaggagatgacctgcaagtgcccattggacagtccaagcagcatactcttgctgtcgcacacgaaattgctcctgcagcatatgatatcacacttgcaaaagttagctcccccgcatgaattcggtatctcgtttttcggataataaagaagcgaagcgaataccatacgttatgaaagcgtcattggcgagaggaaccttctcgacgattatttgcgatatggaggcgaggcagagccccggttgtggcttgcctccgatgatcagcggcttccccgagaactgcagcttgtatatgtacaggtagaaggacgaggtctgcacgtacaaaccactcgatgagtctctgcgcgtagagagcgagcaggagcaaagcggggggagagcagtgtgggggtggctgaccaggacggcgacggtcttggcgtcggggctccagacggagtgggcgttgtccccgtgggcggcgagggattccggggagcggtcaaggcgggcgaggcggaccttgtggtgggcggcggaccaaaggtggagggaggccgggcagacggcgaggaggtagcggccgaggacgcggaggaggaccacgcggtcggagtcccccgggtcgagcgggatcgactgcggccagccatacgccatgtacatctcggcggcggcggcggcggcggcggggtcctcgtcgccgggcgcgcgcctcgccggtgaggttgttgggcgagatgcgcgaggggggaagagatctgggaacgagcaggtgggtgcgcgatgcgggagatgcagcagtttttcttttttactttttccttttcttttctttttcgcttttctttttttaaaaaaaaactgatcagatcagagcgtcacatattgccgtcagattgcttcccgtcgccgagtgaaatgaacaagtttagcgtcccaactgatgaaacgatccagttaagagtttttttttcctttttttctttttccaaccggaactaagctgcttgatctttcagtgaacgtcacgtattgccgtattggtacagtgtaataataataaatgtataatgactggagtacgatagctctatcaattttcagtgccacattttcgaagagtttggtgctgcctttcagctggcagcatttgcgggtattagcaatttagcataggcgatttggtacttttggcagaaagatggatgataaattgacgtaagattacaccaatcttctataccaagatgtaatgacagtaatcacgatgcataaaccacacaacgttagggctttacatagtgctagtatattctgtattggatctagtgccatggagttctataaaaaaagatctcaaaaaaaaatatagtgccatggtgaggcccactagtgatgcttgcagcgacttgtacagcaattgtttttttctgggatgactatatgatctggacttctggagtatgaagaaatgacaccgctcgtatgaaaggacaacgggcataaatgtgacgtagtattactcccagaaaacaattaaaccccacaactaagtactccccagttaaattagctcacctcgcaagtttctttttaaccccatctgagtagtacagaacagaacaaagccagagaggaactcgaactcattgacccacatgatagagtctcctggtgtactgttacatgacaacctggcctagtgccttttagaggttaccaacacgtcttcgcacgatgagcagtgcaacaccgtgcattctaacagagtaacaggcaacacgatcaggccaaggtaaatcacgaaattttaaggcgtcttcaagctacttctcgttcaaagctgccttatttccatttacctgaatcctggccagttttagagcctggcatgctggtcacagtttcaccacaacttcagcggattgacgacgacccgcgacaacttcagaactagaccaaagaattgcatttgcacaggtcgtcaaaacgggacatggcttagtttcaggctgccaacataattgccttgactcctgccaaatgtaacggcgttactcatactgtatggtatggtaaggatttcagcttctttttttttttacggcacggcacaagatgacatgcttccgtcctttttcagcaaaagagatggcacttactgcgcatgagctgcaagctgttgtgaatcagataaaaatgatcattccatatcagaagattcatcctcatcctcatcctcatcttcatcaaggatataaaccaaagcatgccgccgagatgaaaagacacaagccactcctcttgaggctgaaaacaacatccaggaaatgtgaactctggcatcacgtatcatgttaagtgagtagcaacttaaaactcttgtatggaagtaaacactcaaactcaccactgactgccagtggagtggacacggcgtgaggtatgctacgaacttttttcccatagtcggtgtccaactggagctcctgtgcctacattcattgcgttacggaaatgaagatattactttctgacagtaaaagtaaggtcgatttcaacaattatgtgtcatttaatcactacaattgatgagataatatatggccttggtcacgtagtaataagttgtgtttgtgataacacaatgatgaataggagacatgcagtaggttattgccaataccaggttaccgtttaattattagtgtaagaatgctatgaaataaagtggatgccaaaagaataaaagaggaacatttgcaaagatcttaccgacagctcttgtacactgtaaatatttgaagggaacatccttgagagaggcacaaaagagaagttctccatctgcagcattacaatataagaacttccaggaccatcagaatatgacctttcactgagtagtacaacaatctggctgtcctgttttaatataaccatttcttttgtgagctatgagaaataatgtataaaaggtgaattatcgccaagatgcagcagggagtactaccttgtaaagagatacatcaacgcactcatattcatcaggtatatgcaatagaaatcctgaagaagatggtccgctggcagaagagttagagaagtcctttatcacaccaatgcaattcttcaagttcaaggatccatcgggtatcttgaagcatatatagtcagtcaagctatatgaagacccactattctgagaatcttcatcctgctattttgaataatcatttaatattatgataagaatttaacacaaacaatatagataaggtgaagacaagtacaaaacagaaaaataaatatcacttttttattacattatatttgaagtcaactaagagctatgtcatttgctaaagatgagatgggcacccgaaccactcctaggaccatgggtgaagagattaaacatccttccccgagccagcctattgcctattgaagtgttctcatatgttcattttataatgatgctgtagtggaataagcagaagtcaccaaaaaaacatgaaccttatagaatgacactgatgtcagaatacaggttgatgacaagtcaaccgatgacgtgataggataaagaggaagcaattcttggcaatgtatttgtgaagaaatagtggtgaatggcatcgagaaagcctcctccaggctgaaacatatgatagacaaaaattgattacatttaagcaatgagcaatggatttaaaatggctatgtctatataaacagagaacacaaggatttgactgtcaaaactctgattcaactgtttccagataacaaattatgtagaaggagtaaaaaataactctaagataatcaaaaaataaagtagtaaactggaacctttcatccagctcattaaattgcttcattaaagtcttttccaaaaaatgggtatctgtaaatccccccaaaactactagctgctcaagatgtcttacagtgtccctgaaaaggcaggtttaacacgattaagaaatgcagaaaaacacaataacacaaagagagaaactaaaatagtgatgaaaaaacacaacataagaacaggcaacagccctttgtaatttaatagcttttgactattttcactgctttggattcagggcacaagaagagtgtacacatcaagatattcaacgactggatttcatgtgaagcaatagtattgttttctttttgaaagcaatacagtacccaacaccaagagataaagtatatatacacaaaaaagactaaaaattatacatttgaaagttatgttcgtgttcggaggtactctcacacataaccatgcacttgtgtaacgtttaaatatactaaacaagttttgacatattatgcacattgcaaggtaacttgtcaacaaggattggtgaattactagcttgcaaacaggtaacatagatatgtgcagaacacaataccaaattgtacataggaaacaataaccaacaatcggcatgtttcattgttacttacaaatcacactcaaatctttgatttgcatcaagtaactgtttgattggatccttatcaagaaggaacttcagaaaaagcaccacgagttcactacaaaaaaaaagtgacacccaggtgattaatgacaaagtgtttgactcacaacttgagcatgaagggaataatagaaggggaaaagacaaaacctgttcgcagctggaacttgatcggttggttcacttaataaaatcttaacacactttaaaacccaactgaagaaattttggaactgaaaagtatatccataaatggaagttactacagaataacccttaaagtcgtagcacaatctataatcataacatcatgtaggaaagaatagagcatggaagcaaatatatcaaacaattatccccctagtaaacatgctcaacatggattaccttggtttgcttgaacttaatcttcagtctaatgatgttgtgcatgtagtttcagaatatgacatcttacctcagcagatactacatgcaccaagatgtcatattctgatactacatcaaaccaacagaatctagagtctagagtacagataataacattgaattcagaaaatgtaattggttgttttaacaatcagtgccaaattagcagacaaatgtgtgtccagtctatattgtctactaatacttcgagcacacaaaaggttctgtgcacttgaccagggaggggaatctcgggcagaaggcctaagttaaaacagaggttgagaattgagaacatggcaagaaaacaagcagagaagaatggtaccagataaagaacagtagccgcaacccttgaaaaacgctcaacttgaacaactagcattcctatcttctcagtcacaccataaataagcttttcatctaacccaacgttctgaaatcgtgagcgccatcttgcaaggcctcttagttccgcaagtctgaatgaaataatttcaactgcaggctgtaataagcaagtcattcagcgttcataacagactagctgatattccttgcttggatctcaaataaatgataccataaattgtagaaataaaactactcactcaaaatatgatagtaccatgtgtagcagaaaaagaaaaatatgaaattgcctagtttacaaagtacaaactctagaatacccattacccaaagcaacacaaaaaaaaaaggtagagactgtgacatcagctggaagtggctaacctgaagatgctcactgacaacaacacgaagttctcgtccagcactatcaacagccttagctattctcttgagagcctatccacataggaaacgacaagtttagacaggttctctcaaaaaaaaaaagagaagaggatagggaagaagtttttatggaagcgagaaataccgcttcaccaagtgagctgactaaaaattggtgaagtgctggacttgtacgtgtaccaaacaaaaggctcataaactcatcctcagagctagattccatccctgtattcaccaacagagacagaataaagggggcagacttcttgaggtgatggttatgacttgaaaatcgatcataccatgggcagctatcagagaaggcaaggcgctgaatttttcattaaataagttcatggcacttgaccattgtttggccatcatggatagggaagaacggacaacttcaaccagatcttgaatacttgatgcttgttgggagatctgatgtagctcatttttccttcacagcattgatgatacacaaacagattaaaaaaatttagtaggtaaagcactaaagtgatattaatatccttgcaaacctagtaaataaacacaggtgctatgtttttgaggaatcaaacaagaaagatgtttgcacctagctataaaacagaatgatggttctatgactaggtgagcttatcaaaattagtcatttcaggtgtcaatgagtgtgttgctctagcacttcatgtggaaatctccatcatgttttgaagttaccataaaacaccatgcaacaagataatggtttcttaacaacaacagaaagtagtcacaggcaatcaaactatcatgacattacctgttgaaaaagatagaagtgtccaaatgcagacaatgtaacccagtagaaatgtgattactatgagaaaggttgtcaatatcaatcagctttccagggcacaggagaactaactgatggaggtttcctgataaacagacctgatgtgaacgccattgtcagaatttcatacttaatatgtgcttatgatttatgaaacaaaaaattcattaccttgcttatggaagcatcctgaagccggtaactagttttgtttccagaggattggaaatggataggaacctcattaatgttctgaaatgccatagacataaaattagttatccatgagacactgaactagataaatgaactaaggcgtcatggcttacaaacaaaaagaattaggtaataggcatcagttgatcaatgtccacagactcgatccttaaaactacatggaacaaagagaaatgaaagaaaagttgaaacacactccacctgcttgtgtgcgcattaaaaaaagaaaaataaaaacaagcatgctttatcataatcccagtaggaaaaaaaatagaacactcccagcacttttgcccagtgagtttaagtttgaaaac

SEQ ID NO: 8469 - DNA, 23124 bp, Oryza sativa
  unsure (1)..(23124): unsure at all n locations
ggtgttactaacctggaataaaaatcaaaacacactatataatccatagtaccgatcctcttttcccgtccacacaacaaactcctccctctatctctttttttcctctctaacttcttatctctttccttatctctaactcccctcctctccttccttttttccttcaccacagtacaggcggtcggcgtggaggcggcgacgcgggggacggcgcggaggcggcctgcgcggcggtcggcgcggcagcgcggggggccgcgcggcggcggcggtgggcggctggcgcggcggcgcgggaggccgcgcggcggtgccgggggccgcgcggaggcggcggctgcggtgggcggccgctcggcggcgaccgacgcggcgctggccggccggcgcggatgggaggaggggaggcggcagtggccgccggccggattttttttcttttttttttttgaaatgtgaatctgtgatgtatttttgtgtgagatgtgaatctgtgatgaattttttagaaccctgtgatgtaatttttttaagagtttgtgatgtatttggagatgatttgtttgaggatttggagatgttctgtaatatgtgatgatttggatatgggaggggatggtgtgaaatcaatattcaatattaaaagcagaaaaaaaaagaaaaaatatctttagtcccggttggtgttatcaaccgggactaaagattctcccatctttagtcccggttggtaacatcaaccgggactaaagattgatttttagtcccggttatttgaaccgggactaaagatagcgatctttagtcccagattcgtagtcccggttggaaaaccgggactatagggggttatgaaccgggactaaaaagcatttctccaccagtggtaacgctacactaatacattaacaaaagcgtctcctaacacatgtttaaagaaacgaacaccagtagtatatctttgatgctcgcttatatgcgtatatatatgaacaccagaatttaaactctgatgaagttaggagactccaccgtttataccgctagtgctttttgtcttggttgactgatttttaccacgacgtttgaagcgatttgctcgtatggatggcggaatttcataatgaatcagttcatacttctgtgaagtttattttttttaaatcatgtgtttggtacagtgctatgcaaggtcaattggctgtgactctcagtctctctagatgcggaccatgcatgtttggtgtacgcgaatttgaaatatgtaaaaaaaatttgaggttttgattgagccatggatgagacgaacatgcacagacagtaccgtcacgtttcgagctgcgcgtgcccatctgtcgtggtcggtgtactgtggtacgtttcacggcaatcatggggcgaacgagttcaaaacatacagcgacataccaacgtctaatctacgagtgtttgctcgttacttctctgtctctccctttcagacttttgtatcgtttctcccaaagcacaaaagcaaaagatgaacagaaacactggaggtagaagatcgatgatgatgacggggatcaatggactgttgcacaggtcgatcgatcacctacgaaatgacgtgtccattttctaaaagaaaaaaaaaagagaaaatgacgtgtagatttttgtcattttggagtctctcgtatgctcgtttttgtacttcccttgctcagacgacgcatcaactttgcaaatgtgcaggacttcagccagaaccgatcgaaagcgttaattagtacttcctccgtttcataatgtaagttattctagcattttccacatttatattgatgttaataaatctagacaatatagaaaatgatagaatgacttacattgtgaaacggagggtttagtcaactagtcagttatcaccaacgtggagaggacgtagcggataaacatagccgctttagccagctaacatgaccacatcacgcattattttcttttggactaatcaattactcgctctgtctttagagattctgaaggaatgtgacatatagtagtactataaacaagatacttttctagattcgtattattagaatagatcacatcctccaagatcccttatattatgaaacgggaagagtgttagtgatcagtcaaatagtatagtacgtacaagatttaatattataagtcgtttgattttttcttaatcataattttttaatttaactaattttatataaaaaaataacatctatgagcaaaattagtttcgttaaatttaacattgaatatattttgatgcaatgtttgttttgaattgaaaatgttactatatttaactataaacttgaccgacttaaaaaaaaatatgtaccgattataatatgaaacggagtaaaccaattaagtcacgttttgaagtagcatgcacagatgtaggagttacgacataatatacgattaatctacgcaacatgcgaggcgtgttggatttgcaaggagtacaaagacgggcgagagccgtgatctgctggacgtccactacaaataggcactccagctagatttgggtcggagagtcggactcggaccagtccagatcacacgcaatctgagcactcagttatggcaaaacactttgcttatctcttccttagctagtatacgtacgtagtgcacatgaacaattgaaagagaaacgtactaaagaaaaagtcgacgctgtaataactacttactccgtctcaaatatatttacactatttatatccaacacttaaccattcattgtatttgagaaagttttatgattagtatttttattgttattagataataaaacatgaaaagtgttttatgtgtgactatttttaaaaataatttataaatttttaaataagacagatgatcaaacgttgaagatcaaatgttagacactaatatccacagttaagtttattttagacagaggtattaagaaaaagtcgacgcattgatatccacagttacctttattttggacggaggtggtaagaaaagtcggcgcagagagcgtgtacattttggagttaggtaccgatcgatcgggatcgtgacaacaacctatctgcagcgtacaaaatgagcgaaaacgacggccgaaagccactctcgtacgtgtgtttcttgcccacacgactacggcagcgagcgggactgcgttacagcgcgcgtggggcacgagtaggaggagccgaggagggagaagcacgtatatatttcgtttcaaaaaaagaagaagaagaagaagaagaagagaagcacgtatgtatagccagttggccacgtacagctagcgctatataaatttgcctgtgttgcgtagtatggtcttttgccaacaaaattcagttggcagagctcggtcatcgtgtagctagcttacctttgtcttaaaataaatttaatttccatccatatttatctacttttaatacaactagcatggtggcccgcgaagattgcgcggctagcaccgttatatttttctcatataatagcttaaatatattcacattttattaaatacattaaaatggcaacataatttaaattcttgatcaaactaacaactgtgtgatattcatattgtattgtatatacgtaatagttattaattattttaattttaaattttagttatttatagattgtatttctatatggactctagactcatctttcaatatttttaattttttaattccgaattttattattgataaattttattcctatatgaactctggacacttcttcacatattcaattttcttaattccgaattttagttatttgtaaattgtgtttctatatgtactctaaactcttctctcaacattccttattttataattctgaatttccgttattgttaaattggattcctatacggactctatatttgtttccaatatttcttattttttaaatttcagttatttataaattttattctatatggactctagactattttttcaatattccttatttgttaattccgaatttcagatatttataaattgcatttctatatggacgctagactcttcttctaatcttgcttattttttaaattttgtattttgttgttctatattgtatttctatatggaatcttaactctacttttaatttttcttattttttaattctgactttcagttagttctatattcctatatgtactatgtactatagactcttatttcaatatttctatttttctaattcccaatacattatttctaattgtatttatgtatggactctaacttcatttttcaatactttgtattttttaattttgaattttagttatttataaattgtattcctatatagactctagattttttttgtctaatatttcttattttttaattctgaattttagttatttataaattttattcctatatggactctatactcttctcccaatcttgcttttcttaatttgaattttagttattgtaaattatattttgatgtggactctgacttctatttttaattttcctaatttttaattccgaattttaattagttctaaactatatacttgtatggactctaatatcctctttcaatattccttactttaattctgaatttttgctatttttaaattgtatttctatatgaactctatttttattttttttcaattaatatgagaatttctaggccatgagagtagacttggtggcccgtacagattgcatggttagcattgctataatcttttcacgtaataacatatattctttcatattttgttgtagaaaaatattgaaattgtaaccatgctgaaccaaatcgaccaatctacgatattctaattaatatagtaattcctatgtctatagagcaaacgtgatataatggatcatctggtatatttgtttgtttcctccctccatctttatactcttttagactattagtgacatcttgtaattatctgtaatgtatttattagcatgcactattgtacaattagaaagggacaaataaattgcctcccacggccatgcatgatagcatgagtacggttactattagtatctcttacagtttccaaaattggtgtttcatcctgtttctaaataaaaccttgtccgtttgcatgtactcctaattttctttggttttttctttgtttttcttgtccgcttccacatattgtagtcctaatatgattctcttttctcttttttcttattttatttcgattaatgtgggattttctagaccatgagagcgaaaatactcctatcttaattttctagactaaattagtttcattaaatcaataattaaatatattttcataataaatttatcttgggttgaaaatattttttttctacaaacttggttaaatttaaaataatttgactttgaccaaaatcaaaacatcttctaacctgaaatggagggagtagcatatactcctatatttagggctcatattaatttgacaacttgcatagagttgcagtgatgcgttcaatttgtttgtcgcgcctttaaaagagggcatagccttttttactacggttgattccaggaagtacacactcaacacatataatattttctttttcattttctatctcgtgctacttcaatgtattgtagatactatactacacagacaaaatgtcgactacgtacgattgtaaaagatagctaatgagatgaaaggtttctccactaatatattatatttcttgcttttctacaaccaatataagactatttgtgtgcgctagtttttttttaaaaaaagaaaaaaaagctatatacacgtacgacgtaagaaaatttcaaagtcttactggctagcaccataaattggcacacaataacatagccagttatattagctacttctttcgtatcaaaaataaataaatctaacataaaatattatatattttaatatgatatcgtggttggctgccttaaacgcagcaaaattacgaaaattgcatgcatcgtcgtcaatggacactacatattttcttactacaaacgtacgtacggcagcgagcggccgacgaccacgacgattgaccatagatagacgatagacaaaatctaacgcgggatagatgggccatggttagctgggtggaatctcggagactagagcaacggttcaccgttcgcacgccacggcgccacgctgtgccgacatcaccggctgcacgcacgtcgcgggcttgtcgtggccgccgcggagaaaagaagctgccgcggcgccgcgcacgcgcgctgtaactttacgtaacgtggctagctactacactactactatgaccgtttgcattgcattcgatcggttgatcccatgcttttgtatggacctgtggctctattatactacctctgttttcttaatataaggaattttagcatattacttgcactgttcggtcactcatcttattcaaaaaatttacgcaaatataaaaatataaaagttgtgcttaaaatactttgaataataaagtaagtcataaataaaataaataataattctaaaatttttttaaaaaaaacaaatagttaaacagtgtaagtaaaatatcaaaatctcttatattagagcacggaggggtatgatgagtacaagactttaagtagcagttggttggttgatggttagtttctacaaataaaaggaaatgtgcttctgagattttgatttctaatttacatttttatgtagagaggaagatttttttttcaagaaaaatctgcagttgctttaaacttttctacactgtctcctttgattaaagagacatgggcgcgaccgcgcgagctggcggccgacgagcgctgcgtggtgagcaagtgctggcccgtttggctttgccacaaattttgacaatttgactctttgcaaaaactatttttataaatgaactgatcaaaacttattttaaaaataacccttttgttcagcgttacatcgtgtggcactgaatttaaacacctcagcgccaaatagtgtgacgctgaatgtgcgttggcacgctgacttagcctcccatctgcggtggcacgacattcagcgctagatgacgtggcgctgaggtgtctaaggtcagcgcatgatttggcgctggaaaaaaaagatcatttttgaaataagttttagcgacggttcatttgtaaaattagttttttcaaagtgtcaaattatcaaaatttgtgtggctttgccttcctgtggctgctatgcaaagccaaattacactgccacgaaattaactccaataggttgtacggattatatctactaaaggccttgtttagttctaaactttttctttaaacttttaactttttcatcacatcaaaacttttctacacacataaattttcaatttttctatcacatcgttttaatttcaaccaaactttcaaccaaacgttcattatatctgttgacaggtgatacccggatatagagggtattggggtacgttgatgtaagggtctatgtagtacgacatcaagcaaacagaagacgaagattatactggttcagaccccttgacaggtaatagccctaatccagttggtatggaattatatgatgggaatcacaggttacaaagggaacgatggaactcgatgaaaccggcgagatcataatcgagttgattcgactagacctcccagcgatttggctcatgtagggtccgacttcgtaggctgtggtggtggcgttggctgtgagattcgatcccgcaggtcctcccagcgggtcccttttatatcgcaggccaggcggtctccaagcaggactcggagacgtcgaaccgcacacgatacgttgacaacccaatcttgtctgagtaggtctctttccatttgccaattccgtgaaggatttccttaacacgtatagagaatgtccctacatgcgcgggcatgccatattgatatgtgacgtatatcgaagggtaaagggtatacctaacccgtaaccctgacagtagcccccgacttctgcttaaatgaactcgtgtgaccaatcgcgacttctcatgtcgaagctgatgtcgttctcggtgtagaaaccatagagacaggacatagtcgagaacaccatgtgaaacccaacggtcatgagtgaatttaaactgaagtctaaaagaccgccgcgcgtaacagacccagaaatttccggcgggcatctctctcctttccttgaaattcgcgccgtgcgaagtgcgtctacttaagggaattttggggattcattctgaagtctgcctgtttgtgagaaaactttccagcctccaagcgtccctcgtcttccccgctcccataaaaaccctcgcttgttaatctccgtccttcctccgacgatctctagttggcgatggatctcggcaagtctacttccaccaacgcgtcgctgaagaaactctaggaagaggacgcccttcccagtcgtggagtcatggagagagaagtaggagttactgaaccccagcctgtcctaggtcgcatggttgcgatcgaggactacattctttgtggttttctccctccaccttctgaatttcttctattggttctgcacttctacagcctttctttgctccacttgaactccaattccattgccttcctcagtatatttgcgcacctttgtgaggcttacattggggtagagccttttctcgatctcttccgcttttactatgagttgcgttggatggaatccaccagggtgtccggatgcgtcggattccgacttcgggatggcttgaaatcgtgctacatcccgttccagtgcccttcttctcgtagcaaatggcgggcgaggtggttctatcttcagatagagaattcggatcctgtctttgtcatccccgaggaacaaccagacaagatttcgtcttggaccgcaaagcccgccttgaccccttccctccagtccttcatcgatggcatcgacgacctccgagtacgaggtttgtcggggtatgaagtcgctaccaacttcgtcggtaggcggatacagccgctccaggcccgagcctacccagcctttgactattctgggccggaggacgcgacccgggtttctcctcggggtattttcctttttagttaaattgactccctcatgcgcatgttctccctaacttatcgaattctgttctcgatcagcaggcttggatagcgccaccgtggagcgccgcgttggccaattgatgatcagcggcccgacaacggcaaacgacgtccccgttcctctttttgagaaggaggcgaccgagcgcgaagccgcaatcaacgtgagtgtagtcggcaaccccttcatttttgctcctggatcggataatgactttatgcgatgcaggctctccctctgactgacgccattggactgctcgtggaccaccaggcggcggcctcgttgaaggagggcgtcgctcaggaggcgtccgatgtggccgttgctgctacgactagtggcagccgtgtcccaaggatagggagaaagttcacctccgtgctcggcagttgccggatagcgtcctccccatcagtgagtttcttgattcgttaactgcatagtcgaaagatgtcaccctcaattcgtacttggtttacttaggccgtggctgcgtctccgccaccttcgcgatggcggaagctggtgacgctgggcgagaagtaagtagacgaaaatcgagatttttaccttgtttgatttctggcgacttgtttcgagggccagacatgatgatcttctgcaggtcgacacaggcgaaggcggcgcaagacaggtccggagggaactccagcgcatctcctgcggtggcctcgaccgatgtcgtggtcgtgccgaggagccgtgaggcgacgccgagcaggccagccagtgacctcgggcctactcgcggcccgtctgccgacgtcctcacctggggggagtttcaagccgagatggggcgcatcctcgaggctggtgttcgcggcataagtcgcgagattgcggaggcgagggtagcaggagcgtcgtcagcgaacgagcgtgccgacaagctggagcacgacctggcggaggttcgcgaggacctccagaaaatgagggagctggtggccagcaacgagcgacaacggcggggactcgagggccagatgtcagaactcaagaacaacttgtcggagatccgtggctcgttgcgggtcacctacaccggcctacactagctcgccgaggaatgtggtgttacgacaaccatcccggcgaactccgacgagttctcgctgacgtcttcactcgcggaactggcaacggcgatggaggcgataccctccaagcatgcggccaggatcgcggaggaggtgtccaatgggatctataccggggcctgtcacgtccttgcgtgtgtaaggttggcacaccccgaactcgatcttcggcagatcttggattggggggccgccaacgacgcgcgtaagggcgtgatggaggaaatcggcgagctgggagagtctgttctcccgctttttgaagagtaggacctcagttcctttgtaatcggttatgccttgtaaaacctttgttggcctcaactgcctttgcttgtgcagccgtcaccttggtctccgttagcactttggtcctgaatatttttggttgtcgtttgtagggatgtcgatgttgaggatgtccagcagcgtgggcagcccgagttaccggtggtcgtcccggcgattgcgctccaaccatatgtgtcccaggacgatgtaggtcatagtttgcccgtgaatacgggtatggcgacgacttccctaagttggtgatctttgttttcatctcctttatacttctatccggagtgacttgattttctgtgttctcggaagagaagagcagcttgacttagttgtttccatgctgagcagatctcgagagtaggcttgctgaccaaaatcgttgcatccagtattggaagacgaagtgtgaggtcgcggaactcgagagagccatgttggaggtgagaaaggaccaggccgtagaggcactccgaggccgcgaggtgtggttcgactcgtatctgaagagttgttgcacgtccatgtcgagggtctgcagagagctctgagtacctcgtggggatcccgaagagtccgcagccggatatttctcgtggctgaacggagcctgcgctcagcttgagggtattggtcaacgcatcgacgaggccttgaagcaggagtgtcgtcgctcaagccggtatgccgaaggacacgtgttggcctgtatacgagatcaccgtccgcagctgcacctcgagttcctccgcgaaggtttttcacgttctcggaggactcctacggagatagatggcctggcgaagtcgatggcgccgctggcggagaaagttttccagtcaatggactggtgttggccttcctggtagcctttgtaccctgtgatagacgtcttagggaaaagtgtaatatggttttggacttgtgtgaaattgtaagaagtatcttatgaaatagaaaagaaatctatcttaatgagtccttattctggatgtagtgtgtaagagtgcctcctcagttcccgactttggccagtcgtttgagttgtacactctccctagaccctagccttgtcgtcggaggattcttctcggaggacatggctcttggacctttgacctgcctcggttgaacaagcactgatcctaacccccagccgcgaagttggaaagttcatttccgattatgcgacttggttaatacgcacggggagaactcttacacgaccaggtctgacatggtctttcgtctccacagaatccgacaaggccttatcggctctgggcgtccccagccgaagatcccttaggttccttggaggccttgtcagcatggcataaagggacatgaggataggtttcaacgctaagtgtcatctgggtgagggatcatcaggcaggaacactgtgattgtaatatgcgcctgaaaataggctttattgatactgtaaggtgtcttacaggtatgggtggtattgactcatacgtagaatttacgtagttggtaaaagttccatgagtttgccaactcgcggccatcaccgtctgcaattttgaatgcgcctggccgcaagacttgtgtgatcgtgtatggtccttcccatttaggtgagaacttgtttcgccttgcttggttttgaacccttcggaggacgtagtcgccgatcgaaagtatgcgtgctcggatgcgcttctcgtggtaacggcggagggcttgttggtagccggctgctcggacggcaactcgttcgcgatgttcctcgagtagattcacattgtcgtttcgctgctcctcctgatactcgtcggaatacttctgtgctcgtgtactctgatgtcatagctcgctgaggagcatggcctcggagccgtacacgagaaagaagggtgtttccttgttagacgttgtcggtgtggtgcgtatggcccatagtactaatgggagttcttcaacccatttcttgtcgtgtgacatgagcctgtcgtagacgcgggtcttaatcccttgtagtactatgccgtttgccctctcgacttgtccgttgctttgaggatgagaaaccgaagcaaagcatattttgactcccagcccgatgtagtaatcctggaaatcggtgctgatgaactgggagccattgtcggtgatgatgcgatgcagtagtccgtatctgcaaaatatccccttgatgaacatgatggcgttgtcggccttgatttctcccgtgggtaccgcttcgatccatttagtgaatttgtcgatcgccacgaataggaacctgtagccgccttgtcctcgtgggaatggctcgagtatatctagcccccagcacgagaacggccaagtaagagggatggtctggagcgcttgtgcaggtagctttgtgtgcttgctgtggaattgacaggcttcacaccgctggaccatgtcgcatgcgtctttgagggcggttggccagaaaaacccttgtcgaaaagctttcccgaccaatgtgtgaccggcggcatgtgacccacagattccttcatgtatatcgaggaggaggtgtctgccgtcatcggatgagacgcatttgagaagtactccgtttggcgctttcttgtatagatcgttgccgatcatgcagtagatttttgctttacgggttattttctcggcctctgcgtcgtcctcaggcaactcttcgctgttgatgaacttgatcagtggggtgcgccagtcatctgtggtctcgatatcgacgatggcgtgttccgcctctgtgacctccgagctgatgtcgggggcggctgtgttaatctcgccgatggcctctttcactgatggctttgtcaggatgtccaaaaaggtgccgggctcgagtggttcttgcctggatgcacgtcatgctaggtcgtctggctcgatgttgtccttgcggtatacgtgtcggacctcgatcccatcgaaccttttctccagcttcctgacctctgcgaggtacttggataactcggggttagagcatttataatctttgtatacctggttggcgactagctcggagtcccatttcacgatcagtcgtttgaccccaagttcagctgctgctcttatcccggcgagtagtccttcgtactcggctgtgttgttggttgccctgaatttgaggtggattgcgtgcttgaattgatctccggaaggagatgtcaagacgaatcctgcccctactccttggctgttgagtgcaccatcgaacgccattgtccacgtttcgttgtcgatctggttgtctgattggttatcaggcatagtccaatcggctacaaaatcggcgagtacctgggatttgatggctgttcgtggtacaaagtggacatcaaactgacttagctcgactaccctttttgcaatgcggccgacaacgtctttgtttctcacgacttcaccgagagggaaggaggagacaactgtgactctgtgggcttgaaagtagtggcgtagctttcttgatgtcatgattaccgcgtagagcagcttttggatctgtggatatctggtctttgcgtcatggagagcttcgctgacatagtagactggtcgttggactttctctctcgacaacaatgccagtgctgacggagtatggcgtggcggcaatataaaggaataattcttcattaggttggggagcgacgagtacagggggatttgataggtagcgtttgagtgcaataaatgcctcttcggcttcctgtgtccatacaaatttatcttgcttctttagcagagcgaagaagggttgtcctcgttctcccatcctagctacgaacctgcttagtgctgccatgcatccggttagcttttgtacttccttaagtcttgtgggtgacttcatgttctcgattgccttgatcttctcgggattcgcttctattcctctgctagagacgaggaagctaagcagcttgcctgacggtactccgaaggtgcacttctctgggttgagcatgaggcgatatcgtcgcaggttgtcgaacgtttcccgtagatcgtcaatcaatgagtcgcttttcttggtcaacgtctgcgccggcgttgttcaaggctgcatcagtacattcgacctcttggattgctctagtttggatgatatatttgcctacctatttatcatatgtctctgttaatctagtcttagcatatcaatttagctctatcggctgcttctcgttttagggtttatgccggtatcggctaaatcgccttgctagattagattagcttagacatctaccaccctgaaaactcagtcaacagcttgattgtctagatattatgtttcttttcatacttagtgttgcatcagttaagtttgatctactaagtcgtgcttagaaccataatatctagcctgcttcttgactgccaataagggtttcatcggggtttcagccgatgagttatctggacgttgcatcggcttataaggattgtatacatgttggatttagccgatgacaacaaaggtttcactgtttaatctaatctgtggattttatgacatcggacctccagccgatgtatgctttgaccttcggatcaatgcttattctatcatatcattgctagccgattggtttatattggattatgttattgttatattatattattatcagccgattgcatttatatcatcatctatattggacatatagccgatcgcttaaaccctattgctatcggctggtatcggcgtcggctattatcgatatcggctgagattgcagcatcggcttgtcagccgatcggctgttttgtttattatttgcatatcttgtcagttgcaagatcaaactgactggcacgcccgcatctcatcatatttggacctgcactggagttaagcagatctcccagaccggtgtgtttgatttttttcgtcaacacaaattggcacgcctagtgggaccacgaattttatatccacatgtctgaagaagaagtcaatgtcaagatcatggtcacaatgtagaatttaacagaggaacaaaggcaacagatgaagcagtttgtagctgattttcaaatgcgttgtcttcaatgtttcatcatgacaccagaagggccaactcagaagactcaatttcccaagccgatagttgaaatacttcaagatacagttgatgacgcagttcatcgcgcattgtttaatcaatctggagttttggcggatacattacaaaatttgatcaaagtaacagttgatgagttattcagaaaagccagctcagggagcagattgaagaacaacaacagcatcggctcggggggcagacacatcaatgtcagcatgatgagctatatcaacagtatcggccagaagaatctcaaagatatcagaatatagaagattgggccgatagaattgcaaaattagtagaggagcagtttggaattagacctaaggaacggatccatatgtatcggcagccatatcctgaatggttcgatagagttccacttccacactgatacaagattccagatttctccatgttttcagggcaagatgatacatctatacttgaacacatcagccgattcttactgcaatgtggtgaagcatcgactgaagaggctctgaaagttaggttttttccattgtctttgactggatcggctttcacttggttttcatcattaccatcaaattctatcagaggatgggccgatcttgagaagcaatttcatgactacttctttgctggattcagcgagttgaagctttcagacttaatatcagttgagcagcaaaaaggagaatcggctatggaatatattcagagatttcgtaatgtccgcagccgatgttatagtttgagcctaagcaatgaacagctagtagatcttgcattccaaggattgtcagcacctatcggagatagattcttttgccacgagtttgacagtctagctcatctaatgcaaacaatatcggctcatgaaagccgattgcacgaagcaaaggaagatcggttttggagttatcaagacaagaaattttgaagcatgagttctcatactccaaaactggggggcatgtgttaacagtgaaatttggtaagcccaaagttaccatcggcttagagtcagtatcagcttcaaagttctagaatcagccgatgggagtcaagtcgccacgatgtcgtgttcatggtggagtcggatcaatcaaaggaagcttatctagaagagtccgagttcaagaccgatgcgacatgacagtttatctattaattaggcatagtttgttagtttcattttatctttaggaaagtgtgtttagtgtccgataaggactttatattttcctttttagtttctttcttgtccgacaaagactggttcctttttagtttctttcttgtccgacaaggacttgtatctccctatgggtataaatatgtacacccggggtctatgtaatctatctctacgatcaatacaattcggtgcatcgccacccttttaccttttctactttattttatcgtccggcgggacttggcacctgacgcggggctgcatcggtgttcgatctccggcgaaggggtaagtccaatgttccgtcggcccaggcaattgtatcgtctgcgccggcgttgttcaaggctgcatcagtacattcgacctcttagattgctctggtttggatgatatatttgcctacctatttatcatgtctctgttaatctagtcttagcatatcaatttagctctatcggctgcttctcgttttagggtttatgccggtatcggctaaatcgccttgctagattagattagcttagacatctaccaccctgaaaactcagtcaacagcttgattgtctagatattatgtttcttttcatacttagtgctgcatcagttaagtttgatctactaagtcgtgcttagaaccataatatctagcctgcttcttgactgccaataagggtttcatcggggtttcagccgatgagttatctggacgttgcatcggcttataaggattgtatacatgttggatttagccgatgacaacaaaggtttcactgtttaatctaatctgtggattttatgacatcggacctccagccgatgtatgttttgaccttcggatcaatgcttattctatcatatcattgctagccgattggtttatattgtattatgttattgttatattatattattatcagctgattgaattacactgacgagccctagttaatttactgtggtaataataatatttccagagagcaactctaacctggtgtttggggatgtcgaccaggcatactacatctgcaagtctcttctgcagcagggcttcaggccgcagcaattcatcccatccaccgcaaaatgtaccacctccttggcaacatgtctgcgagccattccatcacctctagggccagaagcccaagcagaatacagtgactggatatcctcttccgacaacccgttccgactgagatcgagcaccttcagttgctttgcagaaatgatggcatcagcgagttcttggatggcatggcaaccagaagaggagtttctctggcatgaacttgcacagcttccatctgagccggtcgctgcacgggtatcctcgtagactgcctcttcgtcttcgctatccggcacctccatcttatcagggtctatgcgatcgttcgcttcagcattggtacgttggttttggtcagtacctggtgatacatcctgcgcgtcttcatcgtactgcaatgttctctgtagtgccaggtttgtgttctcagcaatgcgtagttcctccaatcggtcatttcctgaaagtagcacgagactttgaggttgaggcagaaacttttcatatttgttaatttttatgtagtggtcgttcctcacctgctagtgcttgaataatgcccacgatgccagcaagcccaagattgcatctatcaagggtgagagatctgagactgcattggggattcgaaagcaataccccaatagcttcacatccctgcaccgtacggcgtaagtcaaaccattggggttaccagaatttgtataagtatatcaaggcattcgagaataggaaggaaacctctagggtaaaagaatttcctccaaggttcaagtcaataatattaattttagaaagatttctagagttgtgagaaatcaggagttgtaagcccacagttggataaatccaatctcagcaattcttgtgatgcacaggagagtgcctcagtaagcttagttgcccctccctacaaaaaaaaaaaaaaaaaaaaaaaaaaaaaaaaaaaaaagcttcatagataagaagaatgttgtttgtacaatctgaaaatacttttttttttgtggggacaatctgaaaatacttaaccatgcgtgggaagcagactcactgatccaatgttagttccacctagcagaaatcctgataagcatgaggattgtgcaagtagacacagcttatcagccattaacttattcagttttataccagtcaggcttagttccgaaaacctgcagtgatgatggctatccattatttcactgcacatctattcccaataggtatcaacagtaattgaacaaatgttagcgaaccttttcagagaggcaagtttggagagaaggctaagcattgtatttccagaaattggattgttgtttcctgtcaaaaatatgaaagtttgaaacataagaatgtttatgaaacatatctgatagtttcaattatgcagagcaggagtaataaaagtacctaaggagagatgtgaaaggacagacccttcatgcagtgcatctgccatcttctgaactgttcttgatgtgatagaacattgctcgacattcaagctgtacagtgctgttacgatatgtaaacagaagacacattctataagaggtaattaaaagctggtgccatcaaagaaaaagaaggctggcgaaaacacagaaagtgccaaaaacagtacctacctttgcacttctgtaggactgtgaaaaggtaagaaccgcatgcatctgtgaggcgattcccagacagattaagtacttctaatcgattagtcataacagcacactcacatatctgtattagtaaataaggagcaaatgatttcagaattctgttcctaaaatgaacatgtgcctgaaagcaagacagcttattttggtctgataggcagtgaaagaatagtttgttctgataaaggggtcaaccctccagtttcatcagagtatggaattagaaccatccaaatggtttcagttggttttaacaggatcattgagatttgcgactaagagggacatccaatctcaatgcagaaaatcaaccagtacttgttatagcacattcccagttgagtctaaagtaagtaatggagtatagcttttagtgatctaaatttctcaaacagtaagactaaagagagatatcgcaaaagttaaattggttttcaacaggaattctcccaaagaattagtagacataaggactgcctgtagttcgggcctttctcggccttgttaaaagtcttatggaacatctctccccaagagtcaagttttccttttattgtagaagaggatccagtccattttaatgtgcaatttttttgagctttcaaaagcagaaataacctgtagtttcactttgataaacaagtttagggatagtaaaaagacctgaaataaagcagttggaccaaatcgattacaatgtaaatccagtgtcaagccaccatatgtttggcttgatgaagaaaatatttgttgaagcctctcaattgtttggtttcctgcagttcgtgaacataaactttagtcattgtaagagcatagaggaattaatatgatacacacacatttagcttgaactggctttctgtgatgtcgccaaatcattggtgcatagattacataagacaaactaggagaagaaacagatatactggaaaaagcatacctagcatattatgggaaagatccaacacagctattgttttatgtaattttagagcatcaagaaaaggtgtgatcgacaggtcttggagtccacaatcagacacaataacttcatcttcagagacctgtcaaaaaatagaaaggcatgaacactttgactcttcaaaaataataagccactttataacattgtcaatcaaatatgaatgatacaaatctaacaaacttacttcaagattatataatttctttaagagcttcttgtttggcgcttctgataactttgtgcagaaatcaacatacaatttcatcagccgctttggcacccaatcttcattataaacatggtatatcagatgaggtataactataggaaatatgtacattacatttcagtgcgacgcattggaatgcaatagaaagtttacccatgaaaccaaacacctatacatggagtttagtgccatatacagacctaaaatggatcaccatgtgacaaacatatgcacaccatcaacattntaaaacacatacataatgcanaaaaaaaaaagcgggtactccaatacttgattttgagcagagaagctgaaagcctcaattagtgagttcatatgagaagcttggtttggagaagatttgatgcaaaaattagatattaatattatactaatatttaataatgacagtaaaccagcatgatttatcccctttttactagtaataatcattttatgtaatgataggataggaaggattctgaagttaagataaacagtagtttgccagagatttctgctattcgtttattgggcaatctcttctgaatcccaatgtagtaacttttctccttaatgcaatgatacacaaatctttttgtgacttccttaaaaaaaatgaaacccactgtagtaggttagtagcatgaagaacaaaccacactgatattgtactgtactcagttcaatcaatgacttgatgtccttcaatgcataacagcatattacatgtcatcaataaagaaggaaaaatcacagtgattaccaatactagcattgatgcaacaatagcagttttatcaacacagatgactacaggcaaccataccatcaataacaacatcaatggacttctgttcagaggcaagttgatcaatataatctcgtgagtctgtgtcatctagtaccttcccacaacacttgagttccccaataataggcaacaaacctagcaaagcaagataaatgtaagttccaacagaaaagaaaaaggaagttgttcccgaataatatggaactgcaagtaacgtagaaactaagccagcacaactgtctcctgcatcacactaggcatgcatgatttatagacatagctgaagtaatcatggagtaaaacccataaacataactcataaaagttattgaaaaaaggcaatgacacatgattggcattctacattctttcaacaattaagactgtacagtaactacaatgacatggaaacagcttcaaataagttttacaaccctccacctaccacaatttaaattaaaatgaagaaactatgttctatttcactgatgagaacagcaacagcaaaatcaccgaattgcaaatttgatcccatttctaatgataaaaagtagttcacagttattaaatggacacaccatgtaatttactgaaactaaggagacaaacctttggacctcttatcatcaggaatctgaagatagtacacgcatgccacttcaactttaagagactcaatgctaaaggcaccctcacgtgtacatgcatttgcgtccaagtaaaccaaatgttcaccaattttgaacacccagaacttctgcacgttaggatcaatcatatttcaataactggaacagttgtcataatcaatgataatgtgactaaaaccctggataaatcatttgaaacataacttcaatattgagagaaaggaaacatttaggtgaacattaatcctaggttgactacttgactcaaatatgatatgagcattgtatgaagctaactccaaaagaacttgatagaggttttgacatgtggggtccatccaacatggtagaagtgatacacataaagggtggtagcagtatcttttgatggtaggtccacatgtcaacgatctaccagcggttgatttctttgccggtatttgttagtgagcttcagctacacatggtagcttatcctaaggtttatttggtccaaacctctggcccatgtcacaacaaaaaagaaatatgccttcccagaattaatgttagatatcagaacagaaaatgttcagttaacatattcatctcttctaatgtattttagcatcttcgtgaacatttaaagttaacagccaaggaattcataaaggattctctaaaggagtgttttagtaggaacaaaagcaatgggaaagaatagttgatgcctgcttttcatgagcatgg

SEQ ID NO: 8470 - DNA, 29907 bp, Oryza sativa
tgctagaagctcctaaatctgggccatcattaccatgacaaacaggactaccagatttgaatgaacaaatactttcctcagcagggcagggagtgcagacactgtctacttctctggtctcaatgggatgagaggtatgctgcagatgaacactgattatcagtttccagtgttttgtaacagtaagttcttgtcaatatctaatggaacaaatgagaacaattgatgcaatgcaaataatgaatatcttaaattccttccaataacaaagttttaagggattatgtattgtataacctgatttctgtttctgtttgctgtatttgcaattcgctctgttggacacagaaaaaatgtatcgcacaattagaagaaaaatattttgtattccaacggcaactactgaaagtatggtgtactcataagtcaagaggcacacctgaggtagacagactatctgctcgaccagtaagtgttctttttgactgatcaatttcaggagcttcttcagcttcatcatctgatattacaactcgaacacgctttctaccataatggttgctaaatgatttacttacatcttcttcagggctctcatccatgccacatgacccatcaacattctttgtactactatgcatcttagatgctttggtcttagaagacctacttttatgaacaagtgaggcaagaacaacatcatcatcaaattcctcagaactattatttgcaatattcccatcattatcctctgtattgaggatattatcagatacattgccatcttcactttcagtttctgagcaatagtcactaactgtatcccttgcttcatgttgatcagacattctcttcaggttgtctatttcttgctgcagttttctgaagttatagaatatattttagaacaggttttaataagtatattccgtactttatttgtgcagtgtatgtgctcagtggcttacttcgcttcttcaatgttatcaaatctgaccatgtgactgtaatgcatgttttcaagggcatctagttgcacgtttgaaaggccacctttcacagcaattctgaataccattaaaaagcaagtatcagaatccaaaggtggcattaaaacgccccaatggagagatgtatacactcagtagaagtctggaactattatcagatagatcacacgaatgcaggcaaaggacaatattgatatggaattacaagagcaaggtatagagacattgcctgtatgcttcttcataagcttgcaacgcaccagcccagtcaccacaagaatcaagaacattcccaatgttcacttttgctaatgcttgaccctaaaattgcacatatccaaggtgagagagattcaaaaactggaagctccaagtaaatgagtgcaaggaggaaagtagtcttattactaggtagcaactagcaagcatgccacatggcagcatgtccatgaatttaaggacatgtaagctcacctccaagtttccgattgatcgatacatattccagcttttcatgcaccatttacgagctttgctgaagtttctaagcttttggtaagattctcctataaccaaaagagagtcgctctgtttttccttgtcatggagttcatttgctaccctcttttgtcctttcgaaaattccttgagctgtgggaaacaaatagattacatgagaatgagacatgtgttcttctttaatcacacctcagtgccttgtctacgttatcgggggtatgcatattcatattcgacctgatctttttttaattttgattttcatgtgttctataatctcaatcccagaactcaagaagtacatgaagtgaacaattcattttccaaaacctaacaccataaaatacaccaaacagaactctgcatcgtggagttttatctagctctgataatgatggccaatttcaaactgttggtgtgacaggaaagtaaagatcattcattgccaatactgtacaagtgtacataagtaataagttttgcaatgatcattcaatattggttcttgtcatcaacaactctgaccaaataagataatttactaaagcattttcctttcaacaacctggcattaaacatagctaaaaacactacaaaattgagctattgtttctttacatatttccttctcttccatagattctactaatcgtagctggactcacttaggatgctatagttaattaagtttatggttaatctcagttgtccaacaagacacatgggaatcaagatgactattgaaatatttgtaagacttgtaagcaattatgtagagaaaaactcaaccagacagtcatgtgtaattacaacactgtgttgtgttctacaatggaatataaataaataacaactgagcatttcatgttaatactaagtataatgcaaatgcaggcaaaagcctacatgtagtcagcacataatttcatatgggtaaaggagttagtgcaaaacaaattcagcagagttgaagcttcaataatgcaagcactgaatacacatagttattagttaatgcatattaagttctaactccaacaataagcttcagaaaacatcgatacttccatcaggcaaagcaacaagacactattccctgaaccacagaacaatcccccacaataaaagactgaggaagtcaactttacgcattaactaatggaataacgcaatcaggttctttttctaacaaaaacagtaataaaataagatcataaacagaaaatagatccaactttaaagttaatatttgtggctaaagatcacatagttagttacccctcacttacttttggccatgcagttatcatccttgccttctccataagattagccagccaagcatactgctcaaggaggagcttcctctctttagatgttccacgagcattagaagtgtctctggcaagctttttcagcttctgctcgtatatcttcatttcctcaagtactttggctgctttggtaacagtttcaatattctgatggatttggtccattagtgcatcctcatcttccaagcactttgttatttgaagagctttattgtaacaaagctttgcatcttcatacttttgaacacgggaatggacctcccccagatttataaatccctttgcctcgccttgagtatggcgtatttttctacatatctctatgtccttctcaatatggcccttggctctgttccagttgcgtagttcaatataaacattacctagattgtgatggagcctactgcgagcatcgtcatactggtgtacctcttcctcatcacatatcttcagaccctgaacaagtaatttctcagcttcttcataattatccagttccagttcaagcatgcccatattattgtacgcatcaataagctcctttaggaagagagacttctgagacgatggattctcctttagaacccttgctagcttcatggatgatttgaaatatttcttggcattccgaatggcactgtgatcattctcagatcttagaaggatctcatagtaagttctgccaagctgggtgctacctctctgctgctcaacaaggtcatcagcctccttggcaagttgtaagtgcttcttctgtgaagaatcaaaacatcaatgaaaaatagaaatatggattcatgtaatagaaagaacatacatctactttgggttaacaagagaattatgttgagtgttagaaaaatagccaacagacgacatgaaacaggagatcagcacttaataccatgagttgagtgaacaaaatactccaaatgatcagatttgaacaggggtactcgtaagtctataacaggcctgagtacacacaacacatgctaacaattaggcattccccctcacttcacataaaagggtatctgattcacatggttggcacctcaaaggtttacatgcaaatttgatccgactaaaccaaccatatgggtcaaaacccataggcgaacctgagccagattgaataagatcaccaactaaccaaacatgcagacagtgagtgcaagattcacattttttttctcattttggtaataccacacaaataaacagcagaaaaaatatacatctcaacactggccatacccgaatccataacaatataaaatgtatagtccagcaaatgatccaaccatttgtgtacatttctacaagcaaagtccaccttaagtttgacaaagtaaagcataatatcaaagtgttggaaatttggtcataattcggcatattttaatccaaaataacaagataataaacatgatatttacaatgggatttgatccagtgaaagtggtgaatgtaatcaacatgagcatgcttaatgtagaataagcatcaacaatcacataataacacaatgttgacattgcgatgaacattaacagtaaaacttctaattgaaataatgtaagaaggttataccccaagaatggtcctccgctggagtttgaggcagtattgcctccattggtgttgacgggagcctccttctccttgtatccagtgttgccgttgtctccagtgttcgacatattggtgaaggtgaagtagatgttgacgaacagtgagtagtcgcgccttgcgcttcccaaaaacatgatcgcccgcccgtccgtacaaacgtcgcagcagcacgtggtttcggaggcctactctcccaacgcgtgtgcacacactcgtcgggatgggattaccgtagcagcaacagcgttggaaaatggatgaaagtgtgtctcactattcttgcgggagatcaaatccattctcattttataagagaaatggaagatgaagagtaagagtcatggaataggaagaggaatagagcaactaattgtcatcaactagccatgaaccatcctccactacacaaccatcaaccaacaatcaattaggagtaattgatgtaagttaccaatggaataggaagaggaatagagcaactaattgtcatcaactagccatgaaccatcctccactacacaaccatcaaccatccatcaattaggactaattgatataagttaccaattccctaatcaaatggattaattctcaaaactcttcatcccattgatatcccataaaagaatgaatacacatgaattcctagcataatgagccttagaatttatttgatttaattgatttaaatggatcaattacccaattaaatctaacacaaagtatatgcagcttaatctgatattcagctaaacattcaaatacttgactaaaccatttatatacagatgcaacaccaaatggcccaaagcatagtgggcgttgagatgagcaaaattctctgatacagtggcttctacagcataccttagcactaactcacacagaaacaaactataattgcatatacactataaaatgggacaaaccataatgcagattggtactactactagcaaatatttgtttgccggcagaccaaacaactcaatgcggaaattctactacaacttaacctacacctgcctataacgactcaggcatcagaaaacgtgatctgatcatatgcgtgtgatgcgaaatggaaggatcgtcgtaacctggtaggtgagggcctcggaggagttgccgaggcggaggtggacctcgccgagcgactggcaggaggggaggaggtggcgctgggggaggtacttgacagagacctcgtagtcgatccgcagccaccggagcgcctccacgtactccccccgccgcttgtggatgtcgccgatgacgttcgcccaccgcgcctcctcctcccggttcccctccgccaccgcctcccggtacccccgcttcgccgccttcagctcctcctcctcctccttcttccaccgtcccccgccgccgcgccccatcgccgccgctagggctccagctccagctcgattttccccttccttttttctcgtgcggattttggggatttcgagtgggcgcaaaatggaagcgaattctcccgccaaaatattggggaaggcaaggcacaggcacggcaccgcgccgtgttgttgggctgcgtttctgtgtgggcctttggtgaaatgacaacgtgggctccaagctattttgggcatttgcaattttgggcccataagagaagccctctaaataattctatttttcatgaatccatgcgcttcaaccgagcatggaataattctatttttcctccctcatctctagcccttgattgaagcgcatccctcaactgtaaaaacgggtataacatctcccccaacttcaaaaaccagttcaaattaactccttcactggttttggaagcggttttcaccgacgtggcaggttgacttggtctaaatgtattgacgtgacagcctagtcatcaaaagagttaaaaataaaagtggtaccacatgtggggtctacctgtcatcccccttctccttgtattcttccttcaggtttgggggcgacgtagaagatctcttctatgcgtggtgaccggccggcgggggttcttggattcggtctgcacgtacgtgggtggatgactggatgctgccgtggacgtggaggaaggaggtggaagcggcgtgggcggtatgcagggagccgcgtccaatcttctcgacgccggagctcacgcattctaccctgctgtcggtgcaccgttctcattctttgcttctgcaccagctgtactgcccgcagtcgccgtaccaagtcgtgccggtgctgtcgccggtggccttgcctgtgccgccgccgccgcagccggggttactggtatccgcggccgtgatggtggtggacggtccggccagctgcgccgtcgtgctgagcctagttccgcagcacgcgccggaggatgagatcgcccgcgcacgtctacttcttcgatctccgctccgccgagcacgccattacagggtccgtgagcagcagtgccggcttggctagctctacgttgccgccaacatgggactggccccacgacgacaaccgcaggttcgtccttggccaggctgtccgggcccacttcgtcgccgcctccaccatccctgacgacgatggcgcgcgctagccggggatccgccacttgtgcttggggcaggacggggacacgctccaacggcggtaggaggaggagttggggcggccgagaccgatgggggagaagagtgagcgactggccgggcggcgactccccctgcgcgcgccggccgtccactttgcccctcgcgtgctgctgtaaggtgagagaggaggtagaggaaagagagagaggagatgtgaagaagatgataggatggaagaggttattgacaggtggggctgtaagctgattcaatagggatgaaactacctcccaaaccgtggaaggaggcgatttacacgcctcttctcgtgctagcacaactcaacgtctagctaactgcatctaccttatatagacagattgtaacttttttcttcaaacttttaacttttctgtcgcatcgaatttttttacacatgcaaactttcaacttttctgtcacatcgttccaatttcttcatacttctaattttgacgtggaactaaacacagctataggacatgttcggctagcctacctgcagcagttcaaaccggctgcagcgtgcagccaattataattgtcctagcgccttcgaacagccaccataccctgtgttttaaaataaacaatctaatatatgatgtgatatttctagcattatgaatatgcacaaatccttatctagtcctttacatcgtatactaggttggtttattcaatggtggagggagtataagcttagagcatgcccagcagatcatctatctggccatccattatgtgtttggtgtatggaggcgagaaaataatactccagcagagtctccatcagacacaccatttttagatgtcctccaaaccaagcactccacaagtcaattttagcggttttctctcatcacgctatcctccaactactcagctgtgtgggtctacggtaaagaggaggtgtataccggaactcgcggtgaagatcgcgggagtaaaggcgataggcgaaatatttggcagggtcgcagggagattgccaaagtgccgcaccgccctcaacccacaccacttgtggcttctccgttctcactgctggttttctttaggcaaatgatgaggcccgtaacaactagattcatcttgtttttttaaaaaaaataaatgttgtgaatcttaggttctttaaatcacaagattaagaaacaggggaatagaaaaatgataggattttcaaggaatacaagtgcaatacaaataattggaaaacatagaaaaagcacgaaaaattatccttttattagaccacgagaaaaacacataaactggatgagagagatcggtagatttaaaggaaattttccatgagcctggatcacatgttaaaacttctccgaaacttgtgcggatcgagacattccttagaattttttataggattcaataatatctaaacggtgaaaaaaatcctataaaattgtaatcctatttcctatgttttccaaaggaccgtatccaacgccaaaagatcacgtgatacgaaggagataaattacgcacgtctaatatataatgctggggatttggttccttagaaatttaatactgtgatgtcaattactagtggttttatttaaattggatcatttctttatacatgaaattcaagatttgtagggtgtattctaaaaagccacaatatacgcctggatccgctgtagcctgtagtacgatggcaacttaaacagtcacaacatgtctgtttgatatgattttaagtaacagggtcatctgaaacatttttggctaaaaaagttactgtgattttacctagacaagctactactgtagcggaagatctgaacgcttgatgtaaaaatagggccgagtttagttttaaactttttcttcaaactttcaatttttccatcacatcaaaaaatttcatacacacgtagagttctaactttttcatcgtatcgttttaattttatataagaaccagaaccaaataaatgtcctattcttaactgcagcacatctcaatccgtccggacccatccattccccgtcccgttgcctgccgcgcagcgagagacatcccgtcctcgtcggcgccgctcccctcccctcccaccgtctctcctcgcacgtccccctttcctcccgatcgcaccatctctccaccctcccccgctcccgtagtcccgtagctctcttccacggccccctcccgaccgtgccatctcccctaggtggcgctgttggtcgcggttcttgagagttgagacgcacgcgagctgttcgacgttctgcccagatggacgggaaccgtaagcgcaagaccgttgacagcgactagcatggtcctcctgtcaagaaggcctcgacgggcacgcccggtgactcctccttttcccagttcggcggaggtgagtgcccaagaacatccgttgatgacttctcgttgggtgttggtgattcgactttttcttggatttcagttgccgatggacggaacgtcacctggacggcaccgagcacgaccgctgtgccgatggagtctataggacggatggatcgttcggccacccccagtcgcctagacggcaaccgctccgcaggcgcgtccgggcccctgcgcatctgaggtagataacaaaggaaaatccagcgcgccttgttctttcttccaagatcgagtgcacccctgttctttctttcttcttcgtactcctgtgaagcagcttttgttctgagtgtcctactcgccatttacttgtcccggttgcatatgttacaattcaaaaggctatattatctatgtgaaaatggtttgattttgttcctagcaatgttgtattcaaattgtcatgcaaaacatttattactagtttgtagtactactatttgtgagactgccccctctgaatgctgagagtggattaaagtggactttttcctcaatttctatgctctccagtttataaagaatgcctgaggttgcagctaattacctcaggcatctctattgttgttactttatatttggttcattagcacagtgatacaagttgaaccttggatgaattttcatatttgctaactgtgtttttcatttcccatcttaacttgacaagttatccgtgacacacactttgctgcatctttggcttccacttaaaatggcatttagtgtattcttgttgtttgtgcccttttatatgtcctcaatggatgtaactacctatctacatttctactattttccttcaaaaatatttttgctattaatattgttgctctagaaggttttgtttgtgaattgctcctgattagcatgcattgtcagtaagactaattgtgctgtatttgttgtgggattctaaaacattctatatctgtttaatctgcttttgataacatcggcctagcaaatacactatgcattttctattttattttgattaatgaattaatttgtaccctgctttagtcacgcctcatatggacagcatgatagctgaaagccacaactttagaaatctgcttgacttttgccttgtttgcttgaacatgatcatgagcagtctctcaagtaacactcactcttgataatagaagcagatgcctacttaacaatttagaaggcccttttatttttgtatttgtgagactatgccccctctgtatactgcatttgttggtaaatactgtgtaatttgttgcgtccgtgtgcagtggcggagccaaggcccagctaccacgggcaatggcccaggctctgcctggcacatgcagctgtgcatccatagattaacacttaattagcttgctaattacattgcttagttcactgctaggccgtatgaagcaactccacatcaacacatatgcttaacacaaacttataaagcaaatgctcatgttaaaatgatctatgaattatatagacttgtatattcttggtttgtttgttaggtttacccgagctcttaaaattttttgaatctgccactgccatgtggatatttacgtttctgattacctaggtatcttgttctgtctgttctgatagtattttgtatatcttctacattacacctagtggctttgtcagcaatcagcataattgatagtcccatttttctgtgtatataatcgactaacttcagtaatccttctgtttctcactatcacttaagaaccaatgcccctgctgggaaacagcaagcgctctgtgggcgcatccaggcccctgcgcatccaaggtgagtacctaatcgagcgcgcctcttgccctcttcttttttccaagattgaactcccctcttcgtgccattgtgaagttgttcttcttggttctggttggttagcggagagcagcagtgaggaaggccgcgtcgggctggggacacctgcaccatcacaacatccgttgcctggtggcgcactcacccgtcgtgtggatacctccaatctccaggaaccactgcccaccgctgtgtctaagctaccttctcaggacaaaaatggtgagtgttctactcgccatttgcctgaccttggtgcatctgttacaattcagaaggtccttttatttttgtgaaaatgatttgattttgcagttagcaatgttgtattcaaaatgccatgcaaacttgttgctagtagtttgtatttgtgagactacgccccctccgtatgtttcatatgttggtaaatactgtttaatttgtggtgtctgtgtgactatttacgtttctggttacctagggcttttgctacattgaattgatcaatgctcatcactgtcacttgagaacagatggcccaactagttagattataaattattttcactcagttcattcttacctgaaattaacattttgctgcagcttctgttattgtgatagttcccggatggtcttctgatgataataacttctcggaggcagtgaagaaactgttgtttggccgaataggggcagaccactcagttgatcaaaaggtgccaccgccagcagtgagaacagtgattgtacatatctttggtagatatggaccatatctagctcgtcatatggagggattgactgcgcaagcccatcttaggcgtcaagaaatgacatttgaaccaaatatgtgccacagaggtaactgcccgtaacggaactctgtgaaaagactctttattacaaaattgaaggctaatactgtcgctactggtctttctcatttattttcttttggttcaaaatgtttttttttcaggtataatcaaggagagagtggatgaactcttggagccagcgaggccttcctctccgaagtgctgttcttgcgatcggcctgctgactggataacatcatgctgctcgttgatgctatgctcgtattgcatgccggacaagtttcatcagaagcacaagcgaggacatagccgggaactctgccgcgcgcaaggtgccattggcctgctcaatccccggagtccgttggaggaggaaacgaggtacctgatgaaaaatgacatgctctgcaagcgagaaattattctacaggttgaggacgaggagagcgggagaacacgggagtgcgacattttcgtgctcagaagcatgttacctctggctgacctgtggaacaggaagcgcttaaacaggctattcacgtgtggctatcacatgaggtggaatggggtgctcgacgagctcttcagaacggagaacaagctatctttcatgaagtagcgagtagtaatagaggcttacgtttgttctgtatgcgattactagaaccgttgttcagtaactcagatctgttttctggtaccctgccttttggattgctcttcttttattgtctatgcgatgttattcagcttgcgaatcttgttgagacatgtaaccgttgcttaccattgctcatgttttctggtagctgagccttttggattttaaggtccggaagtttgtcttactttgatcgtatcgtttatgtacaaagtttctcatataaaaaaccatatatccaagttttcaaactctaacttcgacaccaaacactgtcaaaccggacgaaattaaaatttgagagaagcatcaaagttccacaacaaaaaatatatgcatgccatgcatatatttttttcccttcttattacttaacactattgcgtttgttacaattaaatcttcacaaaaaaaaatcttacatgattatattacgataaaaatatttatgtttgtaaattacttttaatatatacgtaagttacttttatcatatatataaattacttttagatttgactaaattacttcttatactttcataatgctctaagttgattatttttattattgcttttagtcaattttataatttatggactttaaatttaatttttagatagatcatatttttttccctacaacgaatttacttctaatgttgtaacaacttacttccattttatgctaagttacttttatggtttatgtaaattacttttacaccttattaaactagttaatttgcccctgctaacactaaggtgtcataatcttttctgatggattacatgctagcaaaaataatttacctgttatccatccaattgagctttaattcgatctatgtcgcataataaggcaaagtacaataattatattgcctaaaaatattaattcaagatcgtcaattatctaatcacttcaataccaatatatgagacaatatgcatccacacaaaaaaggtgaggataaataaaatattccaagcaattccaccgcttctcaatcatggtaccgataatacacagtattaacacatattgatatagtatcatgtaactggcaaaatctaaataactaacacactgacaccactacagtacaatgaacacattgagttatggaaacaacagtcatcacttcttccttttttccatatctctcattcagtcaaccatgatcccttttaatttgtagatctttatagacttctattttgttatcctctcctagagtaagatgtgtgcatccttacaagatcagtaaagatcagtgctctcagggtcatttgctttcgtaagacgcaatttatctacacactcttagagtgattgtcaaaataaaacactttagtaaaaaacaattagttctgtaaagaaaaataattgcctagtgccgttcaatgaaaagtcactctagtgctgttttccgttaaaaaaaattagtaccaattctaaatctaatgggtacttaaaaaattttaggtaccacggtagaagatcggttctgctcatggcctgctgcctgcgaaatgtaaggtcttccttttgtggctcacggcgcaggcgctgtacgttgttggatcgtagatgtcctggtcagcgagtgtggagattatgggtacctcatatccacacggcatagctatccgactagtcatagaggatagcttatatctatggaatatgtaaccgatcatgacttgggtattacgtttccttttatattatggagcggcctaaagtcctgatttgataatattataaaatagatttaggaaaccgataccgtattggttaaggtttctatattgtaatcatgccccccatcctatataaggtggggcaggaggccctctagggggcatgacacaaactgatcgtcagatcaatatacacccggcggattcaaatccccaaacaggagtagggtattacctctcatcgagagggcctgaacctgtctaaatcctttgtctccgcatccatccactttcaggtctcgtgcgctacccccttttcatattgccgaaaatttgtttcgacagttggcgcgccaggtaggggttgcgtcgagttacctgtcgacaagtgcgatggaatcaacttcatgagtcaccggcttcatcttcgcttcgggagttttttcgccgaccacttcaacatgctcctgctcttcgactcggatccaatctagccgggaagatcagtctcgacatgttcgatggattcaatttccaccgccgtcaatacctccatggaagacctcagtttaagatcaaataccatatacacatgccctgccgccgtcggaatccgatcattgccaggacgagtcccacgccaattatccgttcggcctaatttcaactcagctgcgattagccagacgcacaactcagctgcgattagccagacgcagaacgacgaaaggcagtcatctatccaatcggaatagtaatcgtgtgcgatttcgccatgtatacaatatacatgcatgtagcggagtccactgacaacagattgatctggaatcataattagcagactttgcagcacgtgtctccaattactgaagcaccagcatatatactatcgttattcccaggcagatttgtttgttttgggagcttggactttgccgccatgcataggcaacgttgtctaatatggagtaattaagattcatgcaactactacttgatttaatcaccggatggtattgatcaatccacctctgtccgagctgtacacgagtgcctgatctaaatgcacagagacacgtcgccaggaggacgagtcggcagagtcaaaccaacgagctgggcagacgtcgcatgctaccacatggatagaccggcgggagtgcgaagctgtttctccgttccctgacctcatcgttgccggcttgcctccgtcatcatcaccgccggcctgcctccgtcgccgccgaccggtgtcctcgcctatacggttggttggtcacaccaccgttcatgggcgtccacgtcttcaccgatcggccgcctcgtccgctgccgactggtgtttccgcctgcacggctggcctattatgccgctgttgttgggcgtctacgtcttcaccgaccggccgcctcgtccgccgccgactggtgtttccgcctgcacggctggcctattatgctgccgctgttgagcatctacgacttcaccgccggcctgcctctgccgccactgactggtgttttcgcctatacggttagcggactccgccgccgttaatgggcttcatcatctacaccactggcttggttccactggcgccgactggtgtttttgtcaccattgatggactgcttcgttcccacatcggctacttttgctgtcaccgagggaatacgacaaagctaagtcgtcatttattttattctttatatgatattttgccttttcctttgcctcactacatcaactggttcgccgttgactagtgagtcgggggctacagatgtgtatcatattttttaaacaattttcataatatttatcttgattgcttgcgacatattctgagtacaaaagtgcctatcgagttatggagttccatcttcctatgcttttcgtttggtttgctaattgatagttgcctttgggctgattcctagcacccgggggcttgttggatggatcgaataacgcaaggtgctaagtattattcggaataaatcaaaagcatagagataagataatttattttctgctcttaataattgcaaaagtacccgagtagtaaactccgacccgtgaaactttgttccattaatgacgaactcatgtcactcatatgcatgtttgggaagtgcttaggctgactcccggtgcatggtggctatgactagtcgggcagagtgtttaaacgtaatgagtcatctgctcggggaaatcaaaattgacaagagaagaaatacatatttataaatattttaaaatacttgaatttttctcgagtattatatttatatcagatactactcatcctatatgtttgttctgcaggatccagatccagatatgcataaaagggattcatggctataagcttatctcttacgctccaggaatggatcagtcagcacatcaccatcggcttgctgtcatcgcctgggtggtcacaccgtttttgttgggcgtctacaccttcaccaaccggccgccttgtccaccgccgactggtgttctcgcttatacggtcaggtggtcacaccgccgttgttgggcatctacgtcttcaccgaccggcttaccttcgccgccgccaactggtgtctccgcttgcacggctggcctactatgccgctgttgttgggcgtctacaccttcaccaaccggccgccttatccgccgccgactggtgtctccgctgcacgactggcctattatgccaccgttgttggacgtctacatcttcaccgaccagccacttcgtatgacgccaattggcgctatcgtcttcacggctggccacgtcgccaccatcgctaataggcgtcatcatcttcaacacaagctgtctacatctgctgccgactggtttcttcacttccatggctgcatgattttgctagtgttgattggccttatcgtcttcaccgtcggtcatctcgtctgcagctgactagtgcactcgcctctacgtctggtttacaccgctaccactattgatggacgtcatcatcttccgtcgccgacttgttaagtcgccgccgactgatatttttatcttcacaactacgcgtcttcgcaaccggtttgcttccgttgccgccgactcgtgttcacttcatcacggctatgcaactttgttaccatggtggagctacttcatcttcattgtcttcggcaccggtttctactcggacatctttaacatgtatcttcactcaagtgatggccacttgacgacaagctacagttctcgactctatgttcagttgtttcccaactaaccaaagagtcgggggctacacaaatacaagactctcaaaattcgacaagctgaagcaatcaattaatcagccaacgagtcaattccaggagtcattatcttcgtctttgctttagagcagagttatcaaccaatcagctcagtttcgacgagttggacaacatcatctactttcctccaagtgaagcatctgcaacagctataacaccaatttgatggattattgtcactgacatcatcaccagcacctctgcttcatcggccctgacatcaactctgttgctaatggatgactatgtcttcgccgacttattatttcactttcacggttgctatcgactggatcaccgacatcgttatcttcatcaacatcctgtcaagcctattcaacatagcccactctactgctattgatgggcaacttcgtcattatatttgattatctatgattgctgcttatcatcattactgtcggttgcgtttgtcatcgctgactattttcttcatcttcatgattggtggatttcgtcatcgcctttgatgcgtgtctacatcttcaccgttggcttgctttcgtcaccaccgaccggtatcctcgccttcatggatggcttattatgtcgccactaatgggcatcttcatcttcttcaccagctgccttgtctgtcatcgactgattatttcactgccatggctacacaactttatcgctgggcgccttcatcttcattgctggctgccctgactgctgccgactggtttctttgccttcacggttgtgcaacttcatcacttttgattggtatcactatcttcactaccaccaatattttttccacctctggtgagcaatattctctctatattggtcatcttgtctctatgccaattgcgtcagctaccatcaatggacaattgtgactacgacagaaggacaagctatatgctcaggggcttactagctcaaacacaagtatcataccttcaatttggacttgtttcggatacattcaacatggatttatagtcatgagtttattttctatgctcaaagactggaccaattactattccccgtaaggactatcaactgaatacttgcgccagtcgggatttaattattatatctattttggagtatcccataagggataatcactcagatcagaagctattcatatgagctacacttggtctacattacctagaagacttattacttgggagcatgttacatgtgtcatcctttaaagggtgtcgaagtcatattttttggcctaggcctaatatgtctgcagcccatattttgaggtgtggccagtcacgttcttttagggacttaggcactttttgcttaggccaaagtgcgtgtgatctagtgcccaataccttaaagtccttttataccgcagttactcaactttttaggagttggtacaatgcatcttaaaaggtgtcaaacagtaaagctttatatagctgccccgctgacttttttatatagtcatggcactgtttgggtttatcaagcaattgattggatacaacataattgctttttgccacgtaagtgtgcatttttattgaccaatattatggcttaggctgattatatattttggtcattttccagatgattgataaatccttatgagtttatttactcggattttataccacatatgccatatatttccaggtgtggtgaaaccatgtgtcttttagggactcaagcacatctgttaaagcagtgtgcgcatggtgtatgcccaatactttggaaatttatttattcacaacatacaagcttctttatagctgttttgctatgtgtattcaatgatgtagtcagctttagattgcacgcatcatattttacaaagcagtcggtatatcactcggatcatgttattcaaggattcacaccgcatatgctatatattaatattaagtcacttggttgactacaattatcaaaaccactcagttggtgcctctattaggtacatctattcgatgcacctgactttatttttcagccctccacaatcttcatatttggtaaaagtactcgggggatcatggcaaagatgattgaagcactcggttttggagtaatctagttcgaaagaagattatctttccgactgtgaaggtctccggggctactgtggagattatgggtaccccatacccacacggcatggctatccgactagtcatagaggatagcttatatctatggaatatgtaaccgatcatgacttgggtattacgtttccttttatattatggagcggcctaaagtcttgatttgataatattgtaaaatagatttaggaaaccgataccgtattggttaaggtttctatcttgtaatcctgctcccatcctatataaggtggggcaggaggccctctagggggcatgacacaaactgatcgtcagatcaatatacacccggcggattcaaatccccaaacaggagtagggtattacctctcatcgagagggtctgaacctgtctaaatcctttgtctccgcatccatccactttcaggtctcgtacgctaccccttttcatattgccgaaaatttgtttcgacagcgaggaatcaagtcatcaactgccttacctcctgtcctttctatgcgcaagaattggagacggtaaaccatatcctcggtaagtttggtttcaattgctgtccatggcggggaggctggaaattgcaccccaaccatggctgcttgatccaagatggtgggcttaattgaggatgcggttgacgaaacgtcatcgtacgtcggaatctcgactcgcagatcttgcgtttcttcgactatgtcttcggtttcctccgtcatcatcctcatccgattggaagggcgccagtggttgctcgatagtgtggttcatttgggggagtagtagctttcggctgttgtttttgcattcattttggggagtagtagctttttaactaggatttgcaatctcttcctttcgacttactccctttgtcatataaaaaattaaattctaggtatgaatacagacatccctaggatttgagtttttttcacagagagagtagccagtaattcctagttcgtttttcttctatcctgttcaccctggttgcgatggctgcccggatgtcgtgtcgtgtaaaactttcatttgctccttgtaatatgatgtgtaattttttttgtgtaattttttgtgtatttctttgtgcattgtggaaaaacttaatccatcaatgaccgccatgcaactcctaagaatgtcatgattggagggagaatggattctagttccttgagaggatgttcgaacccataaccaggcggatggaggggataactattcttagttacagcagaggaaaaaaaccttgtgtagaatttttctcttaaattcaatgcaaatgactttcaaaaatctagaaaaaacgggaattgttttgatccctcactgagacattcccttgtttgtttaaaaatcaatcaaaatagttagaactcggccttagtcaccgacatgcaactatccttttgcagttgatttctctacatacacacagagaggggaattcattccgcggtgcggagctcaaggtcaagtcgcggagaccgttcaagtagctgaactagtaagagcaagttctattgtagaaatttatggtgcaaggccaagttatagatgtgtgataaaaaaaatagtactcactctttttcatattataagttgtgtttgatattttttccctagtcaaacatttttaggtttgactaaatttataaaaatatatattaatatttttaacacaaaacaaacatattatcaaaatatatttaatgttagatttaatgaaactaatttgatattttaaatgttgctaaatttttctataaacttggtcaaacttaacaaagttttattaaaaaaagtcaaacgacttatagtataaaacggagggattagaattttaatacttgtatagatcgaatttgagtctacataagtgttatatattgatctatcgtgatgaattctttcaaaaacattttaagtgacatgaaaaaaatgagggccgtcccataagggatgattattagacttttccctaatccaggggacaatcagcaacctgattatactggcgagagcaaggtgaaacaaaacaacacatcccagacactctcctatccaatcagcagagttcaagtgttcaactcactaaccaaaacaaagtgtcagggtactccacaatcctcaccaccattattattgatgctatggcaacagaacagaaacaaccttcagatgaaaagatgataaccagcagcctgcagactcatgcagacgagttcacaccctgaattcgctggaatcaattatctcaggaacgcagtcaagtcaacaaaaaatcagcgtgatttttgcaaggaagcatgaaaatcgtttaactcaggaacgcagtcatgccaacaaaaaatcaatcatctcaggaacgcagtcaagtcaacaaaaaatcaatgatcgatgcaagaaagcatgaaaatcgtttacccgcacaattgtagtatcacgggagtaaccaagtcggagaggagtgggcagacgatgcgcgctgctccgagaaacagcgatgaacgtgcccgtcgcaccacctcccgttgtcgctgcagggataacggcgatgtccctcatcgcggaagggcatgccctcatcggcgtaaacgtagtcatccaggaagtagacaccctccttgagtcccagcccaagctcaggataggcagatgattcatacgatctggagcagccacgcccgacgaagaatagacgcccatccagcgactccagttcggtccaggtgtcctcaattttctccacgccggtgtagtcctgcaccatctcctgaaccatctcgaacaccttgaataggcttgtgggagaacgtggccgagctgcaaatctcacaatcatcagaagcttggcccgggactccacgagatagcgcgcatggacatgttcgcgcaagcgctcccggtgccggatgcgctgaacagactctgtagtgccttggaggccaccatctgcgtagaacatggggatacaggtgacgaggaatcccctcctcgtcacgaaccggaaggcgccatcctgatagatgacatcctgtatctcatctctgagtctgactgttgagtcgggcgccattgttccttcgacggcaacacgatctcccatacgccagaaggcgagacggcacgagccggcgatgagatcccagcgcatgacgatgcccgcgccaatgcagctcgtgccgcctggggaagaggagagtgctgctgccagtataaccatgttctgtgcgcgctggtagtcgtcctcgtcctgatacgagcggagcaggtcggggaaaggaatcaagctgctcttggaatcctcgcgtgaccggaggttgatcatggcgtgaagtcgattgtgctcgaaggcgacgaacagccaccctccctcatgcgagccgaagcagcgcgccccgtgcgcggggctgaggcggtggtgaagactgcagcggtcgatcccgcagtagaagcagtagacgtggatgaaatcatcgccggcggatgggaggagtaaccaagggagagggcgcggcggcgagggaggcggcgtgggctcggcgagtgcgccgcgccatgtcctgcagacgtcggccgcagcatcgcggtccgcgacacatcgcaaatggcggaagatctcccgcagcaaatcagccggcaaatccgccatagtaggcgcaggcgagggctccatctccatgggagccgggaggggtaggggtggaggagagggtttggaggattcggcggttggtggatggaagggaagggaaggggaggggagctgtggccaagcgacgctgtactagtaggagtacttatgttcgttgcccctgcctggcgttcttctgcttctagaagcaaagtgaggctgggcctgggcctgggcctggaagggcagaggcgttcttctgcttttagaaagcgaaactgctgttcggcgaccggtcgcgcgcgcgcgcgactggacacgtgtcgcatgcggagaggggcgccggacggcgcgccgcgcgggaggagctccgtgttttccgtttttttttcttttcggtttctcttttttttctgtttttctttcgtattttttcggtttcgtttttctttttttctttttttctttccgtatttttttcgtttttaatacgtatgtatgcaaactttgtatacgtaaaaatataaactttgtatacgcatatataaagtttgtatacacgtatgcaaactttgtgtacgcatatataagggttgtatatgtgtatgcaaactttgtatacgtgtactttttgggtttttatatgtacgtatacaattttgtatatatgtatacaaagtttatatacacatatataaagtttgtgtacatatgtttttttaggtttttatacatacgtatacaaattttgtatacacgtatataaagtttgtatgcatatatataaagtttatatacacgtttttttaggttttttaatgtatatatatattttttatagtagtagtactaatagtagtaatagtagactagtagtagtaatatattaaatagtagtagtaaaaggtactagcatcagtcgcgcgtggccccaggcacgcgattagtcgtgcattaggcgccccctttagaaaggggatagtagtatctatagatttgtcctgctaaaagcagagctcagattttttttaaagatattatttgtgtacgacattttcggaaataatgctccgaatcatggtattacactacgagccctattctaaaatataagtatttttaagatggtcacatatattaaaaagtagatagagataatttgagaaatgttataattggttgagatgaaaaggtaggtaaaaaaaaggaaaaatggttgagaggaggagataggtagagaaatagttttattttaaaataagatgtattagaaataactaaattctgaaactcagcatttggttcccaacatttggtaccgaactcagcctaagcactgaatcagctccactaaaaaagaaaagcgaggaacaaaatgggctttcctgctctcaagaaactaacaaaatttctagtgagtccaagaatattgtaagtcatgcaggatttgctaggactaggatgcatgcatatgctactccatcaatcggaaccaggcaagggtgttcgtggagtcaccttcaattcttcatctccaccgttccacccgaccacaaccgtcgtggaaatctttgcacattgttgtcgttgacacattaaccgtcaaaaggaaccctacttataaaatttaatagaacttgtacaagatgacatggtcgccacaaagatgcacaattccgagaagaaacaacaacaatctttgcagacagccagagacaatctcatgggccatagtaaatgggagcaacaacggtttagttatacaccatgtattttggagtcgcgctgaacttctgataccctttgatgaccttgtttacagcatcaaggaagtccttctcagtcactgttttccgtcgggcgcgaatcgcatacatgccagcttctgtgcagacactccttatatcagctcctgtaacagcaaacaggagtttgtgagaacaaagcttagcattatccgcttttgaggtggagactataacaaacaaatctagaagaaaccacccagaacgaagtttcaaagttcttccagttaccagttgagttggggcagaggcgagccagcagctcgaaacggatatcgcgctcacagttcatggtgcgtgtatgtatcttgaatatttgggtacggccctccaggtcaggtaagccaaattctaccttcctgtccaaacgaccaggacgtagaagtgcaggatctaaggtatcaggcctgacaaaacaagaaaatgtggtcagcttctcagctctactcatgtggcgatagtcctgaacacatgcagatgtttaaagataaatagctacacagtatgatatgcaatacctgtttgtggccatcagaaccttgatgtttcccctcgcatcaaacccatcgagttggttcacaatttccaacatggtacgctgaacctcattatcacccccaaccccatcatcgaagcgagcacctccaatagcatcaacctcatcaaagaagacaatgcatgctttcttcgagcgggccatctaaaccaagtcaacattttttttttcagaaacatgcttgtcaaacagaagcactttaagtgcagaaaattgataagttcttgtgagttttcacaatgttgcacatacctgaaataattcccggaccatccgtgccccttcaccaacatatttttgaactaactcactgccaattacacggataaaacaagcatctgtacgattggccactgctctagcaagaagtgttttgccagttccaggagggccatagcaaaggaccccctttggaggatcaataccaagcttgacaaacttctctgggtgaagcatgggaagctcaacaacctatgaacaaacaataattagcaaacagtaaatagcaaaataagtccaaaactaactagcctgatgcacaaggatgagcaagtttgcacgacaagggatatgaactgaaaaaagattagtatacctcccgcattttttcaatctgttccttgcaaccacccacatcattatatgtcacatcaggtttttcctcaactgtcatcatggtaacacttgggtcaattttgggtggcaaaggaatttgaatctggtacttgttccgatcaacactgcattaaacgtgagatgaatttatacagtgagtacagtggttcaacagacctagaacaatgacatacaaactatatatgatatagaaggcatatgacttgtccagaaaaaagcatgcatgcatcagatgcttttttcttcttagcttaatcagctttgctatctctaaagcttacatgttacagttcatcttctgtcgcaggaatggacaaatggtgctactagtactattggtaaacgcaaaggaacagaaaattagtgaagtatatctaccaaactttgtatatgttataccctggattcaaataagcaatattctcttctatgtcaaacatgtaaggtttgttgaactataatctactcttgtttccatgacaccatatatgctgtcaatgaattaacaccattgcattgaggaagtgtgcatactattgggttaatatattagagcttgttttggtctaacgcaaaaatgcatcaaaaaaaggtggaaacagcagatcgaattgcatgagatagaattcagggagaataatatgatacatcaaagaccaaaaaaacagcagtgacctaccccactctcatcccttcctcaatgtcagttggagaaactttatcccctaggccaaccacaaactgaatgatacaaaatacagtatgagaaagggatcaacacattttttttcatgaaagatatggtttcaataaaattggataagcatggaatacctttgcaatttgttttacattaatcacatatttagcatcatcagtattaggacttataatcttggtacacctagccaccttcaaaaggaggaaaatatcttgtcagtaaaatcacagaagacataaaactaaagcaggaaatctaagtccttaggcatcatgcatgaagtatgctaggcacaaaactattaaaacaaggaagaaggtaggcggggaaataggttaagcgatatacttgcagcggttgctcttcttgcatcatctgcttatctgatactagatcccattggctgggtggtgccagcccagtgtcagactccttaatccctgggatttaatgaaagagtatatcagtcagatagaccaattaacatgtgctaaactcctagcatctaaacaagctgacaaactgaacaatgatgtgaaaggtaagagggtgtttgaacatgagacaaggttgctatacagtgcacattacgacgtcaaagttctagtacaagaacaaatttggaggtatatcgcacattatataagcccacatagagcaccagaattgtactcttgtcatcaatgaacaaagagtgatcaatatgatataaaacattcctacagtggggaatggccaaacccactaaacaatcaaaatgtgctatagcaaataggaaagcatcagtgtgttcgataaaatttatctcactatgctatcacatgaaagtacacagctgaactaaaagaaaattacttagcaaattgagctacatctccagttccaaccaagaattagacgaaaaattcttaactcaccacaaaggtcattgatcttcttagccatttcttttatttctttctccaccttcttaatgcttgtggagtatggcccaagcccctgcgcaacaacaaccagacagccagaatcagcaaacttcattaatagaaaccacgcagcaccaaacaaagtattaatcctctccactaaaaccgagcttttcacggcgaagaagaagaagaaaacgagagaaacaaacatttcgccttccgcgagaaacccaaaccatccgctgaacaacatcagcctcaaccgccgacaaaagaggcacacacacaaatcgaaaccctagaactacccccaaccacaagctaaccccagcccgaggcccgagcccaccatgggaccagatcaccagaaagcacccctagatgggaagagatcagggagatctagcggggggacactcacgtaggtcttgaggagagcgatgtcgtcctcgtcgagcgggcgggggttcttctcgttcatgatgtcgtcttccggctccggcgccatggctccccgccgcttccgccgctgctgccgctgcgcgtcttctccggcggcggcgagaggcgcttcaggtggagtcgtggagagaaggtgggggtgcgaatgcgagagaagagagaagctcgcgtggatgcggggagtttattttctcctccttttttttctttttatttggccttttttttctttcctcctccgcaaggatccctctccgccgcccgatgctgatcggacggtgtaaatctttctaggcctgtctagagttggtctgtgtccttggctcgttgcggcaatgggcttttttttttcgtcttggagggctgagcttaggatttatttagtttggttttcgtgttcgattccgaaacgaactgatcaaagcttaggtcttctttggaaccaagtcggaatttgaattaaacatgtggaaatacagtaaaattcgtgcgttttcgaaaaggcctctgcatgatttcggggaatactgctactgggtactcctgggaggagaatagaacttaggaaaagaatagtgtacgtaaacatgatattgcacaaaagctcccaggtttcaaattcttcaaatttgatacaatccagacaatgaaagcaacaaggattccaggacaagacgattatgggatcaaactaagctaatcttttcattgcattatagtgtcagacagctacaaagagaagcaatcttcgactcttcgtcaggttattgtccggaccatctgactggagccggtgcactgacgaaatggacctgcaagttctgggcatgccctgaaaagaaaatggcaggtgttgctcaacatgaacagaccacgataactatacagcagtggacataaggaagtaaggaaccttgtatgaggataatgctgaacatgatttgcttacatgggaaccataatcaggttgccgcaccacagcatcggagaagaaggcaaacgccaaacatcggagaagaattagccatgccgtttccgcgagatgagtcaactgataaatggagtactgaatctgactgtaacagaagaattttcaatgtcagttcactcaaacaattcaatacactcaaaaatcacaat

SEQ ID NO: 8471 - DNA, 11146 bp, Oryza sativa
atttttccagatagggaacccagaacaagggggcgggtggctcatactttgtagctccttcatacacagatctcccaaaacacaggagtagggtattacgcttctcagcggcccgaacctgtatacatcgcccgtgtcttgtgtgtttcctgtctcgtgaaccttccacatacagagagcttagaatctcaccctgagtccccggccgaaccggcaaaggggggcctacgcggtctcccggtgaggagccccacgctccgtcatctggcgcgccaggtaggggactctgcgagggattttctgagctctcgcactctttcgtgtgcgccaagcttttcctgttcagcccaatggccgagccggcaaaggtgcacgacctctccccgagtatgagcggtgacgacggggagccaaacccacgtcgtcgagctcgtactccaccgccccctccacgccaaagtcctaggtgggagaaggcgctcgagagggccgaaggatccgcgacttcgacgcccacaggaggtggagaagggcggcgagatggggagcgtcgcctcctcgtctacggcgacggcagcacgccccagggcgcgctccaagctgcgggcgcgctcctacctcacccgcccgtcgcccatgacccggagtctccagcccaacgttggctggacgatgtggccaaattggtcatgactgcacggcagcgcctagatgctggtgggcggtcctccgccaccaaggcctctggtgctgctaccaccggctccgcgtcgtcaagacggagggcgcggcgagcggcagccgctgttcgccattcggccgccactccttcgtcaacgcctccgacccgggaagatctgcgtggggaaccggatgcccgcatcagtatcgagcgccggcgtaatggccgacgtgctccccacgcaacggagggcgcctcctcgtccggagtgtcacctcaccaaggacgcggggatcagccctccgtgcccccggttggtggtgtcggctgtagagcctttgtggcgagccttcggaatgtccgttggcccccaaggttccggcccaccatcgccgaaaaatatgacgggagcgtcaaccccgccgagtttctccaggtctacacgaccgggatcgaggccgccgggggtgacgacagggtcatggcgaatttctttcccatggccctgaaaggacaggcgtagggttggctaatgaacttgccacccgcgtctgtccactcttgggaggatttgtgccaacagttcaccatgaacttccaaggcacatatccgcgcccaggtgaggaagcggacttgcacgcagtacagcgaagggatgatgagtcacttcgctcgtacattcagcgattctgtcaagtccgcaacaccataccatgcatccctgcacacgcggtgatttacgcgttcagggggggtgtgcggcacaaccgcatgctcgaaaagatcgcctccaaagagccccagactaccgcggagctttttcagctcgcggaccgagtggctcgtaaggaggaggcatggacctggaacccctccgattccggtgtggcagcttcggccgcccccggatccgccgctcagatagggcggcgtgacaggaggaggaagaagaggtcagcccataccgacgacgagggtcatgtcctcgccgtcgagggcgcttcgcgggccacccagtagggagcgcccaaccggcaagtggtgcatcgtccacaacacctcccttcacgacctcgcggactgccgcgcagtcaaaagtttggctgagcggacgaggaagtaggaggaggagaggaggcaggagcgccgagagggcaagtccccggcggttccttccggcaatcggcgaagtgaggccaagcagaaggcccccgccgaggacatcgatgacggcgatgatgacctaggtttccaagagcctggggccaccattgccaccgtcgatgggggagcgtgtgctcacgtttctcgccggagcttcaaggccatgaagcgagagcttctggccgcggcccctactcatgaggcgacgtgtcgggcgcggtggtcggaggttgccctcaccttcgaccagaccgaccacccaccgtgcgttgcccggggagggcagattgcgatggtggtttctcccaccgtttgcaacgtgaagttggagcgtgtcctcattgatgggggagtggccctcaacatcctttcccctgcggcctttgacgccatcaaggccccggggatggtgctccggccgtcccagccaattatcggtgtgacgccggggcacacgtggccgttaggtcacatcgacctaccggtcaccttcggtggatccgccaacttccgcatggagcgggtgaacttcgatgtggcggacctcagtctgccctacaacgcggtcctggggaggcccgcgttggtgaagttcatggcggcggtccactacgcctacctacagatgaagatgccgggccccggtggccccatctctgtccatggcgacctcaaagtcgcgctcgcttgtctggagcagcgcgcggaccacctcgccgctgcgtccaagcccgagggtggcgacgagaggcttggcgcctccgcccccgccaccccgaggcagcggatgatcacaggcgacgaggtcccggtcaaggaggttgccctgggcgacggcccgtccaagaccacacggatcggtggtcttttggacggcaaataggaagacgcgctcgtctccttcctacgggcaaacgctgacgtcttcgcatggagaccggcggatatgcccggggtccccagggaggtgattgagcaccgtctcgccgtgcggccgggcgcaaggccggtccggcagaaagtgcggcggcaggccccggaacgtcaagccttcatccgcgaggaggtggcgcgacttctggaggccggattcatccgtgaggtcttccatccggagtggctggcgaacccggtggtcgttcccaaggcaaacggcaagcttcggatgtgcatcgactacaccgaccttaacaaggcatgtcctaaggatccttaccccctgcctcgcatagatcagattgtcgactccactgcggggtgtgaccttttgtgttttctagatgcatactctggttaccatcagattcgcatggctagggaggatgaggaaaaaactgcgttcattacccccataggaacctattgttatacgacaatgcccttcgggttaaagaatgcaggtcctacttttcaacgtactactcgaatttctttgggtagccaattaggacgtaatgttgaggcttatgtcgatgacttggttgtaaagacgcgcaaccaggaaactttactctcagatctagcggaaacttttgagagtctccgctccgcccgcataaaactaaaccccgataagtgtgtgttcggtgtacctgcgggcaagcttctcgggttcttggtctctgcccgaggcattgaggccaatcccgagaagatacgggctatagagcggatgcgcccccccagcaaacttagggatgtgcaatgcgtcaccggttgcatggccgccctaagtcggttcatatcgaggctgggagagaaggcgttacccttatttaagcttctcaaacgctccggaccgtttacctggacggaggaagccaaaaatgccctcactcagttgaaggcatgtctaagctctcccccagttctggtcgccccggagccagacgagcccttgttactctacttagcggcgaccccgcaagtagttagtgcggcattggttgtggagcgcgatgaggacaattctcatttcacgcctccccaccctgtgccgacttggcccgggagagagcagggaggagaggctcccgagccgaacggtggcccagggcccccgacgaccggagttggccctctgcccgcttgtcagacggtgctaggagcccccgacccccaggaaggccctgaggccactgtgggaaggccgcacctatcgccctttgaccccgaggctaaccctgtgctgactcgacccgggaaagagcagggagaagaggcccccgagccgaacggaggcctaaggcccctgacgaccggagttggccctttgcccgcttgtccgacgacgccaggagcccccgacccccaggacggccccgaagccactgtgggaaggccgcccctgttatcctccgaccccgaggtcatcagcacagaagacaagtgcgccccgcgaggctgcttggacgaagagtgccccagggatgcggcccctagcgaagaggatcggccccaccgaaaggtgcagcggcccgtctactttgttagtgaggccctccgggacgccaaaacccgataccctcaggcccagaagatgctttacgctattctaatggcctcgaggaaactgcgccattatttccaggcgcatcgggtcacagtagttacgtcttaccccctcggtcaaatcttgcataatcaagagggtacaggacgggtggtgaaatgggcaatcgaactttctgagttcgatttgcactttgaaccacgccacgctatcaagagccaggccctcgccgattttgtggcagagtggaccccggctcccgagcccgtctcgatccccgaggccagcacggacccctcgcagctgcctcacaccgcccactgggtgatgcagttcgacggctccctgtctcttcagggcgccggtgcgggggtcacgttgacctctccgagcggagacgtcctcagatacttggtccgcctcgactttcgagcgaccaataatatggcagaatacgagggactccttgccggactaagagtggcagctggactggagatccgccgcctcctggtgttaggcgactcccagctggtcgttaaccaagtctgtaaggagtaccggtgctctgacccgcagatggacgcctacgtgcgccaagtacggcgtatggagcgccattttgacgggattaagcttcggcatgtgcccagacaggataacatgattgccgacgaactctcacggctcgcgtcctcgcgagcccagaccccaccgggcgcctttgaagaaaggcttgcccagccgtcggcgcgacccgaccccttaggggagacggatgcgcctgatcggcccccgaggcccgtcggagtccaggcctcgggacccgaggggagtgctcccaactcccttagattgattgcttggatcgccgagatccaagcatacctcacagataagactctacccgaggaccgcgaagggagtgaacgcgtccatcgcatctccaaacgctacgtgctggtagaagggaccctctatcggcgcgcggctaatggaatcctcctgaagtgcattcctcgggaacaaggcgttgtgcttcttgccgatatccatgaaggcgaatgcggagcccactccgcctcgcgcaccttggttggtaaagcttttcgccagggtttctattggccgacagctcttaatgatgcggtcgacctggtccggcgatgtagagcgtgtcaattccacgccaagcaaatccatcagccggcccaggccctgcagaccataccactttcgtggccgtttgctgtctggggactcgatatcctgggaccgtttaggcgggccccaggtgggtttgagtatctgtatgtcgcgatcgacaggttcactaagtggcccgaggcttatccggtcgtcaagatcgataagcactccgcacttaaattcattaagggcatcacggcccggtttggagtgcctaaccgtattattacggataatggcacccaattcactagtgaactcttcggcgactactgcgaagacatgggcatcaagctctgcttcgcctcacctgcccaccccagaagcaatggccaagtggagcgcgccaatgcggaaatcctcaaaggccttaaaaccaagaccttcaacatactcaagaagcacggcgattcatggatcgaggagttggcagcagtgctctgggcaaaccgaactgcaccaagccgagcaaccggggaaacgcctttcttcctcgtctacggcgcggaagcggttctcccatccgagctcactctgaggtctcctcgggctaccatgtattgcgaggctgatcaagatcagcttcgcagagatgacctcgactacttggaagagcgaaggcggcgcgcggccctccgagccgcgcgctaccagcagagcctgcggcgctaccatcagcgtcacgtccgggcccgatcactctgcgtcgatgacctcgtcctacgccacgtccaaacgcgtgctggattgagcaagctttcaccaatgtgggagggtccgtatcgagtggtcggcgtcccccggccgggctccatacggctggccacgggcgacggcactgagctgcctaacccgtggaacatcgaacaccttcgtcgcttctacccctgaggggggggtcgggtgtcaggtttcgggctcgggccaaccccgcaccccctcgggcgtgtagggttggccgggggctgccacacatgcacattgttatttcttttttttttcagtacttcaataaaagcagtttcaatttcctaaaggctgtatctgtgctgttttttccttttgaaaaatcttgacttgaaataggtcactcgtgctcaatcctgccctcggaggctcgggtcggctaaaatcgtcaaacggggcccagaaccgagccgtgccccgaggcgtggtgaactccgggggggaatcggcaaaaacccacaatcgggtcacccataaccctcggtcaccacgttcccggcctggccagtctcgacatgtggatctccccaggcactagccccgacccgcgccttttgaggaccagaacctgggcacaagcccttattcaagctaagacacaaaaggaccacggcacagatcatcctcatctcatactcacagcaagatgaaattaacacaaaaatttcttcatttttgattacagattaagttgatctatacaaaaaagaggcccgaaggccttagaagaaagaaaagaagaaaaaactgaagaatggcgggggtctgggggctcaatccgatgcgcccggatcgccggcctcgtcgtcactgtcgtctgcaccaccggcattgccctcctcgtcggagttgggggcgaacgcgagccgaggggccgagccctcgaagctgtcgacgatatggtcggcggcatcccggacctgcgcgcgtgcgcggtcctcggtcccaggagggaactcatccagcgccatccatggagagaaattggggtccctggcctggtaactcgccaggacgagctccaccgctccttgggcgaggtccctcgaggatgacttaattgtcttctcgagctcctcggggagccgttggagagccccggccatcttcgagaggcgctgggcgaggcctccctggttggcggcatactttacggtccgccctctccagaggcccacttgccgaccggcgcgatctaggcgggagacggcgtcccaaagcatgccgggccctacctcgcctgccaagcggagggcttcgacctccccggcggacgagtccagcgcgccctgcagatcggcgatggtgcgttcggcagctgcgaggcgggcggctaagtcgctttcgcccgtggccgccccgccgctgcgcgccctcgcgtccagctccttcgcccgcgcctcaagctcagcggcccgttggttcagtacggccctctcggcgcgggcaccttccagattgcggcgcgcctgctcctcctgcgctgcctcgcggagggacaggctgaccgccagctgttgcgccgcggcctcggccccctcgagagctcgctcccgctcagtgagcgcgtcctcgcggaggcggagcgtgaactcttcttcggcgcaggcagcctcgtgcgccgccagcgttgcttcccggatggtgacggcggcctcgcggtccgccagatccctctccacgacgcaggcgcgctcttccagcgccatggcgcgcgcctcaagggcctcttcacgccgccgggacgccgcttcggtctccgccgcccgctgttctcgggcagcggcagcgtcaagcaccccctgggcggcgtcgagcttcttccctagctccgcctcccagctcccgtattgaaggcggagggtgtcctgcgcctcgttcatcacggtggtggcaatgagggcagccccccgctcctcctccacttccttggcgatctccgccagcaccttcttacgagtttcaagctccgagacgtgtcggcggtgagccttacggcccacctccaccatggcctccaccgagcgtcgcccctcttcgacacgcgcccatgcggcgtcgagctccgcccgctctgcctgcaggacctccacctgggcacttaacccatccaacaccgtggtgtttgcggcggccaaggcctgcagaaggggctctgcgttcagtggggcgatagaaggcgtggggaagagccgccttggagaggatgccacgcggctcgggccgccgatggaagtgccggactcggggatgtcccccggacccgtttggtcctgagcgtcgcccgagggagtgggcccaagcgacgcgcccgcagcctcgtcgccagctgccccggaagttgtcgcctgagcgtcacccgagggagtgggcccaagcgacgcgcccgcggcctcgtcacgagctgcctcggaagtcgccatcgcctcgtcctggcgaaatccggcctcctcccgagcggcttccccggcctggcaggcccgggcggcctcctcccgagcggtttcctcggcctggcgagcccgggcggcctcttgggcggcctcctcggcttcccgtaggcgatccgcggcctctcgccggtcagattcccgcctgagggcctctgcggccgccggatcctcggcctcagactggccggacttggaatggcgggagggacgcgacgggatctcgctgaaacaaaagaaaaaaaaccagaagacgaacaaggtgggtgagtgaaaactcgcgttgagagaatgaatacagccacgatgggtgagagatgaacctgcgaggaggtcggttaaacgaccactttggaggggaaatgaggtttccccgagatggttctgtctcccccatcttacggggccgcttcttcttgcgctccccctcgggctgcgatgttggcgcggccccctccgggcgcctgctgctggcacgcgccgccccgccccctcggggaggagatgggggaggtgttcctccctgcttcctcttcccccgggcgtcggcagggcggctgctccccgggcccctgtcgcgggacccagaagcacgaccccctctcggggtagattgttcccccctgcggctcccgcccgcgccgtcgtggccctttggagctcgctcctctgaggccccaaccgccatcataatggtcaggatggaggcgcggtctggatcgctgcagagggggaggattccttggggaatgagggccgcctctacggagttgagattcagcacccgttggaccaatatcttgaagtcctcaggagcccagtcccatctcactccctggtgggtccttgtgaagtcttcggacccggtgtactcccaggcgtcccgagcgcgtcgctggagcggcgcaatccgacgacggaggtagtcgccgtacaccatggcccctgtgagcccctgggatcgcaggcccgccaggcggtcgaggacggcgtcatagccatcccccagatctaccggcgcccgccagctggaggcctgcgccgggggctggctcggaagtcggaggcgcgcttcgtcggcgaggggagtgtagaaccagtcgctcttccagtcgtcccacttcttgcggagggcgcaggggatgtagcggttcagcaccggcccccgtggctggaagtagcagccaccaactaccgatggcggcgacaccgactgcacggtgaagaaccaccggaacagccgaagagatgggcgcaccccaatgaacatctcgcacagatgcgcgaagatggccaatgtcatcaccgcgttgggggtgaggtgcgccatctggagatcgtagaactccagaacatccatgaagaaagaagaaaatggcggaaccagccctgccattgcaaaggggagaaagaagacggaccgccccgggtagtctggcgccgggcgtccctcgcccagcgtgactatctcccggccggtggcagattccggcatgaagcggcgcgacagcccagcctgcctctcgctcacgatgcgggaaggcggcagcacgctaccatcaagcagagcggagccccgtgccatggcgccggaggaagagaagattaagagcgagcgcgtgtggcgaaggtagggcacaggaaagaaggagttagggcgcaagcggcgaagacaaggggaataatggcgaaaggaaggaaacagatcccttcctcagtgcctttatactcttgccaacgctgtgcccggctcctcgcttctcgcgcccactatttcgccccctcgtttctcgcgcccacgcttccactaatcccattcgcccgcttgcggcgcatgaggtggatatgcggttgtggcagtcgagatagatcatatcgtgcgcgcgttaattacgctcgccgaccgaagcgacgttaccatatctccagacgaaacgaatcgccatgtcaagattcgtgtgctactcaagtaatgtggcagtcttgaagagactgctcattgttgacagccgaattaccattgccgatgtgcgtggtttgtgaccgttgggtttctgcccaattgtggagaccggtcccacctgtcaccaggccttaggagtggcgtcacgcccgaccgtttcccttaaagagggcgatcgccctggcataacgccgggggctactgtcggtgacatgggatcaggagtatcatgactagaggtttgaggcagacacaatcgcacacgtggcctggcacccccgagggacgtcgggcccgagggtgatgtgttcgccctcctcttagtccccccgagggggtcgggccacacccgcctcggccccgagggccgaggcaccccgacccctcgtgggtttttgctccgcgtgtatgggttagg

SEQ ID NO: 8472 - DNA, 12275 bp, Oryza sativa
cctgcagccccacgctggttccggctagggacgagtgcctagagactctcatcctgacgggacggggcgaggcgtgtgtcagatcgcctgttgccacctaacccgcaatctgaccgatctgtgaccggtcacagaccggataaacgagcgtgccatactgcgctacatgtggcgtgacgcgctcgtccaaaccgcaataaatgcggttaggtgagccccgctatgcttacctaccccatatacgcggcgcaaaacccacaaggggtcggggcgcctcggccctcggggccgagacgggagcggtccgacccctcggggagacaaagagaagggcggccgtatcaccctcgggcccgacccccccgagggggttaggccacgtgggtgatcgtgtctgcctcaagtctctaagtcatgatactcccggtcccatgtcaccgacagtagcccccggcgttatgtcagggcgatcgccctcctcgagggaagcggtcgggcgtgacgccactttctaaggcctggtgacaggtgggccggtctaaaaatcgggacaagccggttcgtttttcctggagatatgatgatggcgcttcggtcggcgagcgtaattaacgcgcgcacgatatgttccatctcgactgccacagccgcatatccacctcatgcaccgcaaacgggcgaatgggattagtggaagcgtgggcgcgagaaacgagggggcgaaatagtgggcgcgagaaacgaggagccgggcacagcgttggcaagggtataaagtcgccgaggaagagatttgcttccttcctctcgctattattccccttgtcttcgccgcttgcgccctaactccttgtttcctgtgccctaccttcgccacacgtgctcgctctcaaacatctcttcttccggcgtcatggcacggggctccgctccgcttgacggtagcgtgctgccgtcttcccgcatcgtgagcgagagacaggccgggctgccacgccgcttcatgccggaatctgccaccggccgggagatagtctcgctgggcgagggatgcccggcgccacgctacccggggcggtccgtcttcttcctcccttttgcaatggcagggctggttccgccattttcttctttcttcatggatgttctggagttttacgatctccagatggcgcacctcacccccaacgcggtaatgacattggccatcttcgcgcacctgtgcgagatgttcatcggggtgcgcccatcccttcggctgttccggtgattcttcaccgtacagccggtgtcgccgccgtcggtggttggtggttgctacttccagccgcgggggccggtgctgaaccgctacattccctgcgtcctccgcaagaagtgggatgactggaagagcgactggttctacacccccctcgccgacgaagcgcgcctccgacttccgagccagcctccagcgcaggcctccaactggcgggcgccggtagatctgggagatggctacgacgccgtcctcgaccgcctggcgggcctgcgatcccaggggctcacaggggccatggtgttcggcgactatcttcgtcgccggatcgcgccactccagcggcgcgctcggggcgcctgggagtacaccgggtccgaggactgtatgaggacccaccggggggtcaaatgggactgggtccccgaagacttcaaggtaatgatccaacgggtgctgaatctcagctccgcggaggcatccctcatcccccaaggagtcctccccctctgcagcgatccagatcgcgccaacatcctgtccatcatgatggcggtcggggcctcagaggagcgagctcctaagggccatgacggtgcgagcgggagccgcaagggagatcaatctaccccaggagggggttgtgcttccgggccccgtgatgggggctcggggggcagccgccctgccgacgcctgagggaagaggaagcaagagggtacttcctccccatctcttccccgagggggcggggcggcgcgtgtcagcagcaggcgcccggagggggccgcgccgacgccgcagcccgagggggagcggaagaagaaacggctccgcaagatgggggggacagaaccatcccggggaaacctcatttcccctccaaggtggtcgtttaaccgaccccctcgcaggttcgtcccacgcccattgtggctgtattcattcttccaacacaagttttcattcacccaccttgtttgtcttctggcttttcttctgcttcagcgagatcccgtcgcgtccttcttgccaattcaagtccggccaatctgaggccgagaatgcggcgaccacggaggctcggaggcgggaatctgaccggcgagaagccgcggatcgcctacgggaagccgaggaggccgcccaggtggccgtccgagctcgccaagctgaagaagccgctcgggaggaggccagacttcgccaggccgaggcggcgacgacttccgaggcagctcgcgacgaggccgcgggcgcatcgcttgggcccactccctcgggcgacgctcaggacaagccaggtccgggggacatccctgagtccggcacgtccatcggcgggccgagccgcgcggcatcctcaccgaggcggctctcccccacgccttccgctgccccactgagcgcagagcctcttctgcaggccttggccgtcgctaacaccacggtgttggacgggttaagtgcccagatggaggccttgcaagcagagcgggtggagctcgacgccgcatgggcacgtgtcgaagaggggcgtcgctcggtggaggccatggtggaggtgggccgcaaggcacaccgccgtcacgtctcagagctcgaagcccgtcggaagatgctgggggagatcgccagggaggtggaggaggagaggggggctgccctcatcgccactaccgtgatgaacgaggcgcaggacgacctccgccttcaatacgggagctgggaggcggagctagggaggaagctcgacgccgcccggggggtccttgacgctgccgctgcccgagaacggcgggcggcggagaccgaggtggtatcccggcggcgcgaagaagcccttgaggcccgtgccatggcgctggaagagcgtgcctgcgccgtggagagggacctggcggatcgcgaggccgccgttgccatccgggaggcaacgctgactgcgcacgaggccgcctgtgccgaagaggagtccgcgctccgcctccgcgaggacgcgctcaccgagcgggagcgagctctcgaggaggccgaggccgcggcgcaacggctggcggacggcctgtccctccgtgaggcagcgtgggaggagcaggcgcgccgtaatctggaaggtgcccgcgccgagagggccgcgctgaaccagcgggccgctgagctcgaggcgcgggagaaggagctggacgcgagggcgcgcagtggcggggcggccgcgggcgaaagcgacttaaccgcccgcctcacagctgccgaacacactatcgccgatctgcagggcgcgctagactcgtccgccggggaggtcgaggccctccgcttggcaggcgaggtagggcccggcatgcttcgggacgccgtctcccgtctagaccgcgccggccggcaggcgggcctctagggcgggcggactgcgaagtatgccgccaaccaggggggcctcgcccagcgcctctcagagatagccgggactctccaacggctccccgaggagctcgagaggacgattaagtcatcctcgagggacctcgcccgaggagcggtggagctcgtactggcgagttaccaagccagggatcccgacttctccccatggacggcgctggacgagttccctcccgggaccgaggacggtgcgcgcgcgcaggtccgggacgccgccgaccatatcgtccacagcttcgagggttcggcccctcggctcgcgttcgccctcaactccgacgaggaggacgatgacggcggagtgggcgacagtggcgacgaggctggcgacccgggtgcatcggagtgagcccccaggcccccgccaatctttaaatagtttcttcttttcttcttccgaggccttcgggcccccttcttgtatagactaatttaatctgcaatcaaataaagaggaaattttttgtgtcaattctatttgttgtgtgtatgagacgaggatgtctgtgccgcggtccttttgtgtcttggcttgaacaagggctcgtgcccaggtcctagtcctcaaatggctcgggtcggggctagtgcctggggagatccacatgtcgagactggccaggccgggagcgtggtgaccgagggttatgggtgacccgattgtgggtttttgccgattcccccccggagttcactacgccccgaggcacggctcggttctgggccccgtttggcgattttagccgacccgagcccccgagggcaggattgaacacgagtgacctatttcaagtcaagatccttcaaaaggaaacaacagcacagatacagcctttaggaaatcaaaaatgcttttattgaaatacagatataagagaaataagaatatgcatatgtggtagcccccggccaaccctgcacgcccgaggggggtgcggggttggcccgagcccgaaacctgacacccgatccccctttaggggtagaagcgacgaaggtgttcgatgttccacgggttaggcagctctgtgccgtcgcccatggccagccgaacggagcccggccgggggacgccgatcactcgatacggaccctcccacattggtgagagcttgctcaatccagcacgcgtttggacacggtgtaggacgaggtcgtcgacgcagagtgatcgggcccggacgtggcgctgatggtagcgccgcaggctctgctggtagcgcgcggctcggagggccgcgcgccgccttcgctcttccaagtagtcgaggtcatctctgcgaagctgatcttgatcagcctcgcagtacatggtggcccgaggggaccttagggtgagctcggatgggagaaccgcttccgcgccgtagacgaggaagaaaggcgtttccccggttgctcggcttggcgtggttcggttcgcccagagcaccgctggcaactcctcgatccacgaatcgccgtgcttcttgaggatgttgaaggtcttggttttaaggcctctgaggatttccgcatttgcgcgctccacttggccgttgcttctggggtgggcaggtgaggcgaagcagagcttgatgcccatgtcttcgcagtaatcgccgaaaagttcactagtgaattgggtgccgttatccgtaataatacggttaggcactccaaaccgggatgtgatgcccttaatgaatttaagtgcggagtgcttatcgatcttgacgaccggataagcctcgggccacttagtgaacttgtcgatcgcaacatacagatactcaaacccgcccggggcccgcctaaacggtcctaggatatcgagcccccagacagcaaatggccatgaaagtggtatgatctgcagggcctgggccggctgatggatttgcttggcgtggaattgacacgctctgcatcgccggaccaggtcgaccgcatcattgagagctgtcggccaatagaaaccttgacgaaagactttaccaaccaaggtgcgcgaggcggagtgggctccgcattcgccttcatggatatcagcaagaagctcgacgccttgttcccgaggaatgcacttcaggaggattccgttagtcgcgcgccgatagagggtcccttctatcagcacgtagcgtttggagatgcgctggacgcgttcacttccttcgtggtcctcgggtagagtcttatctgtgaggtatgcttggatctcaacgatccaagcaatcaatctaagggagctgggagcgctcccctcgggtcccgaggcctggactccgacgggcctcgggggccggtcaggcgcgtccgtctcccctaaggggtcaggtcgcgccgacggctaggtaagcctttcttcaaaggcgcccggtggggtctgggctcgcgaggaagcgagccgtgagagttcgtcggcaatcgtgttatcccgtctgggcacgtgccgaagctctatcccgtcgaaatggcgctctatacgccgtacttggcgtacgtaagcatcgggtcagagcaccggtattccttacagacctggttaacaactagctgggagtcgcctaacaccaggaggcggcggatccccagtccagctgccaccctgagtcccgcaaggagtccctcgtactctgccatattattggtcgcccgaaagtcaaggcgaaccaggtatctgaggacgtctccgctcggcgaggtcaatgtgacccccgcaccggcgccctgaagagacagggagccgtcgaactgcatcacccagtgggcggtgtgaggcagctgcgaggggcccgagctggcctcggggactgagacgggctcgggagccggggtccactctgccacaaaatcggcgagatcctggctcttgatagcgtgacgtggttcaaagtgcaaatcgaactcagaaagttcaattgcccatttcaccacccgtcctgtaccctctcgattatgcaagatttgggcgagggggtaagacgtaaccactgtgacccgatgcacctggaaataatggtgcagtttcctcgaagccatcagaatagcgtaaagcatcttctgggcctgagggtatcgggtcttggcgtcccggaggacctcactaacaaagtagacgggccgctgcacctttcggtggggccgatcctcttcgctaggggccacatccctggggcgctctttgtccaagcggcctcgcggggcgcactcgtcttctgtgccgacgacctcggggtcggaggacgacaggggcggccttcccacagtggcctcggggccgtcctgggggtcgggggctcctggcgtcgtcggacaagcgggcaaagggccaactccggtcgtcaggggccttaggccaccgttcggctcgggggcctcttctccctgctctctcccgggtcgagtcggcacagggttagcctcggggtcagagggcgataggtgcggccttcccgcagtggcccccgggccatcctgggggtcgggggcacctggcaccgtctgacaagcgggcagagggcctgctccgattgtcgggggccttgggccaccgttcggcttgggggcctctcctccctgctctctcccgggccaagccagcacagggtgggggtgcgcggaatgaggattgtcctcatcgcgctccacaaccaacgccgcactaaccacttgcggggtcgccgctaagtagagtagcaagggttcatttggctccggggcgaccagaactgggggagagctgagatacgccttcaactgagtgagggcacgttcagcttcctccgtccaagtaaacggcccggagtgtttgaggagcttaaataagggtagcgccttctctcccagcctcgatatgaaccgacttagggcggccatgcaaccggtgacgcattgcacatccctaagcttgctgggggggcgcatccgttctatagctcgtatcttctcggggttggcctcaatgcctcgggcagagaccaagaacccgagaagcttgcccgcaggtacaccgaacacgcacttatcggggttcagttttatgcgggcggagcggagactctcaaaagtttccgctagatccgagagtaaggtctcttggttgcgcgtctttacaaccaagtcatcgacataagcctcaacattacgtcctatttggctacccaaagaaattcgagtagtacgttgaaaagtaggacctgcattctttaacccgaagggcattgtcatataacaataagttcctatgggggtaatgaatgcagttttttcctcatcctccctagccatgcgaatctgatggtaaccagagtatgcatctagaaaacacaaaaggttgcaccccgctgtggagtcgacaatctgatctatgcgaggcagggggtaagggtccttaggacatgccttgttaaggtcggtgtagtcgatgcacatccgaagcttgccgttcgcgttgggaacgaccaccgggttcgccagccactccggatggatgacctcgcggatgaatccggcctccagaagtcgcgccacctcctcgcggatgaaggcttgacgttccggggcctgccgccgtactttctgccggaccggccttgcgcccgaccgcacggcgagacggtgctcaatcacctccctggggaccccgggcatatccgccggtctccatgcgaagacgtcagcgtttgcccgcaggaaagagacgagcgcgtcttcctatttgccgtccagaagaccaccgatccgtgtggtcttggacgggccgtcgcccagggcaacctccttgaccgggacctcgtcgcatgtgactatccgctgcctcggggcggcgggggcggaggtgccaagcctctcgtcgcctccctcgggcttggatgcggcggtgaggtggtccgcgcgctgctccatacaagcaagcgcgactttgaggtcgccatggacagagatggggccaccggggcccggcatcttcatctggaggtaggcgtagtggactgccgccatgaacttcaccaacgcgggcctccctaggaccgtgttgtagggcagactgaggtccgccacatcaaagttcacccgctccgtgcggaagttggcggatccaccgaaggtgaccgggaggtcgatatgacctagcggccaagtgtgacccggcgtcacaccgataatcggctgggacggccggagcaccatccccggggccttgatagcgtcaaaggctgcgggggaaaggatgttgagggctgctcccccatcaatgaggacacgccccagcttcacgttgcaaacagtgggggaaaccaccattgcgatctgtcctccccgggcaacgcacggtgggtggtcggtctggtcgaaggtgagggcaacctccgaccaccgcgcccggcgcgtcgcctcatgagtaggggccgcggccagaagctctcgcttcatggccttgaggctccggcgagaaacgtgagcacacgctcccccatcgacagtggcaatggtggccccaggctcttggaaacctaggtcatcatcgccgtcatcgatgtcctcggcgggggccttctgcttggcctcacttcgccgattgccggaaggaaccgccggggacttgccctctcggcgctccgcctcctctcctcctcctacttcctcgtccgctcagccaaacttttgactgcgcggcagtccgcgaggtcgtgaagggaggtgttgtggacgatgcaccacttgccggttgggcgctccctactgggagcgccggcctccttctttttgtcgctcgcaggcctcccctttcgggtggcccgcgaagcgccctcgacggcgaggaaatgaccctcgtcgtcggaatgggctgacctcttcttcctcctcctgtcacgccgccatgtccgagcagcggatccgggggcggccgaagctgccacaccggaaccggaggggttccaggtccatgcctcttccttacgagccactcggtccgcgagctgaaaaagctccgcggtagtctggggctctttggaggcgatcttttcgagcatgcggttgtgccgcacaccccccctgaacgcgtagatcaccgcgtgtgcagggatgcatggtatggtgttgcggacttgacagaaccgctgaatgtatgagcgaagtgactcatcatcccttcgctggactgcatgtaagtccgcttcttcacctgggcgcggatatgtgccttgaaagttcatggtgaactgttggcacaaatcctcccaagagtggacggacgcgggtggcaagttcattagccaaccccgtgcctgtcccttcagggccatgggaaagaaattcgccatgaccctgtcgtcacccccggcggcctcgatcccggtcgtgtagacctggagaaactcggcggggttgacgctcccgtcatatttttcggcgatggtgggccggaaccttgggggccaacggacgttccgaaggctcgccacaaaggctctacagccgacaccaccaaccgggggcacggagggctgatccccgcgtccgtgttgaggtgacactccagacgaggaggcgccctccgttgcgtgggtagcacgtcggccattacgccggcgctcgatactgatgcgggcatccggccccccacgcagatcttcccgggtcggaggcgctgacgaaggagtggcggccgaatggcgaacagcggccgccgctcgccgcgccctccgtcttgacgacgtggagccggtggtagcagtaccagaggtcttggtggcggaggaccgcccaccagtatctaggcgctgccgcgccgtcatgaccaagttggccacgtcgtccagccaacgttgggctggagactccgggtcagggacaatgggcgggtgacgtaggagcgcgcccgcagcttggagcgcgccctggggcgtgctgccgtcgccgtagacgaggaggcgacgctccccatctcgccgcccttccccatcacccgtggatgtcgaagtcgcggatccttcgaccctctcgagcgcctcctcccgcctaggactttggcgtggagggggcggtggagtacgagctcgacggcgtgggttcggctccccgtcgtcaccgctaacactcggagagaggttgtgcgcctttgcttgttcggccattgggctgaacaggaaaagcttggcgcacacgaaagaatgcgagaacttagaaaaacacacgcagacccccctacctggcgcgccagatgacggagcgtggggctcctcaccgggagaccgcgcaggcccccctttgccggttcggccgggggccctgggtgagattctaagctcctagtctgtggaaagttcgcgagaatggaaaaagcacaagacacgggcgatgtatacaggttcgggccgctgagaagcgtaataccctactcctgtgttctggtggatctgtgtatgaagaagctacaaagagctggagagccagagagctcttattctaaaaaccctcttctccctttttttttctcgtgggatctcctctccagatcatccccccttccagccccctctcttaagtgggcaaggttctccttttatatctcaaggggataccacatgcaccacttctccttctctctctttttgggtgggggcccatcctatctatagtaaaacttggcttgccttctcttggaagctgaaacactgcctgtttttgagtgtggccacgcgtcctcgttcgtctgacctcggggatcaccctgtcatctcttcataaatgggcggagatttgcaacagctgctgcccgagtgacccttctgacgggacggcccatacctacctccactccgccggaagcaggtgcaacgtgggaacacggttgtcttccggcgacataaccagtgtcagaccagtcacagaccggtcacctttgtccaccacgtgtcagtttagcaatctgcatgttcgcccttcttcatacaacgtcttgcttataatggttgggataaagcctggcatatatctgaccaggaccaacgtgccatctccaggagctagcacgctggctccggctagggacgagtgcctagagactctcatcctgacgggacggggcgaggcgtgtgtcagatcgcctgttgccacctaacccgcaatctgaccgatctgtgaccggtcacagaccggataaacgagcgtgccatactgcgctacatgtggcgtgacgcgctcgtccaaaccgcaataaatgcggttaggtgagccccgctatgcttacctaccccatatacgcggcgtaaaacccacaaggggttggggcgcctcggccctcggggccgagacgggagcggtccgacccctcggggagacaaagagaagggcggccgtatcaccctcgggcccgaccccccgagggggttaggccacgtgggtgatcgtgtctgcctcaagtctctaagtcatgatactcccggtcccatgtcaccgacacaatactactaaataaatgaaaatgcctcaaaataaatactaaattttagtttccaaatttaatttaactaatacaactaataggctacagtaaaaaagcaagtgctgagggcacccg

SEQ ID NO: 8473 - DNA, 2077 bp, Oryza sativa
taagaatccaggtcctgtaaaaaatactaagcacctagcatgctgggactccttttctttttcctataggggaattcaacttttggacaaaacatatgaatgaatagaattggcgagtgcagggccatgcttctaatcattcattatataatttgtatcatatttgagggggaaactatattgtagcttcttaagtaatcttatttaattcatggcaggaaaatacatacttgacacttcttactgcaagatcagacgccttttatgatctgaaagattccaggtgagctatacaatcaagtgaccacgtctcttaaaaatatcatgatgcctgagcatgtcctgtcttaagtgtatatggaattaatttcctttcccttttatgaacattgtgtaggtcccgcattcagaatgttctcttgaaggcaaatgtccttgtggaagtccaaaggtctctgcgtgagagcgcactgcgcattgaagatctccctgctgatccatcttctcaatctgtatcaccacctccacagttctctcaagatctgcactttcagttattatcttctgaaatggcaattggtggaccagctggactttggcattttatatataaaagcatttaccttgatcaatatgtatcatctgagttccccttaatcataagcaatccaaagcaacagaaaaggtattgtattttgatttatttattaaatacaattcactgtttgtttttcatacgtatgatattttctataaaattaatattcaactgatatgcgcagattgtacaaagcttatcaaaaattgtatgcttccatgcatgataaagcaactggtccacataaaacccaattcagaagagatgaagattatggtgagttacccagcaatttaattacccttgtttgaagagatatcattgacagatacagcatttcagttaagtttgttaaccagacggtggtgtttgttgcacatttgtgagtagaatctgtatagttttataccacataaaagatgaaatgtgcaatccattattagtcaattctgatgctcaattatttttataatgcatacgagttataatagccactgataagatacctgtggggattcaggtttctgctcatcaaattgttttcatgaaaaagagaagtagacaatctacgaagaatgataaagatagatgttattatacggtgataagttgtcattggatccattttagttctatggtaattttgttgggttttccagcatgagccatttgtgttgatgcatgtgtcctgcaaacaaactgacctagaagttataagattttagcttgatttttgctttgcacgttgcattttgtgacgtagagggcccatttgtcagtcttccatgtagaattgcaatacaaaattatatttattaagttttgattccagttgctttgaatctgtgacccataaaggttctgtaaagtctcacgaacatgacctatagcccttgtataactggaatgtcagcttctgttagcattactaaacaaaacataggtgtgaaatccttcttgaaataattttaaatctggggagtatacaatgataagggatgtaattgcttttctcttctgtaagatttggttatgaacgtttgcaagcccatgcatatgtcatcatggtgttcttgggtttactagaattactgagtaatgatattctccgtgtgctttataggaagacagtttgttaaagttataatttttttttgttgcagttctgttctgctggataacccaggattttgagttgtacgccgcttttaatccactggctgacaaggtttgtacctgtcacaatcagtttatgtatgctcacttgtgttttgtttgttgtggtaaatgctgtggtagtctaggcaccaggggaatggattaaggtaccatattcttggttgtatagcaactcaataattttgagcatacttattttgcagagtcaagcaatcaaggtatgcaatagagtatgccaatggatcagggacctggaaaacgaaattttcgtatacggagaaagcaccctttcctggtgat

SEQ ID NO: 8474 - DNA, 5138 bp, Oryza sativa
gttgttatcactgttttgaatagcttatagtggctttgcttcttttgttttgcatgtgagtcaagtatacatttgaatccacaattgtttttcttcatatagttgtccaatgagaatgcacagatcttgacatgaaaagttttacagtgagcttgttgaaaaatgaaaatcatgtggagctcatgcctggatttgtttttttttccttccctcagaaaatgtggctttctggcttttcaagaggaattcaggagatgcacaggaaggcttctttggttcttgaggatgcagtcaggaatatctatactgttgtggcattttgtgctggtaacaaaataatggaactttacagactgcagcttgggaatattctttggaaaagcttggttcatggaatgggtattggttttgcctttggcttatctcagttccttcttttcgcctgcaatgcacttctgctgtggtatacagccgtagctgttaagaatgggcaccttagtctggtaacagcacttaaagagtacattgtcttctcttttgcgacttttgcactggtggagccatttggccttgcgccatatattctcaagcgtcgaaaatctctgacgtcggtatttgaaattattgatcgtgcacccaagattgatccagatgatgcaagtgggctaaaaccccccaatgtctatggtagcattgaattcaggaatgttgatttttgctatcctacacgccctgagacgatggttttgagtaatttcagccttagagtcaatggaggacaaactgttgctgtggtaggtgtatctggatcagggaagagcacgataatttctttgatagagagattctatgatccaaccgccgggcaagttttattggatggccgtgatctgaagctgttcaacttgagatggttgcggagccacatgggtttagttcctcaagacccagttatattctccacaaccataagggagaacataatctatgcaaggcacaatgcaacagagtctgagatgaaagaggcggctaggattgcgaacgctcaccatttcattagcagtttgccacatggctatgacacacatgtgggaatgaggggagtggatttaactcctgggcagaagcagcgaatcgccattgcccgtgtagtgctgaagaatgcacccattttgctgcttgacgaagccagttctgcaattgaatccgagtccagtagagtggtgcaggaggccctcgacacattgattatggggaataagacgacagttctcattgcacatagggcggcaatgatgaagcatgtggataacattgttgttctgaatggtggaaagatagttgagcagggaacgcatgattcactggtgcaaaagaatgggttgtatgtcaagttgatgcaacctcatttcaccaaaggattccgtcaacgtagactaatataagaacccctggtagcatttgtacattgctcactctgcttcactaactagtgactggaaacgtggaaggcagcttggagacagtatgagatggtacaagtatttgtgttgcgatctgacaggataggcataggcattggcacaggctctggagtctggacacatgatattttaatttgctttgctgtaataaagctttgagatgaagagtccggaatagcatatagcatgcggcataaaggaggtgaagctgagatgcgctgtcccattgaatccactccaacattgacttgagagtttgatgagtccggaatagcatatagcacatggaattggtcaacattccatgtgctgcgctgcctgcctattcattcatttttgtaactgatcgttattagatcggatttgttcattgtgatagtgtgatgtagttttggcattttatttttgacacttaaatggaattcttggtgggggggggggggtgtgttgtgtagtttggtactgcattgaagtgtaattagggaagggatattatatttgttttggtggaagtagtagaagtaattttgggcataggtgtgctggaagtgggagtgggtaggtattcttgtttgatcatgtttaagcaggcgcactggtaattaatttgttgatacactcagtttggtaatggagcaaagctctgggttgttgaatggaatgatggggcggcggaagagttggttatatttccggttgtgtgtgttttgcccctctcttgtgtggttaatatctatatctatcctggtgtagtacatccctgtagtgtagggggaaagagagatgggagttagaaacacatcatgtgctagcaaaatgcgatagccaaagacgaaatgcggtttttggtgggtgtcagtcgcgtgcgtgctgaaacgaaggcacgagggatttactaatagtaaggaattgctggtataacatgtatgtatatgtagatttgaacccaagtgaatgaatgaaggactgtatgtagaggagaagagatccagggaagggagagaaactgtgtgtagtgtagccaaagggagccaacaaccggtctcgttccatcgaatccgaccgacggaggcgacccaacccagcaaagacacgatcgaatcgaatagagtacattctctacaggggaggggagcgagcgagcaaggaagaagaagaagaggcatcggcatcgcgtcgggaaggccccccatggatatggatcctcccaccaataaccctagcccccctggtccccccgactccccgccgccggagaagaggctcgcctccctctccctccgcacctctcacctccctcccgacttcgagatccacgacgactactacgacgactacgacgagggctacctcactgccgtctccagggtagggagcatcagcacctccgcctccgcctggaaggacgacctcgaagacgccgacgtggctccacccagccccagcagcagcggctacgccgccgagaggggcaccagcctggcctgcagcgccgccgccaacgacgatccccaaccccaacccgacgacgacgattggccccgcgacaagaagcatctcacgaggttttccatatcatatgcctcctccctccaatctccatggatcaccactccgcactaactacatcctctaatctggactaactactactcctgtactgtaccattattcccttctttttccaggacgatacttctgcttcatggcgcaaacggaaaaagcacttcttcatcttgagcaattctggcaagccaatttattctaggtattttcttttcttttataaaaagaagaacaaccacttatgcacaaaacaaacgaccctttgccaccctcacttaatgcattctctttccccttcaatttttccaccacttgtgcaaaaaacaaaccaattcttaggtatggagatgagcataagcttgctgggttttccgccacgttgcaagcaatcatttctttcgttgagaacaggtgtgtaatgatacccaatgatcacatttcttctattcttttctcttctcttgtggcctaaccttatctgtttgtctgtctgtcttcttcaattggtgctttcttttcggcaatgacctattgttttcattcattccagtggtgaccatatcaaatttgtaagggctgccaaacatcaggtgatgtgggcttcctgtccaaaacttgtatacttttatgccgcattcgaagataaatccaagcataattaacatggacttcttatttccaaatctttctaactcctacctattctccatctttcagatagttttccttgtcaagggtccaatatacttagtttgtataagttgcactgaagagtcatatgaaggattgaggggacaactagagctcatgtatggtcaggtgcttcccctgctgcattcatcctaacacaattaatttctgtgggcttttggttgtgattacacaaacttactttctaaagttctcatccagatttctctatctgaaaatttaatttgtagatgctgctgattttgaccaagtctgtcaacagatgctttgagaagaaccctaaatttgatatggcaccattgctaggtggcacagatgcagttttcctatcacttatacatgcattcagctggtcagttttgttttttcctttgcctgaaatattttacactctagttgcccaactaaatctcaccaaaccattctgcaggaatcctgctacatttcttcatgcgtacacatgccttcccctcgcccaatccacaaggcaggcggctagtgcagttttacaagacattgctgattcaggagttttgtttgcactgttgatgtgtgagcacaaggtttgtccattttcacgccagggaaaacttttactgggatattaaattatgtgactttttgggcataaatgaagtatttaagtttagtgtgctgaatttctgagcacaatttaggtaccacatgtccacattcatctattagagatgcgtatatactatatacaatggtatctctcgtcatttttattggttaaccaaacctgacatgtcttcaccttatgtccttaactatgctgaatttacaattctgttaaggtctttatgaggcgtcattcgttttgtcgccgtcccacgcttcagccaacaattatctgtagttctttgccctataattttacaaaaggatctgtatgtctcgctctttgttctgtctatctaggtttgttatgtgctgctagcatcccatcctgaggcaggctaagatagggcctgtcctcgatctttctcttcaatcctacttgttcgtgtttctgggatttcattctttgttatttttcaggttattagtctagtgggagcacaaaaggcaactttgcatcctgatgatatttttctactttcaaatttcatattgtcctctgaatcttttaggtaatcatcacgacacacactctgaaatggtaatctttactttgagacgttcttactacattttctttaatgcaggacttcggagtctttttcacccatatgccttccaagatacaattctatggctttcttatatgcttatgttcatttttttgatgtgagtcaaatatatcatctgaatatgtatgctttttaatctgtgtcgaaataacttataagtaca

SEQ ID NO: 8475 - DNA, 18123 bp, Oryza sativa
tttgttagcttgggttataacatgaatagacgttggactaggagttgcttagccatgcttagttcaactagtatataatggggaaaatcctgttaatgtttagactgttggttctaatggtattgttggattagtgccaccgctttggtgttattaattaaaataaatcacatggtgggctgtgggtgcatggttttgctggtcgcacccatggcagttaaggaccggttcgcgggatgccctggaagaacttatcgtacttaccacaagccagcgtgggcaacggctgggcttgtagtgtagcttttctctagctgacgcatccaggcaagggtgggcgtgatggagtttggatgggccctgcgacggcctatgcggcttccagattcacctaggcacgagaggggactgcccgtcgcccgctggggacgggggtgaaacctgaggtgtggtgtgcttggctagagggggttatgcgaagggtcctgtcacggcctctttccggtatgtcgtggtggcatgtcggcgcacggaaacgtgtcgtggggctgtgtcttgtgggtacagttgtacacctctgatcagagtaaaactattcgaatagccgtgcccgcggttatgggcggtcaaccagattcaccgtgattagtctcaccctagtttagtctaatgaaattggatagtataggtggatggttgggcctgttgcaacgtgggatagcgttggacagcggatgatcaatattaattaattattgcaactgtttaattctttcaacttctgtttataaatgctcgctttatgcaaatgaaccactctagctctcccttgataattccctgcatcatacccctattccggtatgacttgctgagtacagtgggtagtactcagtcttgctctattttcccccaaccccagagtgcgagtatgtgtccgatggaggtttctccgaggagtaggcttcgtccgtgccgtcgaggatgcctgtggagtggtgttcccgctgcagttctagtcaaggcttagctcctgttgtctttcgtttttccgctgcatttatgtaagacttttatgatgtttgtaagacgtggatctgaatgtcaacattgtcttttgtgtaccccggccggtcctggacggggattttaatgcacattctgcttggaattctattcgggaatttctgggcgtgacacgaccggcaacggagaagacgacccaccgctgccagctccctttacactaccatctgggcttgcgccgacgccagtgaagctattgctgctccggctccggcacaacccaccggcgcccccgtcacccagccgccgcgccccatctggccgcgccgcacagcccacccggccgaggagggcactgcggcggcaccctggctgcctggctgccgaggcctgcccgcgccatgggggctcgcggccgcactgccgagccgcgtgagcccgcaccggccgcacgccgagctgccgcctcccagccgccgcgcccgggcagccgcaccgggccggccgtgttgccgccgccgctcccagccaccaccgcctccaggctgccgccgtcacagccgtcgagccgccgccaccgcgcccaggctgccgcactgggccggccacgccgccgctgagccgccgccactgccccccagccgcctcgcgccgccgtcgcaccaaatccgggcgcgtggtggccggatccggccttggaggcgccggatctgctgcctcccctcatcgcaccgccgtcaccacctccgaccacggtggagggtcttcgccggcgtcgtcccgtccacgtcgtgccgggagggagtcgccaggaaggaagggcctcgccgccgccttccctgctcgctgccggctttgccgccggcgagctctggcggcggcaaggcggtggggagggagtggaggcgcgggcggctagggtttttcgccccccgagccgcccgcgcgagagcgacgcgagggattgttcccttcattttttgactatttcaaatgtctcattccagaaaatattgaattaatgcacacgagaaatacatttatgataaagtttctctagatacataagctagtgtttcaaagttcattcaagcttagcatatcactttgcaatctgtttttaacgggtccgcggtcatagttcaacacgaacagttgaactcatgacgacctcggtccaaggccctccaaccttcatgtagttaatgaagttagcctacctctactcaatttcaaggttcagcatgctgtcagagaaaaaatgtctacagcataaatatgtccagtatctctatactaatagagcagataaaatatagcaactgaagagtgaattgaactggtcataaagagctgaccaacaacatactttatgacaaaagaagtagcagagcttaaattgcacatatcttcaaatattgggagcctatgcttttgccatatgtcaagcttcttcttgtatagtggatcttggactggcatatctattcgaataagtgcctgaacagtgataaggagttactcgaacaccatgtgcaacaatacatacaaagggcagcgatttttgaaaaatcaatgtgcaattaatatgtaatatttcttggtcaatggaaaaggaagtttaattagaccttaagaactatatttttaatgacatctagtcctcaataataaaattactaatctttcaaagtgacaaagatgcgaaaaattggtatttgttttttattgttttattttacataatataagtgccctttcaatttatagtaagcattcgtgcctcctggaaatcaggacatttgaatttagagctaggctgctgttttacctggtcatatatgtttctggcgagtgtaaatccaaagttgagtgccagtgtagcatttgagtatttcccataccttatcatcacctaaaattgtagtgaacacttgagatttcagagctagcagaaacacataaaaagaaatgaagcacggttgcctccattcccagaaacatttttgtgataaggataaagatgcagctcatggatttggctactcacagtttatcaggttatttaagtgtatagaataaagcataataactagtagcaagaatcacctgttcaccaacagcataatttctgtcagcaatgatctgcaagttgtaagaaataagagcaaagaatgttactttggtatctctaggtggataagaaattatgtaaaagatcttcgtaaccatacaacataggcacaaaagtacacagatagatgtggaactaatgatggttacctcacaaacatctttctgctcatcatatatcaaaacagaaccaaaaacaccatcatggttgaggaaatctgcaaatggaatctaaatgacgctttcagtatcacgaaaatgttagggcattatgcatgcgatccatttaatctgcaaaaaagatgataggaaacaaatgagagaaactgtaccaacaatacacctctaggagtccgccaagctcgagatgaaactgcatgtgccatgtaaaaaatgccccaagtttacagtctctcctattatgctccttttggtcatttaaaactcaaatgaaataccactgtacattgcaagaaggtccaggtggaagtgcccttcttactaatttggtttaaccaacaatcagagggattcaatgtctgacatgtggaaataaacatgtatagtttcaaaacagtaagaatgttgccagcctggttccaacatgttgaaatgccaaaactagtttaatatattgattaattactaatttatattttcctccttaaatgaggagttgaagcggtggcacattctacatcaacccctcctctatcagaatctttagtgtctttgtaaatgattgcatcatatgccatcatccatttaagtgtatatgcatgtggctataaaacctgatgtgaattatgtattccctattcctgatttgattatatttatttacaaccctctgcagtgcatgggagccatatgatagcaatgttgcatggtgtgaccgatgtactcaacttgcatgcattaagcaacatcaaacacgaattcagcgaggaaatgttactacatacccaatgcagaagcatgcatgaaatcccccaatttaacttctccaaacaaatgtgggaaatggtcaagagccttgcatatgaaaaggataaaaatgagattggtggaaaaggaaggatagattggatgtgcatattgcgtgcatagatagagaaaaggagggtacaaactggcttcagtgccaaaaattcctttttagcttgttccttgtgttcaatggcttcatcataaattgagctgttttggaccgcatggagctcatttagatcccagagcacctagagcaaagtagagattttggtgcatcaaatctctgttggaaatgcatataaaactcaaaaactgggatatgcagatttgagaacagaaaaggtaaaacaatcaggccccaagttaagcatattgaaataccatgttatgcatctgatccttggtgggaagagatttaatatacggcgcccatcctgattcctacatcataaaaggaagcctctttcttgagaatgatatgtgaggaggggaggggaggggaaatagtagagagtagagagaaggaggtacatttcccaagtgttgctccatgatgaggagcgcagcaagcttagatgtatctccaacagcatggtcaagtaaggtgttaaacttttgaggaagtttatcaagggtaagctgctgcacatacatagagacaatatagatgtggtagaaaggatgagattggttgtagcagagctgatgagggggaaggaagtattgttattataggaacatacaacatggtaaggaacttgcattatacagtccccctcttgaatgggctccgatgcaaataatgacctgaatggacaaaaaaagctagcagctagtaacagattattatgtagtagtagaaattaagagaacaaattaagggagagaatgagaatgagaatgaccttccaaaggcagaggaggttccgagagataatacagaagaaatgtgggttccagacttgctgcgcagccaacgcaggaatacagagcagtcgcagtcgccgccgccgccgcccccctttgaattccaaaacattattattagtaatagtagtaggcagtagcagctgaaggtactccatatattatgaagcatatagaaataccttggaggcggaggcggcggcggcggcggcgcagcggcggggtgcgaagcggaatcgcatcgagcagagactggctagtcgagtcgtgggattgacctttgcgttagctaagctcaacaaggcccttcttgggccccaacaaaagagggcccccaccaaaaccaaaaaaaaaaggcccaaaaatttaaaaagaaaacgaccacagtgggagtcgaacccacgaccttctgatccgaagtcagacgcgctaatccactgcgctatgcggtcgcctctctttttctgctttatcctttttttatttgtacagaacaatcactgtaccttttttttttactgaacagaagacttgtgactgtatgggattagcctgtcttttaaacacaaatgtactgtaattgatagccagaaggcaaaaaaaacgcgctgattactctggggatgcatgcgagacatggaaggagtagtaatctctgtaagtactgtatctaggaagcatcgtatctaaccaaagcagagaatatgaaagtggctagcaggaacacgtactacgcgctcatccatccatccacccactgattacttcaattaattaatactaatagagatcctgaaaaaaaatgatacgtggtacaagctagcaccaggataagttccaacttgaacttatcttttctttttcttctccactcacctacctaagccgggcggacagaagaagaattcccctttcttttcgtttcaagttagatatgctagtagctactagtaggaatttgttcggttcacactaattcaacgtcatattaatttgtattgtactacagtactactgttccacatcatctaaaatatcgtcagactgtactttttacctacactcgtttcatcctattcaaaatcataggtctccaaccatggttcagttgtgttaggcgtaattagtgctaatagtaagttttttatatttaaaatgaaaattgttgaagtataatttgagagcatttacgaggtaagttgtatcgatgatatttctctcactagctattaagatgcatcgataactttctcgtagttcataatctgtgaattgataccccctcacatttcatgaaaaaaaatggcttttataaatttccgtatacagtagtacttacagatactagtgcacataataatctaaaattaagggtgaagcaagcagtaagcagggtggatgagaaatcagaaggaagcggaagcgcgtggaggcatgggcgatgaggaggaggagatgggccagaactgtgcgggcttgatcttggagacggcagtgagcacggacagcggcgtgacgtggccgacgacggtgaccttcttggtggcgatgtcgatgtccaaggaggtgacgccctccatcttggagatgtgcttcttcaccttccccgcgcatcccttgcagtgcagggacacccgcaggaccaccacctccacctgcgacgatgactctctcttttcctcttctcctcctcctccttccactgcagcagctacgatctcattctcctccgccgcagccgcgacagcaaccgggatgacgaagggcggcggcaactcatccgcgctgggttgcatccgggaggagttgagaaggaacctggacgagcttgcagggctaaccagctgctgcttgctcttgttcgccttcgtcttcttcttcttgctgctgttgctggtgcgagctgggtctcggaggtgcggcggcgagtggccggagaggacgatggaggtggaggcggcggaggagcaggagaggcccagcagccgcttgttcagatccttcaacaccacagacgccatgcctactgcctcctctgcttgttaattactgtactactactgtagtttgctgctgattttgctttgctctcgcatcgcgcgcgcgtgcctcttcttgcttgctgattgctgctgcttcttttaaactccccaccccagcagcagcgacttcagcataggcccaccaaacgaacctttgctttgcttctctgcccctgcccccactgtgctgtccatttcttattcgttttaattttagctaccacagtatactgcgctagtgttttactcctatataaacatcatcttttgtacttacctatatactgtactccatatactatgcaataattaagtacgtacagatcgagatcaacatcgggtcttttagttttgtcttattgtctgtttcatgaatacagtataagagatggcatccacactgcataaatacatacgtatacagattccttcacatgcgcaacaggacgtacatacatgctgctctaccacacttattttaatttttctctgctaattactacaactaatcaggccgccatacattcattaattagcaaacaattagtaaaagaaataatcagagagacatagaccaagtgctagctgcaagctagtcaaatgcagattgatagactgtgtaccacaactagaagatgagagatgagagatgagacaagaggcaactaggcaatgatgcaagcggattattaaaattctagtacaatttgctcactactacagtttactaattagactgcaggtacgtcgccgtcgaaatgtagaaattggattagtaaaggttgactcaactgaaggagaaccactctttcttcctccgcggaaatgaataaggcatctgcacgtaccttacctttcggcccatcagtttgaaactcatgcagtgcaggattacttgtttacgaattagtatgagtcagtggtttaagtatatataaataataaaaaaataggcacggatcagctgagcaatttgctttgttgacattggtacttattactgctcttttcttttctttagggaccctacatattgacgactttgggtttatctttcttacttaatttggtgagtcattaattggttcatcatgatcaaatgatgattgtctgcactgaactgaacaatcaatcggtcggtaagctcttcagtcggtgctccgttcctgtcacctatacttacttgttcatctttaattactcccagtcttactacgtgttctcccatctcaagtgcatatgctcaacatggagacactcctcctactgctgcatctgaatggagcaagtagttagacagtcagtcactccttttagcagaaaaaaggctgatgatggttgcttcttgttggtcaagagaaaaaagaatgaatcacaaaattttaacaagattaagaatgtaagcatatataggcacccactgcattagtatatactatatagtactagctagtaattgctccctgaatttcttcacctcgagcctaacccctgaaagaaaggaagaaaaaagaaaggcaaatggcaacgccaggagacggctagctaattaagctagaattaatacacgcactgattaagctagaattaatcaaaagctaagcaaattcagttgacgagtggactagtgtagacagtagcccccaaggcccaaacccccggccgcaaaagaaaagaaaagaaaaaaaatcacatgctatgcaccatcggcggcttctggtgaagctccgactctcgttaatttgtacaccttaggtccggaggaataatcgaaaataatttggcagtctcctctttttcctttttttttggggacaaatatatactctacctcctttcactttttagctaatcgtagtatgctctatctgcatatatacatcgtgcttgcttttctgatatagtatatgcaaatggctgctggaatgttgaggtttatatgaacaacccctgtagttagctccttttcttcatttggaatgttgagagttctgtacggttcaccagcagcaaattcggcgttcaagctaggctgtgtttacttcagcgtaaagtttgaattttggttgaaattggagatgatgtgactgaaaaagttgtgtgtgtatgacatgttgatgtgatgtaaaaggactgaagtttagattcaaactttggatctaaacatagccctagcttagtttttttttgtctttttattcatgttaaattattgatttcgatatgattctgatcaatcctgttaggtttttgttcatatcatatctggttcacactcagaaaaaggtttgcaatctatgggcaatggtgagaagcttctcatccacgactagaatagaatctgatgctgccaggcaggcaggcagccaatggactacggagcactctactccaatgatcaatccctttattttctttctttttttggatcatttcttttttcttttggaaaggcttcaatgatcaaggtagaatactaggtatggaaatgggaaagaaaagaaaaaaaaattggaagatacggtattgggccttgcaaagaaaggcataagggagagatggagtttctgggccaaagttaattcagtgagcccgtccggagtaagagtattaggataagttcacttaaggtccctaaggctgtgtttgagggaaaggtgattgagaagattggaagaaacgcaaaacgaggtgagccattagcgcatgattaattgattattaactattttaaacttcaaaaatagattaatatgattttttaaaacaactttcatatagaaaatttttacaaaaaacacaccatttagtagtttgggaagcgtgcgcgcggaaaacgaaacaaacaaactccctttgttctccaaacgaactcagcctaagttgtccctgaaacgaaattagatcccaaaacggtttaaactacggtttcaactgatgtaccgcctacgtggatggtttgacttgattcatgtcccatgtggcgttgatgtggcactataagcaatatttttttaaaaaataaaataaaatgtttgggtccatacgtgagataaacaaataaaaagtatagtggggaggcatatgtcggtgagtcccacttccttcaaacccccttcaccccccccccctctctctctctcttctctatgtcattccctttgctcccaagctattggcaaggaacacagcaaacaacaaagaggtaccgaggagggagtcgtggtgtcctgcggcagcggatgagaggacgaaggcaaggagagaggagctataggagccctcccacagctcctaatattcgtcactggagcagcttgccttctcgcggctctagtaaaactaatttacataatatttttttctaaagtctgatgtgtacctttttttaaaatttttaatgttatattttgttgttttgataatcaaaatagaacacatatgtgcctcttgtctaattcctatggaacacttcatttatttattttttcatttatgtagtatttttatttttttcttcaattaatatatggtaatttctagttatcgaaagtgaacatcggtgcttttcttttagtcccatatatctagcaattacacactttgtatttttaataaattttattatgaatttattccaaatttcttattttgaaggtttatttgaaattagtattgaaaatcaatttcgggatttattttattacttagttcggattttaattagtagtcttggtatgcagtatttatttatttaaatttttactcttgtttttgaattttagtgatattttaaagcttatttggaatctattttgttcttattcggaattttaattaatatattttgggttgatgatggagcggaagtgcggaggtggtgagatggggtccatgcacgcaaggtcgcgctggcgcgggcggcaggtaatcgatctgggccggccaggcctcagtactacgagtcaatacacgaacggaacggacgtctcggaagataagtgattcatcgcccgatccgatccaaccgggaacggatccaaggatcgcaggccatcagcttccttatccggctaactgacgataattatctttgaatgcaaccaactgaacttgctgcatgtacgcagtcactcccaccccacctggactggagcatcttctataaatagctacaatgatcagtctccctcccagttaatcacttcaccttcttcattcagttcatccaatccacgatcacttcctagcaattaagatcatggtgcagcgcacttcatccgattcggcggcgtcggctgaggccatggtcatggacctgagtcccaagcgtcccgccaagtcctacggcggcgaaggcggctcgtactttgattggtccccctccgagctgcccatgctccgcgccgcctccatcggcgccgccaaactctcgcttgccgccggaggcctcgccctccccttctactccgattcggctaaggtggcctacgtcctccagggcaagggcacctgcgccgttctcctccccgagaccccctccgagaagatcctacccatcaaagagggcgacgcgctcgcccttccattcggcgttgtcacctggtggcacaacctgcacgccgccaccaccgaactcgtcgtcctcttcctcggggacacatccaagggccacaccgccggccgcttcaccaacatgcagctcaccggctccaccggcatcttcaccggcttctccaccgagttcgtcgcccgcgcctgggacctcccgcaggacgccgctgcctccctcgtctccacccagcccggcgccggcatcgtgaagctcaaggatggcttcaggatgcccgagggttgcgacaaggacagggagggcatggtgctcaactgcttggaggcgccgctggacgtggacatcaagaacgggggccgcgtggtggtgctgaacacgcagaacctgccgctggtgaaggaggtggggctgggcgccgacctggtgaggatcgacggccactccatgtgctcgccggggttctcgtgcgactcggcgtaccaggtgacgtacatcgtgcggggcagcgggcgcgtgcaggtggtgggcatcgacgggacgcgcgtgctggagacccgcgccgagggtggctgcctcttcatcgtccccaggttcttcgtcgtctccaagatcgccgacgacaccggcatggagtggttctccatcatcaccactcccaaccccatcttctcccacctcgccgggaggacctccgtctggaaggccatctcccccgccgtgctccaggcctccttcaacaccaccccggagatggagaacctcttccgctccaagaggctcgactccgagatcttcttcgcccccaattcgaattcgatttgatggacaatatccatcctccatctccagcacctgcccacctagcagcatcagcagattcagcttccttccttttatttagatcatgtcagtcgttagatttaattcggttctttggttgttagcatcacctacctcttttatttgataataacaataagctcgagatggagtggaatttgatagtcctatcatgcatatgtcctctttatttttttaaaactctgttttaaagtcaacagccgttcgattcgatctgccatgcatgaacgaactggttttatcagattttgtttgttttacagtggagtggagttgttattctgagaggcgcgcgatatatatgaatctaacaaattggctgcatgaatgggcgccatatatccccgctgcccgcgctaacaaacaaaggcggcgagtgtgcgtgggatagatcataatagatggacgcatgatgattgcacaaaataacctgtttattgtgttttcttgtctcctacatctaggagatgaactgtagagggagatgagctgttaatcatgcatgcatgctgctttcattgttgttgaacaggggaaatgcacactgctatagctctgaatttagtgttctgatttttctttcgaaatcattaattcaaatcttaacttttgtggaattcctgaatctaagctatgaattcagcacttaatctaaactctgaaataattcccgtagtcctgaaatcaatactacttcgtgtgctcctaaatttcattttagtggtacatctgcaaaaatcgttatggtatcttgtcctctactgttcaacagaacttgtttcgcagctctagttgatgattcttttaaaataatgatttttcattaatccagtctcaatatccaacaaggatatacataaccaaattatccacatagggtatatataacgaaatgaatacctaaaacacttagactcgcatctcaacaagaagagaacatataaccataaaaaaaacaagaagagaacatacaaccataaaaaaaccatgacctcggtacacatttgctttaggtgagttgaattgatgccacgtgccgctggttagcccaccctcattagttgtcgtccagtcaaaactagccgactagacgggatccgcttccgcgccttcgccgcatatagagcagctgtcattgtcgagatcctcttccgcctcccggactcccaaccttccaccgcccctaggaccgcatatcttgctgaaatcccagttctcctccaccgacgtcgaggaaatcctcttccgcccgaactcctaggtctctgccgctctagttgatgatggaaatcattgacaagaactatagcacttggaatttagagtagagttctgcccattttgctaacagagtgtgaaattcattaagtgggctataaaaattcagtatggaaaacatgaagttgcgagaatctttaggcttagatcccaccccaaaatttttcaccatgtcacatcaaacgtttgaacacctgcataaagtattaaatatgggttaaaaaaataattaattgcacagattgcgattaatttgcgagatgtatcttttaagcgtaattgctccatgatttgacaatgtggtgctacattagacattttctaatgacggattaattaggcttaataaatttgtctcgtggtttactgacggattctataattagtttttttattagtgcgcggacacccaatacaacaccatatataatacccgatgtgacacaccaaaactttacaccctcttagatcagttagttgggcttgtgcttagaattttacatggttgtccaatattatctgagctatttatgacttttattattttttaataagagagtaaagaggaggagtaaagaggcaaagagtagagtagcaggaacccgaaaacgcaaaacagcagaagatggaggtgttgagcggtaaaaagagccaacctgtaaacctaaacctaaagaggaaagcaacagcagtagcagtagcagtagtaggctagtgtggcgagtagtagtggtattcccctcttggtcttggtgttgggctccgatccgggtcggccggcgatcgaggtccgccaccactgaccgattcacctcgccgcccgccgcccgcccatgaagcattcttcttcttcttcttcttcttgggtcttcttctagactggactaccttgtttgactagctagctactaaggtagtgtggatgccattcaaatctgcctccgccgccgacgagtactagccgctgctcatggtttcgcggggcctcttcggctggtccccgccgcacgtccagcctctcactcccgtctccgaggcctccgagccgccggaatccccctctccctacgccgctgacctcgccggggacgccgcgccgcctccggaggatgacgccgccgccgccctcgacgatggggacgacgagcccgatccgccccccgccgccgtccccttcaagcgcctcttcgcctgcgccgaccgcctcgactgggcgctcatgtccgccggcgcccttgccgccgccgcccacggggtggccctcgtcgtctacctccacctcttcggcaccgccatccactcgcttcatggccgccacaaccacgaccttttccaccacatcaaccaggtaaggttccttcattcccctttctcatacgtactaccagatctccatttttctcatatacatgccactccactcctacatatatggtatacgtacgccccgccccaccccgcaaatcaacattccttcttacttggcgcagtaatcatgcaaatttccttggttgttacagttacaattcttctgccagctttgcattagttatctccaatttcataagcaaactacctagttagtattagactgcagatttattcttaggcttgtttggtaagctgtcattatttatttctgcctctctctgatgttgatttagataagctgctgaccttttacgatatggtattgctaccggtgtttataggcgtatggttgaagcttatatcactccatgtctgaatgtgccgctttcgctagcttttctatgacctatgcatttatgcgtgttcagctggaaccaacctttcgctccaacacactgaatgaaacaattcgctctcacgcgatgaacctttgcaaattcatttactagtaaaattactttggcagcttgctggttttctaaaccttcacaattttctaacctccacactaatatctgtgcatttctacactcatttatgcatctcttgtccatctatctaattggttacactcacttttatgtgaatatcagcatttgcttgtccttctatctctgtataatcattttttctcagaattatgtatctttgtgttttggaagttagtaactaagtgttttacccgcagcatgctttacacttcctatatattgccattggcgttttctttgcgggatggataggtaagatgaggctacatcagctttttatgcactctctgttttcttttattctaacaaattcactgtctgttatatctatagaggtttcatgctggattcttactggggaaaggcagacagcagtgataagatcaaagtatgtacaagtgttgttaaatcaagacatgagtttctttgatacctatgggaacaatggtgatattgtcagtcaagtgctgagtgatgtcttactcatccagtctgcgctgagtgagaaagtgagtaattatgagccttcatgattattcacaacaaatcgcatgcttatctgactgacaagggttattctcccattctggctttgttcttttaggttgggaactacattcacaacatggctaccttttttggtggtcttatcatcggtttggtcaactgttggcaaatagctcttttgacattggctactggtccgttcattgttgctgcaggaggaatatcaaatatttttctccacaggcttgcagaaaacattcaggatgcgtatggtgaagcagcaagcgttgccgaacaggtattcaaattctttgactttcttttatcctgtaatgactgcccacatctcatccgtgaataaccttggtttgtcctactttctcgctacaaacgactatttctaaaaagatgagagtacaacatcatcgtctaaaaggataataaatttatggtcttgaaattggtaggcctctagtgatgtgcggaatggtggatttagctaggaatatacctcttgctaaaatacaaaacacactttcctttcgcaactgcatgtagcattattattaattgctaatgaaggtatgcatccatttgaatcattctcattattgcaggcaatcttatacattaggactttgtactcattcacaaatgagaccctcgcaaaatattcttatgctacttcacttcaagcaacactgcgctatggaatcctgataagtctggtgcaaggtcttggtcttggatttacatatggccttgccatatgttcttgtgccttacaactttgggttgggaggttccttatatctcatggaaaagctaatggtggtgaagttgtagtagccctgttttctattatcctgagtggcctgtaagcatccaattttaagagattgccttacttatagttttatattgatcagcacactcatggttcccaattgtttgtaggggacttaatcaagcagcaacaaacttctattcttttgaacaaggacgtatagctgcatacaggctctatgaaatgattagccgttcaacctctgttgtaaaccaggatggccgtaccttaccttcagtgcaaggcaacattgagttccgcaatgtctacttcagttatctatcccgcccagaaatccccattttaagtggtttctaccttactgtacctgctagaaagactgtcgctcttgttggcagaaatggttcagggaaaagcagcattattcctctcatggaacgtttctatgatccaactttaggtattatgctacaagctattctttgctattttctgtttactcaattatgaatttgaatcatctttgttatatgttgcaggtgaagtgcttttggatggagagaatataaagaacctgaagttagagtggttaagaagccagataggacttgtgacccaggaaccggctttattgagcttgagcatcagggaaaatattgcatatggaagatctgccacaactgaccagattgaggaggcagcaaagacagctcatgcacatactttcatcagttcacttgaaaaaggatatgatactcaggtgctgttcatgctttattctaacatatattgaaactgtgaaacttcttattctcttttaccggtgaacgtgcttatttagtgaacctaaatatgacataggttggtcgggctggcctttcactgacagaagaacaaaagataaagctctccattgctcgtgctgtgctttcaaatccatcaattcttttactggatgaggttactggtgctcttgattttgaggctgagaaagctgttcaggaagcactagatatcctgatgcttggtaggtctaccatcatcatagctaga

SEQ ID NO: 8476 - DNA, 11376 bp, Oryza sativa
atgcaacagtgtgcaatccctttctaaaagaatatttatacgcgaaaaaaaatctatacatagaaactttatacatagatattttatagatataaactttatgcatagaaaatttctgcatataaattttgtacctataaactttgcacatataaatttcaacgaattaaaaaacaatttgcaaaaaccttatattaagatcattaaggcccatatgcccatcagatgtgcttgtgttcacgatttcacgtgtaccagcgttttcgttttccacgtgagagcaggcaggccgtggggtgaacagaaaaggaaaatcatgcgtgaccctagaaatggaaatccggattcgttcgctgatctcgctacccgcgaacgttcacgcattaattagcttttctgatcatctgtgttaatgacatatgggctaagtgggacccacatgtcagtgactcaaggttctgcttacgtcctgtgtcctgtttagagagcccaaaattatcgaaagcaaaaacagctagtgagtagttaacctatataaccgattcatgcatcccttttactctttccgtcaaatcatcctcatcttcttcatatatatgatagtgttcctataagcactggcacagtagactagagtagtgtggaagccttcgtaggcacagtgtcacttctatctctatatcgccatctccgccaatgagttgtcgtcgttgcctccgaatactagcctcatggttagcagttaagaaaatccatccttgccctctacatttggtggttattacgtacttggcggttggccaacaaaatatattgtcttgatggttttgatgctatctttgaccctttttggctaccaagaaaattctggtttcttgtagtgagcctcgaaaaaacttaagtaacgatatcaacggcagactttaaaaacgaggctccaaatcaccgcctctataggcttgctatcggcccagatcgctgtctgcgctgacgtgttgtcgccgctacctttgcaagctagctgtcactagggtttaatatttcattttcggcatttgtatcgggggtgcgatataccaaaattttggtctgaaattatttgaatttttgaacaaaatttgatcaaatttaaacaaaatattgtcaaattcataaaataatgaaaaattttcaaaattttagccgaaatattatcgtatcggggggaggggggaatccgatagaatcgaaatttcattcaggaattttgaagccgtggcacgagattctacctccacggctttgtctttcgtttattggcgagatggatcggtcgaggaagactagaagagggcggctgttttgcagaagtcaagtactattgaaggtgggcggttgtttggaaaatgcaggcttggagatttattaaccgtaggattgatcggagggcttcatgaagtcgtgtcgtgtgtacatagaatgcgtagtacgttgctctactttaactgatcaatagatgcacctctcctcatctcaacctctcttctacagcacctgatcgatcgatcatatctcagccccactaaatctatcgtcctagctagcttgaccaccgctaggtcatagacgtgactagtacggtcagttttcccctggcttgtgcccaaaaattttggtcattgagctggttgttgagtttcatcaaaaattttccttgatgatcgaagagatgatacgtacttttctctctcctccacatcagcaacttatctttagctagctagcacttctacgggccaggacagcacattgttttattaattgtattaatttctaaatgctgtcaaattaaatgtgcactctgatattcaacttttatacagcttggccagtttaatttgcatgattaattttgacacgaggaggaatggctggccctcgagctagctagctaggtagagaaatatgtgtgtgttcaagcaattaacagcgctccactggcccttaattaattaaacctgttatatatctgtgtagtgtacgatcgctggcgatagataggtactagataaatctattatataattaaaggaatagaaaaaggagcctccacgttcgctctcatggtctagaaattctcacattaatcggagaaaaagaaaaaacagagtccatttagaaatacaacttagaaatagttgaaattcagaattaaaaaataaggaatattagaagaggagactagagtccatatagaaatacactttagaaatagttgaaattcagaattaaaaaataaggaatattagaagaggagtatagagtccatatagaaatataattaggaaataatataaattcagaattaaaaattaaaaataaggaatattagaagaggagtatagagtccatatagaaatacaattaggaaataatagaaatgaattaaaaataaggaatattagaagtagagtataaagtccatatagaaatacaattaagaaaaaaaatagaaattcggaattaaaaaataagaaatattagaaatagagtatagagtccatataggaatttaaaactaactaaaattcagaaaaaaaaaaaggagcctccacgttcgttctcatgacctagaaattctcacattaatcggagaaaaagaaaaggcagagtccatattaaaatacaatttagaaatagctaaaatttagaattaaaaaaataaggaatattaaaagaggagactatagtccatatagaaatacaatttagaaatagctaaaattcggaattataaaataaggaatattagaagagaagactagagtccatatagaaatacaatttagaaatagttgaaattcagaattaaaaaataaggaatattagaagaggagactagagtccatatagaaatacaatttagaaatagttgaaattcggaattaaaaaataaggaatactagaagaggagactagagtccatatagaaatacaattaggaaataaccgaaattcggaattaaaaataagaaatattagaagtagagtatagagtccatatagaaatacaattaagaaaaaaaatagaaatttggaattaaaaaataaggaatattagaagtagagtatagagttcatattggaatttaaaaccaactaaaattcggaataaaaaggagcctccacgttcgctctcatggcctagaaattatcacattaatcagagaaaaagaaaaagcagagtccatatagaaatacaatttagaaatagctgaaattcagaattaaaaaataaaaaatattagaagagcagactagagtagttattacacattagtagttttgaaaagttattgcaaaatttaaaattacgttgtcattgtaatatattttaataatataatgagaaaacatatatgctattatatgagagaaaatataatgatgctagccgcgcaatctgcgcgggccatcatgctagttagatataaataaaaataaccggtaatgcacgtcaatctggatgtgtatatatgtgcacagcaacgaacacctcgcgaagtactgagtgataactaaagtatacagcatgcatgtaccgagaaatgtatacgatcgatcgaccttagagcagacgtctagcaataatatttgtatacaagatcctaatatataaaaatacttactcaatatatatatgcgcagtcagcagaaaagaatggacatagctaggtagctagctgcaaaacaatatatatgtgtgtgtacataaacgtacaaaattggaagatgatgaatatattgatgcgcgactagctagcatgagagtaaatagctagctagtcgtaaaacccttcccaggatgcatgctcatacatatatagcgtgcattatttaccagcatgacagacattattgttaattaacccacaccccatattagcaagcttgcaaacactagtagcgagttaattctgtaataattttagagatatgcatcatatcatatccctcctccacacccaaattaaagctagtgacaactcacgcgatcgatatgatggagcctggaggctggagctgtatatatagacatatgaaccacagatcgatggagaggacacctgcgctatagctagtcgtagttgtgaagatcgaagttggttgtgtgattagatagatatggcgatgcaggtggcggcgccgtcgcggaggaggccgagcttggggcggcagaagatcgagatccggcgcatcgagagcgaggaggcacgtcaggtgtgcttctccaagcgccgtgccggcttcttcaagaaggccagcgagctgtccattctgtgcagcgccgacgtggccgccgtcgtcttctcccccgccggcaaggcctactccttcggccacccctccgtggagtgcctcctggagcgattcctgccggactcgtcgtcgggagcggcggcgcgggtgcggcgaggagcgaataataatggtggtggtgggatggtcggggagctcaacaggcagtacggcgagctgcgcgcgatggtggaggcgcacaaggcgcggcgggagagggcggacgagaagatagagatggagcgcgcggcggggaggtggctgcccatggacgccgatgtgcgccgcatgtcgccggaggagctcatggctttcgggacgggcctcatggctgtgcaggctgccgtctccgcgcgcgccgaccagatgctgcgcgacgcgctcctcattggccgcaggccgcccaccaccaccaccgccggcttcggcttcttccacatgccacactactgatctgaataatatctatctatctatctccattcatccatctccgcaatataatctgctagagctagcctcctcttcttctttgatcatttcatctcatctattattaattagttgctgcatgcatgcatatcatacccggcctcatcgttgtatcccggtcgatcgatcgctagctagctttttttgtttccatcacacattcattcgattccatggagattggagatttgtatccctgcatgttattatgtcttctgctgcagtatgtatcgtccttagcaagcacgcgcaaacttatatgcgccactgcaaatgacagattagtagttcacctccaatgtattagctgcagccacgcggatgtaatatcaccctttttattactaaaaatatatgcattagctacatgatacatgtcttcttgttgttattgttattgttattgttaatatatttttctctctgcgtgactctgggatatacgccctgctagcccacatatatatgttcagtacgtaggtatatataggcggtggaataaatgtatggcgtttgtgagttgtcgttcgtgcacctatccctagtagaagaatgagtgatccccctgcggatcatggccttaccactaggtctccgatggtttcttctcgtttttctcttcgtgaaatagaaagttgttccacgaaactagaacgaacattacgaaaaataagattagagtcctttttacaccctacgcgctatttctatatatggcaagactgtttctagctagctagaaaaggaagctattaatctaaaatggcaaagtaaattagctagagcccgacatctaggatacgtttggaacaacttgcatgtttgtcgaatgatttatcatatactaacctatcttgttaattttttttaatttttttataactatttggatgacatgcaaataacgaggggacatcccctcgagagtttagaatccactcatctctatagcccttgctcagctaggttagctcaccaagccatagcccaccaaagcaaagttgctagttcgatagcttgtcgacaaaggagaggggcaaggattttcaactaggccgggcgtgctagtttcccaagcaaagcaaggtttctaagcagttacccaaatgcacagcctagcatggcaaggagtggaagtagctagcctagcatccaaacgttcccctaatctcttatcaaattatgtcttccatctgtgtgctacctctcctatctccgtgctcccattgtgccagggttcaagaggatgaggcctttcttcccattgccatgtctctagctaatcctaactaaatacactgctaccctcctcgttatgcatgcatgatgatgtgtgccaggaggacgcagctttaaaatatagatggggcagagaacggaaatgttcactcgataagagtagttgaacacaacatatatcatatttatagttcaatcgtataactatctcgatcattgtttacagcgtgcgtgtgttgtgaagagacagactaatctgttggacgttcgcaccttgttatacctaattttgatggtacgataagagggtaggagggtttttttccgggggggggtgtctagggtgacacgggtcgtagctgggtccatcggcccaccctaactaatagatagatccgcctctggtgccggttgtgtgttagccccttgtccaacatttctaatggacctctataacaattattgatgcatatctctatgtagaaggccacacactctggattagcaatgaagtgatttgcaatacgtatggtgtcatgctgaaacaagattgtcaatacatgatagaaatttgatcgttgctaccacaaatatatcctaccagtgcatgactagggtcaagaagtaatccctgttatgatctttttttttgttcgatttcaaaccagtacataactaagaaaagtgggatccaccaattaaagtagcagcttctctatataactttaacataactctacgtaactagcaaataactaggtatcgttagctcgtctataccaaataaggaggcgattccctcggaaacagggccgaagagagagttagagataactcccaatatctttgcctctattatccacattcatgtgttcggttgattttgcatcctagcaccctctttctagaagtgaaaggcttctttctgatctctactctttctagtggagatgttaaagacagatgattcaaatcagcttgcctctatctccacccacgaatcaagttaacccaataattatccgtagttggcaacccagatggcagaactagtgatttttagataattgaattcatttcggcctttgcttcaaataagttacaaccattattgagaacatgatggttcattttctacgtacatcccttaataatatataaataatagatagatgggatttatttaggtcctcatttggaggaagcaaatggatcggagcgcataaactcgtttcaatcatgaagtgatggtgcaaacgcagcatgtatgtatatatctttccaccaactcaaacaaggacgtgaagaacgacagtgaagagagctttggattaggatgcatgggatgtgttgacattatattgcagatgagacaaccgatggatggacgacgttacagctgcaatgcatggttggcttggttgacagcacagcacagattttggaattaaaggagatttacgtaatttgtttgtacagaagaagagagtagtaattgattgggggtggaagacgacacaggtagcagctgcatggagtaattaatattctagctatatatggatcgagacgggggacgaattcgattattgagactgggagcagacgatatgatatgatatgatcagtagtcggcggtgggcagctggtcgtgcgggcgctggccgatgaagatgatgtcgtagatgagcgcggcgatggcggcgccgacgaaggggccgagccagtagacccagtggttgtcccagactccggtgacgacggcggggccgaaggagacggcggggttcatggaggcgccgtcgaaggcgccgccggcgaggatgttggcgccgacgatgaagccgatggcgatgggggcgatgacaccgaggtcgcccttcttgggatccaccgcggtggcgtacacggtgtagacgaggccgaaggtcatgacgatctcgaacaccaccgcgttccaggcgcccacgcccgccgacagcgagaaggcacccacggcggcgccgcccgtcgcgatcttgagcagcaggcacgccaccaccgaccccagcagctgcgccacccagtacaccaccgccttcaccaggctgatgttcccccccacgaacgcgccgaatgtcaccgccgggttcacgtgcccgccggagatgttggctcccaccgccaccgccacgaacagggccagcgcgtgcgccagggaggcggcgatcagccccgacggcgtcgtgccgccgccgtccgtcagcttgcctacgtaccattatcgatccatcatcatattaattactcataattaaacggatgaattacttggattcaatgcttgcttactgaaggccatgccggatcccgatccggcgaagacgaagatgagcatagagatgaactcggcgacggcggccttggccgtgtccgggtgggacagctcgccgggggcgcccaccgcgatccggctcaccggcattttcttcttcttcttctgctagtacgttcgtctagttacgctaagcgcggctattatattgctcccctccacactctctcccatctttgtactactatatatagggaaggagggagagtgagtgattcatatatgacctcttcaaaccaaaccaaaccaagccaaagccatgcataaggcatccatatttcattttattaattagtttcttcaccgccctttgcgcgcctatttttgtcatcaataacaaaagttgcagacagttccatggataaggacgtgttctatgattttttttatttgtatttcagagattttctgagactagatgcctatccagaaggaataaaaaaacgtccaaacaaaacttcttccagaacctggctgagagtatcgttatatataacattgcattttttttctcatccgttgggtcgtcttgagatttgtgccatgtgagaaaaaaaaaccactaagcaggtacctcttttttttttgaaaactcaatataatattatagattaaagacagagttcacatgaagtaaatccatgatacatcgtccgaaaataaaagatctcaaaagcaattttccttatgaaaaggaagggaaacttgactacgaaaaacaagcaggtacctgaagctaggatttaaaccctcatcgtcgtgagcggatgcattcgctcttagccaccaggccacactcgagttaattcaataacatacgaactacatataaattgctctatatgttgtaattggaatatagttatttttactatatttacatttaaaagttttctgtaaaatatatcaaataatgtataaccactcccttataatatactgtactaagcaaaagatgctcagaaattttagaaaagaaatgcattcatacggagctagagaaattgtttggactaatataggagagtaccaacctgtaaaataaataataactgaagtatttttttttcttttagaaaggaatcgtccattatagaaaacgatgagtgagaggaggggagggagtagaaacaaaggaagaaggcgatgtgtgccgcccagccgttgtccttgctgataggccgggcctcctggccagtagggacgcgccacgaggacaaacggttggccagggtcgcttctgaggcgccgaccgtgacgtggctgcatgctctctctggattcaataatttatctgaccgtctggctataataatgaaatggaggctcgtgttgtggttgtgagagctcatccatggaatttgcagggtcatgtagtactccctctatctatttttatagttatattttatattagcacacaaataaaagataagtaattctacttgtcatttatttaaacatactacgggttatttctcgtaaataagtgattcattaatatttacatttctcgatgtccatgtagccaatcttgtatggaagaatgaagtcacgcattaaatccgagaaagtaattaagatgataaattgttggattaaaatatgcctatcaaaaataaattttccagatttaaaaatatacctatcaaaaataaatggagggagtacatcttttgtttcaaaataagttcattttcagtttcttatgtttgtcccaaaatactatcccttcatcctaaaataagctaatactctcttcgtaccgaaatacttcctcatcacataatacaagaatcaggatcggatgaaacattttctagtaccacaaatctaaagaggctagaaaatatctcattcgattctaggttcttattatcgaagagatgtataaatttatttttaacccatcccgtttgtcctaaaataagttcatttagtttttgagtaatcattgcatcaagttagtgaaattagaaaatcaatgtattgagagtaggtaaagtagaaaatcattgtattgtgagttgataaagtgaggatattctagtcttcttagttttgtattgatttatatgggatttgggacagaggaagtatcaaatgtgacatatccaaaaatgggaagcaaaatactccctccgccctataatatataagggattttgagcggattcagagtaatatgatgcatcacatccatccaacatccatccaaaatcccttatattttgggacggaaagaagactcaccaaaccaatcaatcaagcatcaatcaatggtatactactccactccactccatagagtaggacatgaccatcatcgtcattcagaatcttgtgatgatcagatgaggttggaatacactactaccaggcagccagtatatgttgcacagcagtttggaatctttttagtagaatctgtcagctagcaaatgtgcattaatagacgcatttctctacacagataaaaataccagcaataaatcggaaaaatgtcaaagagaaacaagcgtattccaggacgtttacactttgtgtctgctagtacagacacttgcggtgcgtattccaggaccagatcgatccacacttggagttgtaaaataaaaaatccagcagagctagcggatgcttctggaatcgactccactcgactgctccagaaagatcctattacccgtctctctctcgcacattctcagcgtttaaaacatggcataaacttcgaaaaagtggttgacgcacaggtttcccaaaggccaggttaccgccgggcgccccggcggtaagcacggttactgcgcagtaaccataaaaaactgtacgaaaccgtacaaaatttatcaaaaatttaaattattttttaaatttatttaaatttaaggaggttaccgtggtttttctattaccgtacccccgtggtt

SEQ ID NO: 8477 - DNA, 36101 bp, Oryza sativa
  unsure (1)..(36101): unsure at all n locations
tgctcattctatgcaccagtaaacgcgaagcctattatgggcatatcaattaacaaggaagctcgtacttcttgatgcacacatgattcatccaaaatttccaaagcatgtcatattttgctcaatcagttattcatatcacatatatgagctgggaaaagaatatttatcggtcgggcgtactgccatcaaggctacaaattatctatagtaagaaagaatggtattatatacgtatataatgcaatgtgtccatgttttttcgtcaacatcttccagcagtgacaaggcacctcctatctgcgtaggccctcaaggatgtaagtagcatatagatccctgtagaacaaaaaccagctcaatatttggcgttgcatatcgcccaaggaacatatgtaggaattgaaactcacatggaatggcgtatggtctcataagcagaagtggcaggcatgaagtcgttgacagccacctccttattctcattcttcttgtctattttaccccattaaagaaaatactcaattcaagaagatagtagcactgtctaagtacatgtacatgcactaagtggccaagatgcagtaatcaacgaacttctgcgagagatacaattactaggcatccatccaaaaacacaaaccatatatgttccttgtcctttcaaacttgagaagctacaaataattcatactgcagtgataaataaggcaatgggaagctagctgagcttgtttcagtagagttccatgaatattttatgctctatgaatgcaaatagaacaagtacattaagagcaataaattaaaaggatacagtcctcgaagaaacgcctgatttcagctaagcggtgaggtgggaggtccttgatatcgttgtaatgcttgtactcaggatcatcagcacagactgcaataatcttatcatctgcctctccctggataaaaccttaccactttagaatctgttcattcattctgaagaaagcgcacttgttgagtagggaccaaacctgatcgatcattggcatgacaccgatggcctttgcccgtaggaagcatcctgggataactggctcctgtgtgcagtaaacattagttcaaaaccaccagatacgcaggaaaagggatcaattgttaaggattacaaaaatagacttgatagtggatttattctattgtgttgtgtaacaagtttcagtgaagggaccatgtatggatgggctatacctagatgaaagacttattgtattctgatttagcaacgtgcaaggaaatacacacctgcattatgaccagcacatccaaaggatcactatcgtcgcacagcgtgcgaggaatgaacccatagttgtgaggatagacgactgaagagtagagaactcggtctacctgagcatgttgcatggtacagaaaaggaaacataagcttaggaaaactgcaagtgcagaagaagatgagtgaaacatgtatctttacttttacgagcccggttttcttatcaagttcatacttgaccttgctgcctctcggtatttcgatgacctgaaaacaaaagtggctgagtattgctttgtcacataatgtggctttgtgagacagaacatgggtgggttgttgagtcagtgtcaagatggccatcatcagaagactgaatatacatagctagcaggttttgcatgccatccgcatgaactgtatggtgtagttaaacaagaacatttaagtgatgagagaatcggcaaaggcaagcagcagtgtcttacacagttgaagatggtgggtgcctcaggtcctgcaagcaaagcaaaggagggaaaatgatgaatttttgaacctaagaaatataatagaaatctgaagggtaagcgtgtaccccaagggaattatcactactagtaancgaaatactccaaagtgaggtggttgacagcagttagtagagtagagtagagaatagagttacgagtattttaccaatctcaaggtcatgccatgggtgtgctgcaacagatctcttgacatggatgagagtatcctctcattgagagctggtgccttcccctcgcgggtggaggagctcgcggtggtcgcgacttggagagggggagccatggaaatggaatattgaatcaaatcttaaatggagcttgctgttgctcgatgaaacaagcctgcatgacatagatgaaccaaatcaaacagagtactatgaatgaagtaaggaaggcaggaaatgacttactagtaagttgcaggctagcataggcatagcatggacaaaataaattaagaaaaagaaaacaaagccgagcagatcatactaggaactctaggagtagtattattacgtagagaggggatgggggcagagaaggttgcagacgcaccaagttgagacgttgtgtgttgtgttgctgcttggattggatgagcttgatctcctaattaggctgtgtcaggacagggaagaagaagatcagatggaagcaagcatgcaatggatggtttgtctactctggcggtttttatagagaggcagaggcagaggcaggcctaaaagtgttgagtaattgctgagtcagcatgggaagacggttggaagagagaatgatcgatcgatctatctatctatctatctatctatcttcctttccttccttacctacagggcagggcgagagagagagaccaagtctagtcagttgaatatgtatgtatcggaagttgggacagagctgtattgtatagaaactgaagttgtatgcatgtactgtatgcactgcacgtccgtccgtctgcgattaattgacctggaatcagtcgtccccgtggatctgtgctatgctatgccgcatactatcatactactagttgtatgaagtatgaaccgattaattgggttgggttggcttgttcaagcagtagctgtgtgcattgcagtttctacttagagagcgagcagtttacccgatcaacatgtcggccaccacggcatccaaatgaagaagatgtcaagatccattgttccaggccaggcccagtgttaaatgttactccaatgtttgcgcgttgaaccgtaccgtagtaggaggaaggaaggagaaggacatgaattaatcgatccaaaaccaaaatgtaaatctaatggaaggtgtgagcgagtgagtccatacaagacagtttaatactcctactaataagctgcctgaatccaacaaagcagcaaactacggagtaggagtatgtaagaagcaattcaattaggcaggcaggcgattcatcaaacacgtagtactcgttttcaacgatcattagctactacggagtactactacccatcaagtgatgaagaagaaagtaagtactactgtagaggggaggagctccactactggggtagtacagtaagccctagatgggatggaatggaaggagtagctgcctagctaggagtcggcgccggcgaggtcgtcgtcgtggttggagttggaggggaacttttgcttgaaggcgtcctggcgctgcatccacatcatgtgcccctgccattcaattcaatccatccatccacagatcgatctgagtgagtctgagagagagagagagcagccaccgcgcgccaccatggatgggatgggagtaggtgatactgatacctggagcgcggcagcccagacgaggaggaaggaggcgacccagaacctcttctccttcaccaccctcctcatcgtccccatcttcttcaattccaccccttccttccttcccccttgttcttcgatctcgatccgatctgatctattccaccccacccttcctgaagaaacaagacatttctctctctctggcaagtttggaattggaagtgtggggaatcaaagaattgggctgacgagccttgttcggcccatgcatacagattcattgttgttaaaaggaaggaaaaaggtacacccaaggtcccttaacttgtcatcgagataaaaaacatcctcgaaccgcaaaaccagatatgcggagtccctcagctgtacaaaactggtcacctgaggtccctcggtggttttcagcccggttttatctgacgtggtggctgaatcagcataggactcacgtgggccccacatgtcagacagtccacgtcatcacctttctctcccctcttttctcacctcctctctctctctctcttcttcttgggcagggcggccggcaagcggggaggaggccggcgggccggcgttgcgaggcaggagaggaggtgcggcaaccggcggaggcggcgggagcacagggggaggcgaagggggagcatggggagggccagctgcctgtctgccccgacaccgccgtggcggcgcgggccgtcgtggttgacgatgagcttggccctgatcgatggcagcgtcgatggaggcgaacaccgagaggaggaagacaagagaggggaggagacatgctccgttgccgctctcccctgctggccgccggccgcgccgttcacctctggtccccccccctgcccgctgcccgtcttcgccagcgagcgccaccgccgctcttctcccctatcggccgccagtcgcgttgcacgcctcccactcccccccggcctcttgcttcgccccaccctgccctgcccgctcctcgggcgcagcgccgcaccccgctcctccgacgagccgacctaaccgcgcctccccaactccaatgagaacgacatggatgccggcagcgaggaggcgaagcaggagcagcaccgggtgctagcccacaagctcttcctcctctcccaccccgacctcaacgacctcgccaaggttgccctccgctccgacgccctcgacgccgtcaagtccgatggcatggcgctgctatttgagtcgttggccgtcaacggcgtgctggagccggatgacgcgctgctcgtcgagatgcgcgtgcgaatcgatgaggaggtcccccaagccatcgtcgtccgcgcctagctcctcccccgccacccacgcccgccgcaccgaccggccgtgcccagctgcttccccggcggccaacgattcgatccaatccggcgagagagaaagggagaggatgttgctggggtcggcggcgcttcttttctttcttctatcctcttctcttctagtcgccggcagcagatggggagaggcagccgttgtcgcctccgcgcctctcggccttgtcggcagcggcggcgtcgtcctccaccgttgttgccctcctcacgaaggcctcggtggctgacgctgcggctggtgcccgccgccgctccgccggccaccgccctttttccgcgcggcctcgagcgcgtgtgtcgttgtcgggtgcagcgacgtaggtggaggcggaggctgacgctgcggctggtgcccactgtcccttctctgcccagcctcgcgcctgtgcgccatcgtcgtcatcggtgcggtggtggagcttggtcatcgacgtgccccgcctcgcccgcacagagaagacagagagaggaggaagggagagaggggaaaagagaggtgacgacgtgtcacctgacaagtgggtccacgcttactcagctgccacctagaccaaaaccggggtcaaaaccacagaaggacctcgggtgactggttttgtagagtcaaaggaccccgcatatctggttttgtggttcgatgatgttttttaatcccgatgacaagttaagggaccttcggtgtactttttcctaaaaggaaacctgcattactccagtatacgtaaagtaaagagtcgcttcccctggctccaagcctccaacaccaccatctttgtttcattaaaaaaaaaacagcaccatatatattctcaggcatcaataagatcatccacagttaaatcccccacaatccattccatgaagacctacatactcctttctcatgcctttcttttcttttaacaaaggaaaaggataatcaattggaatacatgttatcgccatgccatcaattcctcctaattcatcgacggaacaaaggcgaaaaataaccaaagtcttaattttgatgcattcgattgctggctggtacgttgtggttggtaagctgagtgctagtacgaagcatcatttgctatgcgtcggtactcaggcatgtgctgggtgacaatcatctgacattgattgattcccttaagttaataaaagacgagattacacagatgtttttatacgtgtgttccatcgttttcgttttcgttttcacaccaactgatcgaatcgcgcgctcaaacgaacaaactaacttgttgaaatgaaaaaaaaagggaaataaaataactaactagtgtagtactagtaacagaagaaacattttggtatcattcgatggatgagttgcctgacaagagcattagcttagcttagcttagcttgctgatcccctcctctatgatctgatctgatctgtctccgggctgtccatgcgcgccgccgtcgatttggcgtgcagctgttgcctcctcgggacgccatcctgatccaccacgccaagcctactactctgtcccctgcaattcaattcaataatataatcaagagggattaatttgttgatcaaattaattaactagtaatgtgttacgcagtatatgtaaataaaaaaaactggtacctgtgggcattgcaagaggatgatctcctgagggtgaggtcgatagggtgggtggttgtgttgttgtccagcaagcttccactgaagtagtcacggtggtccatgatgtccggcttgttgttatgccaagcagtagcacggcagcgttgtgattgtgcttggccctgcagctccttgatggaggaggcgccgcacgagatgagcttcatcagcatcgccgacgtccgcatccgccctgccggtgtcgtcgccgcttgttgctggggcgtgcagccatcctcctcctgttgcttctgcttcagggtaacaagctgggtggtggtgtcgtcggggctgcttgaagacggtggaggtgatatctcatcaatgccaattaaggactgctgcgccgccgccgggacagggacagggtcggtggtgcggtgatagtcggcgaggtcaaaggatgtcatgcacctcctgtgctgcgggggcgtattggagttatggtggagcagcggggagcccttgaggacatactcctcatggttggttgatggcgcggggatgaggtcgtcggcggtgaggtcttgccagacgtagccggcgttcctcctgtaggtggtcttggcggaccaggagtaggcggcgggcatggcggcgccgcggaggtcgctgaggcgggcgatgaagtcgcggaggtggaggcgcggccgcggatgatcggagtcggagtcggaggggacgtggacgtggacgaaatgggggtgatccagctgcccgtcttgccggcacaggtagtacaccacgcccaccacaacctgcttcatctgcttcttcttgagctccgtcctccacaccatcgtccgctcggggctagcccaaccattaccatcacctgacctgctatgacgactaggatttgccatcaaccaacactaccgtgtgctgcagaggcacaagatcgagtgtgtgtgtatgtgagtagaagaagaagatccaattcgaagaggaccgcccgagccgacggaggaacaagctagctagctaatccatcattctctctctctctctctctatatgcaactctctccgtcgctcaaacgcgttcgatagccggaatattttgggagtaaaaacaagtgtgaagaaggtagtcagcagttcacatgacgcatcacgaccacacaagccacatgcatcaatggccgtccgtctactatactagtactagtcaattccactccacgcgctcccatcactacacatgcatatgtacgggcggcacaaccggtcaaacatactacacttagtccacacctactactactccctagtactacagatactccatgcagaccagtgggtccagtcatcaatccgagtcaaacttgacaactggatggtcaactaacttcccatcatgtgtgtccctctcttttagcgggccgcggagcccatcaaccatgcatctgggctaatttatcctcaccacattaaccaaccgctacctagccctatcaggaattttttttattaaaagttttacaaaaataattttcaattttgaaaattgacataagtagtcgcccgccaccctctgggaaaaatcgccctcccagagggcggcaaatgtgacgtggcagacggccgttcgctctcgggcgacggccgtcaacgaaatttgcaagcggcccccttgccgccctccgctagggcgattttacactgtgcggggggccgcctgtaaatgggtggcgggggactggaattttgcacgcggcccccttgctgccctgggggagggcgattttatactatgctttatttgagaaatatatttttttattaatatcaatagttatcaaatctttttgtattgaaaattgcacgcggcccccttgccgccctgggggagggcgattttatactatgctttatttgagaaatatattttttttattaatatcaatagttatcaaatctttttgtattgaaaattgcacgcggcccccttgccaccctgggggagggcgattttatactatgctttatttgagaaatatatttttttttattaatatcaatagttatcaaatctttttgtattgaaaactatacaagattaaaatctccaagattggtaaaatacaattttattatttttttagggcctatttgaattgttaccctacaaattttttggtagtgccaaaatataggcaagttttggcactgccaaatctttggtaaggtaaaattgcatttgatcatatttggtttgctaccaaaatagagccaaaatgtaaaattgtagtgaagaatgttctacatgatcccaaatctagattaggtattaccaatgaataggcttcaatccaaatcaaacacaagtactattcaaattaccaaaatattagtagggcatgtttttggtagcaatccaaataggcccttagtcttacgcatacaaaaattcaccaccataattaaacattgtaatgataagatagataagaagtgccatcgatacacggtacaaatttgttgatcccgacgaatctagcctgcggtaacctatcggccccttctaggtcggtcagaatgcattgcattctcgtggtccttcaatcgttgatactctacttgtgtttctgactctgttatcttctggccatgatatgatggagtgacattgtcgatctatcgagtaaatccacacatccttggattgccctgaaaaaatagtaatgttattcagtttgggtagaaattttgtgcaaatcatagcggattttggaaacggttagacatacaacgaaatcgttgtctacattggggaagacaaaatatctccttccaaatgtttgttcagcaaaggatgtagccacctggcagcgatctctgcacccacactttggacgctcggaccatttaggtaaccctaatggattgttcctccaatctaagcttgcaatttccacccgatgttcgtactccatccaagcatgaatgaactatgtggtcggttcaggttgcgttatcggcccgccactggaagtaactcggactttgtcaatccattgtacgaattgacatttccttacatcctcttatgtacatccattttgggatagttaagttaatgatagtactgaggagtgatgaaaagaatagttgtaattaccacgaaatcatcgtcgacaatgtttggacacatgaaacacctttgtcctcgagttcggtgccttacggaccttatgacctgacaacggtcaccacaacgacactctggacgctcacgccacgtggggagtcctaggggatttacctgccattctaaagcctcagcagcaattcgacattcatgctcatccttccgccttaggtagtccgatcttgtttcactacgtgggtatgcacgtgttccgtcgttttgtgggttctccatgtctacccactcgatgaagttgcacattggacgatatgtctgcgtaagatgttacaattgtgtacgaagaagttagtttttttatccatttgaactttgaatagatgaatcatacctgatcaaagttcgcacattggaagaatctcctgccccgagtttgtatcatgagggaagacttgagtatgcatccatccccacaatcgcacaaaggacggtcacaccatggtggaaaccaaccagcaaaaggatcgcttcgccagttgagacgctcaaggaatggcgcttccattctcgttagttgtgtgctagttggaaagaagatatgaagaggttgccttcagattgtcaattatatagcatcgttttcagtgcaatatatgtgcactcaatgagatacattattcattagatgtgacaagacgagcacgcgcgggcgtgattcactttatgtcagcaggcagcgccgaaagttgatagtgactactcgagctgccgcttttcatgtgtgccgtgctggactgtgcgcgctactggatctgacactaccgtgaagcgccgaaagtgtgttgtcgtgagcataagttgttctagcaccatatgaatgaaaagaactatgtaggcgagagaaacacaagtagtactgcagtagtaatagcaaaagtagtattgctttacaagtttgtaagccaaaagaaacggtcacataaggactgaagaggtagaacactactgacgagacctcttacccctgtccctcctaccctgcgccctaacgtgcccctgggagtacgtgagtcggtccggtggtatggcacggccaacccgtcctgcctgtacaggtgtgacctctggctgctcctgagtgtgcacctctggagctcctccaagctgagaggagcctagtacgttgtcacatcctgatttttgtttcaggatttataaattatttaataaattattattagaatttatattaaatgttcattaatttacaagtgaagttaaatgtgggaaataaaatttcctaaatataaagcatggatggatttaattttgattaaattctccatgattaattacactctctgaaattttctcagatgtttcggagctcaattcttaatttttaatcatacaaagagcatttcagtaattacccacatattaaattaatcattaaatggtctgtttttaatattgttaaatactttgggtgtccaagtatgttcaagatttttcttggaattatttgagcataggaagtatttttaaaaattcaaagatcatttcattgattaatttaattggaaaagtaataataatcctcttcctagtcttgggccctttccagcccatctccctcttttgtctgcacggccgtgcagcccaagtcggcccagccgagcttcccccttctctttctttctttgctttgttttcagccagcccaagacgaaaagtctaatttgcctccctcgacactgtttatcttctacctctagcagccgaactgagaccgatttggctcggtttttctcctccaaatctgacctttccccttgtgtttttctaaaatttagttgaggggaaatattcctcttatcctcctctatctttacccccaaaaatcggtgcaaatcgttgagtatcttatccgaatcgaactcgttttcgagtttatctccaaaaccgagtttttgatttcccggatcgatttcttgcgggaggagtccgatctcttcaatccaaggctataaataggaccccctagtcctcctctttcgtttgccccctctcccgtggtctcccgtgcctcgtagcgccgccgccacgtgctccaccccgccgtcgtcgccggccgagctccatccgcgtcgcgccgccgcctccgtcgtcgccgccggtcgccgtcatcgccgtaaggtgcgccgaggtgtgggcaagctcggccgctatctccccgaagccgccgaccaccgcagccccgtcgccgccgtcgaccgaagccgcgccgccgctagacctcgtcgccggccgtcgtcgttcgtcgtttggttcgagggtgggtaccgttgggttcgtctcgtcgtcctctacgtgttcatgtcctccaaagtcgcagccgaccatccaatctccggcgaggtcgccatcttggtccggccattgatgaggtcatcatcatgacgtcatcattgtttttttctttttcctgtttttctaatagattaaatcttcggaaattcataactaaatcatcgtaactcggttttgagtggttcaagttgctaaattcatctaaaatcaggatctacatgtttgtttactttatatgtactgtttatttggtttttattagtctttttctttgttttgcgtgttagcttgtcgtttccgtcgttgcgaaggttcgtgagtgcgccggaagtattcaagaagattaattgaagatcgattattgcaaggcaagtcacacagatcctaaacacaatcctttgagcatgttgatcctatatttaaattctctatttatttcaactgtgcatttattttcgaatgtcaccgggtggtgtgaacttattcctttgttatggccaatttgcattgattactttattccttgataccttgggttattataacttgactagttgggctttatatattggttcagctagatattagttatgattgcttagccatgcttagaaacattagcacactattgggataacttatgactcactattatttaaggatggcttaatgatagttcacgatggttaatcgtgattggttaattaattacttgccaactaaaacttgataatggtgggttgtgagcacatggttttgagagtcgtgctcatgacaattaaggaccggttcgcgagctactgttgtgaaacatttatcgtgccaaccacaagccagcgtgggcaacggctttatcttttgtgtagcgtgattcattatagtgcgccagactgagaagtggcgagaagtccacgggggtcgctggggagtccatgccttgtttataagggggtgattatgatccaggaaaggtgtgctgtaatggattatgttgtgcaaggggtattgtcacaactcctttccgaggtaccgtggtggtattgaggcacatggtgacatgatgtggggttgtgtcttgtgggtacagtggtacacctctggccagagtaaaactattcgaatagccgtgcccgcggttatgggcgggttgagcaatgtttttcgtgattagtctcacacctctcacaataattatggatgttatatctggtaataatttgcttagctcctggtttggagttagatctgtacagccgggtatggttgttcaggatggttgggcctgtgcagcatgggtgtgctgttcagtgttgattaaaatttctgattaattactccactgttttactcctcttaaatgttttgctaaatgctgcttttgcaaatgagcctatattatgccatcctttggtatccttgtgcacttgcatatttgctgtgtggcttgttgagtatgtcatatgctcattcttgcaataatcaatcaacctcagttgaagaaaaaggatccagaaggagaagacgtttggcttataccccagttgagctgcctgtgggagtggagccggagcttcgctagaccgtaattccgctgctgttttcttttcttttgtaagtgtgtaacgttattattatgatggatttgtatattaaattgtcagtttgtgtacctcggctgattcctggacgaggattttatgcacaaataagttcggaaattactagtgaatttccgggcgtcacctctggagctcctccaagctgagaggagcctagtacgtcgtggtggtgcgcaccgtgcaagtcgtcgtcatagaaatggctagtaggaccagacctaccggcgtgagacgaagaggcaccagtacccaagatcccggctgcaaatcctgctggacaaggaccatcagtttcatacaggtatttaatagtattaataaaaattaaagtaccatgtgggcgagggatcgacgctccgtgagaggaagagctggcgaacgcgcccgaagaggtggcgaacgcgccggaagtgctggcgaatgcccctgcagagctcgcggaagcgccagtcgtgcctgcgaacgcgctcgaaggcagacgaggtcctgcgatgatgaaacgtgcagttaaaacgtggtgacgtattcgtgcaaaagctgaaacaaaaatgaactaacctctgggctgagctgtaccgtgcgaaaccggtgctgtaggtcgcactgctccgacgctaggggcgctcgaaggcaaacgaggtcctgcgaggatggaacatcaagttacgacggggtgatgttttcgtacaaaaacagaaacaaaacttaagaaacctctgggctgagcagtactgtacgaaaccggtgccataggtcgaggttctgctccgacggtaggtgcgcgaggccgtggttgtactggaccagctggaggtacaatgtccacggcgctgcgacaggagaagacgcgcatgaccgcacgcatcttctcctgcatccggtcgaaggtcatcctctgctcaacgtcagtcaagtgcaaacctctgttcaacctcacttggactgcggtgatatcggcactgatatctcgtgcggcatcggcctatgcaagatggaaataaaaaattcagtaattgtcctatattatgcaagataattgaaataattgtaagaactaatacaaattcgacgtacccccacgaagtagtctcggtcatggtgcatgggatacgcgtccgtgacagcggcaacgtgcggctctggggcgtctggagtgaaggtcacacacgcacgagtgcgaggaaggtaccggcgaaggtagtcacggtagttctcctctgtgtgtgggaagagctcgttgatcacctcctctgtagctaacacccagtcgtcaacgtactgttgtacacgtggagcccaaagtgcgcctgctagctgtccctgtcgagtcaacttgtgaagagaggtaaattatatggctcgatgaagtaattagcataaaaattttgaaatgaaccatccgaactcacgagtggtcggcagggaggacggtcggctgcacgttgcccggaaacacctgcctcagtccgaactgtctcatcacacactgcgggcagtgaggctcgacgaaaatgtcgaacaccatcggcaggatggggagccagtaagcctggtcgcatgtgcacaaggacgaaagtcctagcggtgctctcgcagcgacggcctcttctgtgtacggctcccagatgacgtcgctcggctggagacggtcaaactcaaacacaaagtccgggtaacctcgtctcacctggacgtgagcgtaacgacgctgcaataaacatgatcggaattagacatgttatgtgatgataaaaaaagaagacgattgataaacttataacgcagcgaagttgcactaaccccacgtcgacaccagtaagtccccatcgtgggaccgtcctctggccactgcgcgctgcgaccaaccccgtagggtgcgctgtccaccactggtcgacctatggcaaacctctcggctgcccaaagctgaagcaacatagggcaaccagcgaagatcgctcccgcgtcggtcttcgtgcacgcctcacagagggcacggtacatggctactagcacggcagaaccctagctccactgcggcacgtcctgtggctgagcatccgcgatggaccgtgcgtagtggaccagccggcagtccacagcgtgcccgtgggtgctagtgaacatcacccacccgaacaaccacaacaggtacgcctcaagggagcgtcggaccgagtaatcatcagcgtcagggtgcagaaggtccgtctacaattaagaatgaaatgttagtacaaaacaatctgttgatcgcaaaataagcatgtatgataataacaagttatttacttacagtgaactgaagcaaccaagccttgctaggcccgacggtagagttagggggaagggtgtcggccggtcctaggtgtggaaggcgcatcacgtgctcgaagcgcgcggtgatatcctccttccacccaaaaacaccgtccacgggaccaactggggctcctgccagtggtagcccgagcaggtacgacacgtcctgcagtgtcggagccatcttcccacagggaaggtggaacgtgtgcgtctcaggtctccagcggtctaccagagtggcaaggagtgaccggtctgcatcccaccgcttcgctgggtcacggtcgtccgccgccgcctcaacaagcctacaaagttggtagaaggcctgccgcacgcaacctgcatagagcaaactttaaacataagtacaagacaaagcaaagttgagttgaaatgtgaacatacgcgttccaaggaatgtgacgggggtcgacacgcaaccactcgcgcgacgtgcgtggacggaaggtgccgagctgtgcaccctcgactgatgacaggaacgagcagtggctcctgtcaatcccacggttgaacagcgccggtgtgtcgtacgccatacctacatccaatagatcgatcagaaacataaaaataattagttcaacataagtaataaatgttcataagtaaattactaacacatattaaacaagagtacaaacaaacaaaagtgtcacaatacggaatatttctgattacaataataactgcagttacacgatatgagtacttagtccgaacactcatcacgataacattatgatacaacaccgaataattcacaatactactagtacaacaatagtcagaggtactcattacaacaacattcaattgaaattacacgatagaagtatttagtccgaacactcatcacatcacaatagcattttatttcctaaatcgatagcattgttacaccatggaatcgcctgctgcaagacgacgccttggccttgcgcgcctgcttgttgttccttcaccaagtggtcgccttccatcacttgcctgtccagatggactagcatccgcgccgcttggaacttctgcattcttcgggcatttcttgtaagtatggccacgcagatcacacttgctgcagcgtaaagtcctcccacctgcttctgactcatccatatcatttctgatgcgtctagtttggcgtcaaccctttttcacccttaacttagatggatctggaatataaaaaactttgccactcagcgttgtgtaagatcctgagatcccgaacccatatatctcctcactccatgtatgaaagattgcttctttcctgaaataatttgagacgtacacattgggagatatgccacaatcaccggcagtagcaagaacgtgtgagcaaggaagttgatgaagctttggcttcatacaactgcaggtacatccaccatccgccttcaagacacattcctgcatggcttgcttgcgatagataccacgcctgctcctatcaacacaaattatttcataccgatgcacttgtgtgccttgagcaacaactctatgtctccgtgcctttttgattttatcttccatgtactttgtcactacgttgccaaacactatgttgtatcggccatggacggaccaattttcttgtatcgatccctaaagtaggcttgcgtgccgtgaaggatgaattcaacaatagcaaccaatggaagtacccgaactcctcgcattacccagttgtacacatctgccaaattggttgtcattatgccataccgagatcaatcggtgtcgaacaatagagaccacttctccttaggctcattctcaatccactgagtgaaatttctgatggacgaccctgacctccttctcattgttggtgggtcatcatgtaatgcaccaagaggtatgggaggctcgtcaccttcaacttgtggtctgcgagattgctcgtctgtttgcttcgttgtcaactcatccaacttgtcccacaactcattaaatttcttctcttggttctgtgcacagagcctcttaaagagctccataagatgcttgttcttgaattgcttgtagaaatttgcacccatgtgacgcatgcaccaccgactccgaacattaggccacttagctggaagtcccttctcatcccaaccgttctgcaagtagtcaatagcccgcaacatacccgcatgacaatcatgtataaggcaaacgttgggcctcatacgcaccactgcaatgtgcactctctctaggaaccagtaccagctttcagtgttcccactctctacaaatgcaaaagccataggtagaacctggttgttcccatcacacccaattgctgtcaatatctgacctcggtatttacctgtcaaaaaagttccatctatgcatagaacaggtcgacaatgcacaaaagcattgatgcaagcacccaatgagaaaaaggctctttgcagcacactctttattcgatcatcaaccgatgtaaatgtatgtaggtcatagtaagtattattattcctctgggcaatggtggctaatagacgaggcaaattatcataagaagcttcaaatgtgccatacctcatctcaataatcttttgtttggctctccaggcctttgcatagcttatggtgtacttgaatttgttctcgatgtgcctaataattgattttggttcaaagccaatgttaccaacaacactgctgtacatctcacttgccacaaaagctgaagtgatgtttcggtgatacttctccaccccttgtaagtagcattggtgctcggtcacaatgctaactttccaataatcattccatttacccttttatgcatggacacgccacggacaatcttccttcatgcacctcacttcatacacataatttgttgacttgaccaccctaaactctctctgcaaggaaactgcccaatgcttcaccgcctccttcatctcatccttatgagcatacctagcacccttaattacctcgttctccttatactcccagggtacatgatcaccctctgatataacaagtccagagaagtcctcatttgcccaatcagtggccattacatcaccttcctcattggatgatgcgtcgtcctccgcttgctcattatccgaatcttccctctccatttcatcaacaattataccgactctctccccctcatccgccatgcccatggcctgctcctcccttggttgattttcctcattttgcatcgatggtccaacaacatcccctgcattgctaggaccctccacatcttcggtttgcattgaaacatttgtatatttctcttgtaccgacacaaatataacgaggggccatgaccgttcaaaagccatttccacataccgtctccaagcaacagtgctgtccatcggcattagttcccaaaaataaccttctattgcacgactcactacaacagatactgacattgtgtagacttcttggtctattctaaatcctctcaacaaccaactataaattgactgaaatgttctctccgcaggcctatcgatgcccttagatgtcattacaaaatctgacagatcaacaccatctggaccaaatctaatatttccttcaccgtgaactatctgaaatgtgaccttatttgacattgtgcctgatgaaaacaataattacgttaacctcgcatttctgtactacaccctaagttacattctctacaatattgttctccaaaattctaaaagtaggttacgttctccagatcaaactaaactacatcttacaattaacactactatctatgtctcaattcatactattatattctgtgctctggatctacacatgtgtgctgtgtgctatagatctgctaaaatatatggaactaaaactaaaacgcaacatatatactcaaacataacatattagtacaaatgcaaaagatgtatgggagcaaacctgtgatgaagtgagcgaaccagcagggcttcgccgctccccttctgctgtcctcccctctctctctttcgttttttttggatttttagtgaatataatgaaatttgagagaggggggacggggctatataggggggaggcaaaaatcgccctcccccagggcggcaagggggccgcctacaaaattccaggccccccgccgcccatttgcaggcggccccccacacaatgcaaaattgccctcccccagggcggcaagggggccgcctgcaaatttcgttgatggccgtcgcccgagagcgaacggccgtctgccacgtcacattcgccgccctctgggagaaatcaccctcccagagggcggcaggcgactacttctgtcaattttcgaaatagaaaattatttttgtaaaacttttaataaaaaaaattaaaaataaaaaaaattcccttatctgcaggttacagcgagtaagcgacactactattctactataatgtatgcatgcttaattccaaacaagtgtactagtagtatttatttactaaacgagcataaacttcttttttcaaaataaatataattatgcttgacagttgttgtcgattgacaaacacttttaccaaagggtaagtttcacttgattatgtgtaaaaggtaaatggtaaatgtaataatctctccaaaattgtatcccctattacataacccttaagagtttatttatagcttgcatatctgggtttagaactctaagtagggatgaaaacggagcggatacggacggataatgctcataccatattcattttcatattttttaccggatacgaaaacgaatacggatagctcgaatacggaaacaaatacggattatctcgaatacgaataagaatcgaatatgatcggacacgaatacggaaacaaatttttctcggaacacgaaaaccaactcaacttctaatataaataaatatcaacatatataattagctcattttatataaaatgaggtataatttataaatattttttaaaatttaaataatattaatagtatggactagtgttaagagataaactactattaaaatctataaatgtatattgaaggttatagagttagaaagaaatggggtatgtctcatgggtcctgcggatatccgaatagcactgttcaccggatatccgaattattatccgtatccgacggaaaccctgatattatattcgtattcgtatccgggagaaaatatccgtattcgtatccgtatccgaaatatccgagaattatccgatccgaaaggtatccgtatccgtttttgtccggagcggacggaaactatccgctccgttttcatccctaactctaaggtactgttagtgagtttacacaaccgtctttgtgacatgtatgtttataagggtaatactagtcttttggcccaacctaccggcccactggccctaaaggtctcccctcctgggctgcttattgggcttccttgaacggacattttctcatactgtaaaattacatcaaattttagtatcctctagtaaaatttatctaaaagttttttttaagcataacttatattttgtgtttatagaaccttttgaataatgttaaaaattaatagcgtcatatattagaaaacggaggaagtaatcatcatcgatgattcatgtatactattcttttcatcattttaattaacggtgaatatcagaatatagacggtcctctaatccaaatcggccatcactgacgatgatggatggtgctaattaattaaatctttaaaatgtccacatatatatgacgtcgtagggcacgatagtgacatctatcgcagtgaatataattgtgacgacgctttgtcaaaaaaaaaaaaaggttgtgacgactccgatcaatgtaatggtggagtatatatgacagatgggcacgcatggagagacatatcatatgtttgtgtatcttgcgtcagcttccactgatatagtattatgtttaggagatggattttcattcatcgagagatatccctcgcttttttgtcataaaaacaatttttaaaaattgaactatatatttgtacgtagagtcatatatatatatgtctcgttaatttatcttgtccattcttttttttttgactgaaaacatatttccatcatgtcatctaaatagtcataaaaaatttaaaaaatttaaagttacatgtgtacggagtgatatgtctcatactaatctatcttctcaattctttttaaattattttgatggaaaagctaaaaaccatcgatagtttttatcgatttcacacatatttcacgcaccacacgcctggaccaactaaggaatgaacattttctgatttgaattgaaattacactttaattaccttgtaattatactataattacatgcaagttatattgtaattatgtttgacaatttttttttaaaaaaaactatgggtataattttagatgcacccttttttggactgtctatgtagtatttgacaaaaagaacccctaaaaaatctcacaatttttcaaccgtcatattgctttaatatttgtgtgcacctacctaatgaaacataacctaccattcctcatctcctctcccccttagcggccccacgacacgagcttgagtacttgatgccgctgccgccacctagcctcaatggcttgcgggaaggcgtcaacggcgcggcgagccccaccggctggcttctcccccttacctccctccctttcctccctctcctactcaagctggtgtctccccgtcatcggatccatcacaacagctgcccataaactagctttgcccttgccaccaacaccggcccatcaccctcctccatccccatggctccagtgccgccgccaccacctcatcatctgcccgtgtccaccgcccaccgtcggcccgcgtcatccctctaagctcagtgatctccctcctcttcccctagccccccctctcctcatccaaccctcaccctaacacgggaccctaaaccttaactcttctaccttcgttggggttgctgaagctggcggagctagggaagaaggtgttgtcagagcttgaggaggagaactgggatcgccggagcatgaatcataaagcaagtatcaaggttagtaatttgtaagattttggctccccaaatctatcgtcagctatttagctattttttattgattattttaaggtgacatgaggatatggtgagagggatgaaaatactttcccttaaatgtatcgatcgatggctaggaaatatgaagtattttctctatctcaaaataagttaatttagtatgggatgcgacatctgttagtactacttcctctgtcaaaactaacctcatattaggatgtaaacatttgtatgtccagatttgttgcactagtatgtatgacgttgactgtttttttaaggacggagggggtacgtactactagctagctagatgccgacggatgatgatggattggaaaggcaagtaagctggagtaggtggtactagctagctaggtgtgccacgcactcgcactgcacggagtagtactgctgctgcagagaggcgcacgacgactataaaaggagagtgcaggtatcttcctatagtagctagctaattgtattatactagcttgcttgttcaattcaatcgagcagtagctaattgcatagtgatcgatcgatctgtatagatggtggtggccggcaagaagcagggacggcattctttttctgcatcatcatcgtcgtcttcgtcttcttcttgttcagtagtgcagctgggtcatcatcagcgcccacagggtgaggaccctctcatcggcatcaaagcagcagcagcaggaggaggaggaataatgagaaagggcccgtggacggagcaggaggacgtgcagttggtttggttcgtgcggctgctgggcgaacggcggtgggatttcttagcaaaggtgtcaggtttgcgcggcggcgggtgatgagcatatgcgtgcgtgcatctaatctatcgattaattgttgatgatgtcgatcagatggatggatgcatgcatatgccgtacatagtagatttgatgatagtaactgacataaatataatgtatgcgtgcgatcaacgctggttgttggatcgtccgtcgtgtgtatgggtggtgtgtggctgatgcaggtttgcagcgcagcgggaagagctgccgtctccggtgggtgaactacctgcatccagggctgaagcgagggaggatgagccccgaggaggagaggatggtggtgcagctccacgccaagctcggcaacaggtggtctcgcatcgccaagagcattcctggccgcaccgacaacgagatcaagaactactggcgcacccacctgcgcaagctcaagctcaaacagcaaaagcagcagcagtccgacgaccaccacaacgacaacgacgacgacgacgaccgcaactcctcctcctcttcgtcctcctccaacagcaacagcaacctgcagcagcagccgcagccagaggatgagtcgtcggccagtggcagcctgcaggcccaacatcatgaggaccagcaccaactgttccttcatcctctctggaacgacgacatcatcgtcgacgtcgactgctggagcagcagcaccaacgtcgtcgctccgccgccgatgcccgcctcgccgctctgggatatcgatgacgccttcttctgctcggattattcgctacctctctggggatagtatatatcatccatcagccgccaagacgatgacgactacatcaactcgatcgatcgatgcctcctaatcatgtgggagtactcagctcatctcaattgttacatccttgctacagctgctaattactgtaattactagcttgcatatagggatcgacggaggaattaatatatacatgttagtaactcgttctatagcgcaacttgcagttgcatctcaatctctgatcagtactatataaatatatatatatgtaacagctgctagctatagctagctgcgtacacatccatatgaatgtgtgtgtgttcatgcttgtactgcctcttgtagtatatgcacatatacgtgcaagtgcaacagacggctgctggctgatatattttgatcagcgcgccacgtgcacgtgcatacgtttcttcatttctggcaaattcatatgtatcatgttatacactgaactgaatactgtattatgcttcacgtaccattttgtatatatacatatcagataataattttatggtggcttggtatggtaccgagtggaattaacagatgatcatcgttattcttttcgcacgcgcgcgaagcaagcatattagggcagtagagaatctgaatttcgcaaatagcttgcttacacagaatctgaataaatgcattcatgagatgcaaagccaggctgattgaattgatacccgcccgccgcgtgaatcttaataattgtgtctgtacatgcagatgcatgagcaacatgcatattgcctcctacctgaaaactgtggagcgattgcaactgatacgtactatatcaatccaagatgctgcgtactacgtgctatatacagaacaacaagattaggaggacagctatctaaatagctactgttgccacccggccggcgattagctatacaagcaagagaagatcagaggccggacaggtacgtgttccttttccaaattccatctcaactgtagtcggcctgaatgagcgagatagatagtagatggagggaattgggtgatgtgtattagctagctagctgaaggtcagccactgccactgcccctgcaagttggagaggaaaagagaggccccaattcaactgcttccaagctagatagcttctgataagccacctggtttttattcttttcttttcttttctttctttctttctctccggccggccggcctttaaaaaggagatcgatcatatcgatgacgatccaacaagatgaagagctagctagctagaaggtgccaagattaaagtggtagagcatatagatatcgccgtacgtgataaggagccagcagcagcttggtacctttgtgcaacttgcctaatttgctgtaattctctcatattacctagcattatcctgatgattagtttactccaactagctagatagtgcttcatcaccatgtagctagcttgcttgctttagtgctgttgtcttgtcttctagcgtgctgatagctaacctcacgcatgcccagcctcatctcatctgatattgatcctcactttcttcttttctgacccccacaatgctagctgctgcttgcaatctcttgcaattttttcttttcttctccttcctgccggcctccaattcgatagctacgtctagcttgacatgggatagggatatgatatatgcactgcacaagaatcttgcggccttcctgtttcttctttttatcacaacatccataaagtcgctttctgtggggaaagatggttgcaaaagtattactactaccctctgtccttcttagcttaagcttagggtcaaatcttctctcatcatatattccaaaaggaagaaagaaaaaacatatggatctagtgacacgcgcactgaaatcatacaggggatttaaggttccttgttttgttgttcacaatatgtgttagtagtttggatgtattttagatatagatagatgcttgttaattagtattccctccgtttcatattataagtcgttttaacttttacccacttgaacttatttagacttgatcgaatttataaaaaaaatagcaatatttacaacatcgaattagtttcatcaaatataatattggatatattttaataatatgtttgttttatattgaaatgttactatatttttctattagtcaaacttataaaagtttggcaaaataaatcaaagtaacctataatatagaacagagggagtagcaagaaagaaaagttcgatatagtgtataccgcaattctgaaactagtatattatgcatgcatgaggataaaagggaggaaatggttctaaacttcgaaggagcgtcccatcgttgtttgctgtgaaaaagctagttaactatttcatctgtttataactagtaatatgtccgtgcattgcaacggatgagatccatataatataggctaggaaggtggattaagatgactagaaaagtggactgaggataaagcactggaggcggtggttacatatacaaaaccgtagaaattaagatgtgtgcgggtggtgagaggaggagataaaaggatgacgactcccttttaaatagtagagatttctcattagtgaacaaaaagctgacgtcttgaggattcagtacatagctgacacttgtgtctctagatgtcttagtgaaagtagaagtgcacttggaacatactataagatgcatccatgataggcagcattgacacagctttcagtgcaaagtcaaacaacatactccatatagctaggctagccctgcatttgctttcttgttccatataatcttacaccttgatgcatcagtggcctatggtctgatcatggcaaaagaaaagtacagtatattccattcccaagcataattcaggttcacctttttctaggcagaaaattaagcgattaataatagttaataagtgtctgacagtaactagctagctagtagatagagactggactgaactaatcgtcaatatatataattgatttgtcagaattaaggagcaaaactggagctgcaggtacatatattacaggtagatgtgggcctatcctaaattctaatttcggtatgcctgtgagtgctgatcaaattaagcacttaaagattactttattgtggtgccatgcacgcagtaagtagctaatcaaaagtgagcagagctgaggaatcagccatcaggcatatcatgatggatggatggatgggttagccttgcatcgatcattcagttaacacttaacacccacaaaggattaattcaggcagacactgattcaacaagaagcaaggcatcagtagagacgacatgcactttagccactaatataattactgggtaagtagggtcttcattacaacgaccgtcccattgatcatggaggagggctacgcaagcaagcaatgcaagcgcatgattgtttttcgatcgatcacgtcactgacgaacgcatatccatcatcattcatatccatccaacttgcagagaaaagatcacgtcgatgttagctcaaggcaggcgcaatacactacagagtttaattaattccaagtggccttgccgattggttatataattagcgtgtataataacaaacgcaggcaggcattgccattgatgacgatatcgtactaactaactagctagacaattgattgaattggatgggcttatccacgttttcaaatcaccgctcgcaatttcgttaggatctatcatatcacacatgcatactggctgcgcatgtcgatcacactagctatctaatctagatcgatttgtccccaatggcagacaacatgccatatgaccttatcatcgtatatatatctcgttttcgctggaaggtggagcaccccctgcctacatgtgtttgtgaaaatcggcattttcacatgcagacgtcacaaccacacgcaaacacgattttcacatatggacgtcctaaggaagctgcttggaaaaaccgatttttacaaccgaccaagcaagaacaccggattgcaattttttttaaaaataaaaataaaaaatcaaatccaaaaccctagccaaggtccccgtaaggctaccgccatcatcgagcaccgccacaacagcctgctgccatcgcgtggtccaatgtcgatgttgttgttgcgtggttgaggtcctcgtcatgctgtcgaggtcgaggtcttcatcgcgcgctcattgacactgcccttgtgcccgatggtgccgtggatccgccgcctccggccaccaggagacggatccgccatggctggagccctctcgactgatcttcctctcccgccatcagaggggtagaggtgtcgccgctaccagatccacgaaatgccatcgtgggtttgccgccttcgggctagcaggagacagatccaccatggctagggccctcctcgatggttcttcccctcccgtcatcgaagagggagatgtgccaccacctatctctgttgtcgtcgtcaccgctgtcggcctccacagtcgccgccaacctctatagcgatcgctcccatagttagccgctcctggcaccaatgctcctgtcattgctcgatggggaagagaggagaagagaaggagaagtgaagggggagagagaagaagtgaaatggattgataaggagaaaagaaagaaaataaataatggggaatggagccggccagtcgtgcctcaattttcacatacaaacctcttaagatgctcgtctgggaaaataatttattattgtagacggatctgttaagagacctacttgtgaaaatttaaaatgtgggccttgatcaaacacctctcgcacatttttataagcgggtattttttttcctccttagtaaaagtaaaagggacctacacatgaaaatcctttttaatagtgcttgccactgcttacgatttttaagatggaggttgttactacttcattgcagggccaggggatccaaaactaattttcttgtttgggaggggcaaaaatgcactatgctgaattaaagagcatgcggttagctatatactagtggacgacatagaaaaaaatttcacgcggttgcaatctccaagtgatatttatcctttactatagttcgaaatgttagtgcacacatgcaatgcactaacaaagctttccttgtcatactagtgttgatccgcttgcgattcttcttgaaaaaaaatgtagcaaaactcatatatatataatgtaaaaatctgaaaactatatccatgtcatctagctagagaaaacttttactctcaatttttttacgcatgattaaatttaagggtaaaattttactcttgataacaagaatatatatagaatgatttacactgtatattttacttccttctagtccatatataactctctgccgtttcgtttcgattggggaggggggggattcccacatagacccatctgaaaatgatcagtgatcgatgcctagttaattatcctattgcaatactgctttcttttcttttgaagatgaagataaagattaaatttttttttgcacaaaacgaggtggtattaacgtatgattgattggattttaattataacaaactagaaaaaagattaattaatatgatattttagagcaactttcatatagaaagttttcgcacaaaacacattatttagcaatttgaaaagcatgccacgaaaatcttaatctttatccaactcttgttggagaaaagaacgggacctaaagtagataattcaaaattaatacatgaattattcattctttaatatgctcgaagatcgaagaaataccactagtttccgtctatttaaacgtacattacgggatgcatttaagaatgtgtgggtgcgctccgttctttttaaaaaaaaatcaaactaagaggagatatgacccctcctagtataacgaatctaaacaaagggctatccacattagttgtaccagaagaggtcacatttcctactaggttagcttttttagggtggagtgagtagtgatgtgtgtgtgggtgcgtcatataataaaaaaatcgttagatactccagaaaagagtagcaactaactagggagcaccaaggcatatttagtacttgcactagtagagtagtagtagggagtggatttttatctctcgaggggacattctctcgttttatgcatggtgtttaaaaagttatcaaaaaatttagaaaaaaatattaagatagatcaatatatgatatatcttttcgcaaacttgcaaattaaaattcgacttatacaattcaaaacaaaaataacaaatttgaccatgaattacgcgttctattaattgtcaaattcgttatttttattcctacttgtataagttgaattttaatatgcatgtttgtgaagtgatatatcacatattgatctatcctattattttttaaaaaaaaatttgatggctttttaagtgacatgtaaaaataaggggatatcccataatggatgaattgagttttcggtagtactagtagtgtagcctgtagttcttttttcccccttgaaaaggagaagtaacaaggtgaacaggcctcctaacacaggttgagagtaaaccaacattatcccaccaaagttttacggaataagttcatacgaggtcccttaactttacaccgaatccgattttcgtccttcaactcaaaaaccagatacaaccggtccctgctctatcaaaatcggtgcaaacgaggtccctcggtggtttgaaatgcggttttggctaacgtggcgccaacgtggccggtttgacttggtctttgtcccacgtggcatttgacgtggaacttacgtggcaattcgattccggaaaaataataaaaatagtggccccacatgtcagctacacaaaaaatataaaaatggtggggcccacgtgggccccacctgtcaacctcgcctcccttctttcctctccccctctcttcaccagccgcacgccgccgcagaggcgctccacctccggcgccgacgactccctcagtctgggcacgtcggcgaccgccaccgccaccgagaacgcctcccaccacagcacgtcggcgaatagcggcgtgtacctatcggcgaccagcaatgtcacgcacaggcgacacgtcgtcaccgtcaggcaccttcgtggtcttggattgcgaacaggacgaggaagcgcttcgggaggtggagcgcaaccggaaccacaagcggcagtgggctgcccaggggctggcggggcggcgctgggcgctaaagatgaccgagatgaggccgctcacgaggacgacagcccgcgtcattattcttgattctggccaattaattcttgattctttctggatgcgatgattttagcttgagcaagcagtagatcttgatactgtaatggttactcggtcgctgccgtcttgcttggcactgctcgtcgctgccctggtagcagcagcagcaaacaatatgcgagattcttcagggaaataccaagttctggtgctgataggcggcgccatggccgtaacggcagcagtggttgcgtcggtgatgagaagctgcaggggtcgagcatagggatctcgatcttgtccgcctcctcctccttgcttgtgttgctctgcgccccggctgagttgccgttggagcagttggccgtcgcgcggtggaggacgacaacggcgagggggacgggacgagcacgtcggtccaggtcgtcttcttcttgctcttgcccccacccttcttctgctccggcaacacccgcttcttgaggtgcgtgctccacctcgccgttggcgtcctctcggcctcatcccgtcgccatctcccaggagctcgccgccactctccactgctccgcccgccgcccctctctccgcccgtcacccctcggcgccgcggtgccgtcgccccttgcccctcgcctgtcccggcctgctccagccaccgccgcttagctccgctggcctgctccagccaccgctgacatgtgtgtagctgatacgtgggtcccatgatttttattttttaagattgaattgccacgtaagcgccacgtcaataccacgtgagatgaatacctagttaatggagccacatagacgccacgtcagccaaaaccgggcataagagcaagttcaatagtatagccaactactagctccaaattatctatagccaatttatataatatttgcttactatactataatatctggtcccacctatcatacacacattatgtcttggagtccgtgctgcagctggctacagatctgtagcccactgctcttctctctctttatttatctctttaaaatatgtttataactggcttattgcccgctattgtacctgctctaatactgccaagggaccttgtttacacggttttgtaagttgaaggatgcgttgtatccgttttgcactcgagggacgaatttcgaactcagcgacaaattgagttttactcatcagctccaaatttccagtaagtggacaaaggaatatgggcctatgggccgccgaagttctggcccatccgtccaatgagatagatgggtgaccagttaattgggcctcccgtacgttgaaggcctgaaatatttaggccacggaaagtgctagcatgacatgcgtgggtcctccctatgaactaattcacatttaacaccgtctattcgtgagtatgttttacatgaaagggatcatctgagggggcgtctagtatgcggatattcgcggtcagcgaacgttccaacagcctctcgttccaacatccgcacctggtttctgacgcgcgtgcaacactgcaagctagccaagccagcccatgggctttaacctgccttttctctttgtaccatgccttagcccaagaatgtcttgatcaacccaaaacatatttaggaaaaagtacaccgaaggtccctcagcttgtcatcgagttacaaaatcgtcccctaactgcaaaatcggatacaacgcatcctccaacttacaaaaccactacaaactaggtccctcggcggttttgaccccagttttgtatgacgtggaggctgagtcagcgtgggacccacgtgggccccacatgtcagaatgccacatcagcaaggtctctctcccctgccacgtcagcaaggtctgtcttccctctcccttcctctctctaatctctatctcactcttctctctgggcaggccgtccggtggtggagaggaggtccgacggccggccggcgatgctggagaaggagcgacgcggcgccggcaggccgggagcaagcaggcgccgcggcggtaggcgcggaggcgggcgccgtggcggcggttggcgcaggggcgacggaggatggaggaggacggtcggagcgaagctcaacgatgcgagtcctgtgacgagtggccacttgcgataggggcgacgacgctcgggcattcccggattggcccggcgtgactgccgctctgattgagaccagtggaggcggttgcgctccgatgtgatttggtggcgagtaaagacggagcgagctttgcctctatgtggcggggctagggtcttctagcgacgaggcggcttagggtgagcagcccgcgggcggcatcatggttgggacttgggggcgcggctaggcgagggaggaggttgttgtcgagcttgtatgctgttagagaaaggagagagaaaatgaaatcgtgtagctcgaatttgtatgctgttatttgatagtatctgcaggtatgagtctcgaagctgatgagcattcgatgattaaattttagttgcattgcatcttcaaacagtcccctcagttcgtgcttatatgatttatttacagaaatgatattgtagtgtttgaatggattcaggttctgaagagttctggagcttattaagagtgcgcttctggcagcactagaaggttactgttttgaacgcttgaaacttactgaattattggttgcttgaactgcgaattgtgagcgagtataatttatgttgctcctcagttgtctttttctctgtgcaacagctccgattccaggctccctgtttagacagtatgatgtacaaggtccaattccagttataaaagatgtttttatccctccagacacagaagaagatgggctgcctgctgcccttgaagatgccatgcctctaatttcttttttggcccctctatgtaagaagtgttacagtttgtttagtcaatttgaacatgtaataatgacaagataaatttacgagcagatcgacacatgcaaagatcgaattgctgctgcccttgataaattgcgatttacgacatacatcttcgtgggagcgaggtgctgcttctgggcaggaacctgatactgttttacttggtggccgaggttttggagcagccatgtctgctctaactgacgccctcccccgacgtcctgcttctctccgccggccgcctcctgctctgctcccgccgtcgcctcacccgtgtgaagccgctacacgccgctggcgtcgctgccgctggagccgggtccacgtcccgccgccgtcgaggtcgcccacaagccacatccggcggagaggaggcgcccctcctctgcccttttgctgcctgacccaggcgtggtggcctcctcccgtcgcagctgccgccgccgccgccggttctcctcctctcccgcctcgtcccgggtgacctcctccccaccccacccgtcggccggcttgcccaaaggagaaaagcgagaaagggagagagagggttgatgacgtggcatcctgacatgtgggtcccacgctgagttagccgccacgttggataaaaccgggttcaaaaccactcaaggacctaaagcgaacggttttgtaagttgaggtatgtaatatatctggttttatggttgagggacgattgtgtaactcgatgacaagttgagggaccttgggtgtactttttccaacatatttatacctagactatatacttcacatatgtaaactatatacaaagaaagtttgtacatgtaaatttttttcatgtaaattttgtacatacaaatttaaacaatgcaacagtgtgcaatccctttctaaaagaatatttatacgcgaaaaaaaatctatacatagaaactttatacatagatattttatagatataaactttatgcatagaaaatttctgcatataaattttgagcctataaactt

SEQ ID NO: 8478 - DNA, 1125 bp, Oryza sativa
  unsure (1)..(1125): unsure at all n locations
aaaatggccatggagatggtgcttcaggagaagcagctgaaacgcaaactagtgctcagacttcacaatgattacaagatcagccgctgctgttgttgctggtagttgtaggtttgctttgttgtgcttgtagaacaaaattactttagagattgtgttacttgtaaaatacaacaaaacatgatcatgttgtaaagttacctgctcaggtttatacacgtccatgtaaatcaaagttcatactgtaataacttgtaagtatgtaaacatgactacacgagaggtttgagggtaccattttctcatgttttcggtggcaaagataatttttcggatgaaatattggcaaagcagtgaaacatctatctatctattatattattaaaacagctttgaaaagaagcaccacgttcgctgtgggggctagaaattcccacattaatcagagaaaaagaaaaaaaaagaaaaggagagtccaagtaaaaatacaatttaaaataaggaatattgaaagaagaatccatataggaactcaatacaagattaattaaaattcggaataaaaataaaataaaatctgaattagcaaaaaaaaaaagagtccaagtaggaatacaatttaaaaataactgaaattcggaattagaaataaggaatattgaaagaatagtctatataagaatctaatacgagattaattaaaattcggaataaaaaataaaaaaatcgaaattagaaaaaagaaaagaaaagaagagttcaagtaggaatataatttaaaattaactaaaattcggaattaaatataagaaatattgaaataagagtaaatataagaacccaatagtagattaactaaaatttggaataaaaaataaaatataatctgaaattaggcaaattaaaaagagagttaaagtaggaatacaattttaaaacaactgaaattgaaaataaaaaataaaaatatcaaaagaacacaatacgaaaaataaaatacattctgaaattagaaaaagaaaaataagatatcatctaggaatacaatntataaataactaaaattggtgataaaaaataaagattactaaaataaaaaaccatctgaaacataggacgggatta

SEQ ID NO: 8479 - DNA, 9991 bp, Oryza sativa
gtgacaaatttacaattaaccatttttagtctgatgggcatttagttgattttttaaagggaaatttagttgatttgacgatcatagtctaggtaagggatgcatataggagaaaaccataaagaataaggaaagagctaagtttaatggattattttaagaacaaaagagttagtgtagcgggtagcaaaacaaatgatgatgatagaatataacgaggtcacagtatttatgttaggccgttagtataatgtttgtgaaacatttactatatttatagaattttaaacaaacataaagtatatgtggattgaaaccgcagaattaaccactataaaatatagtcacacgagtataccaaaatccagtgcactttctggtggggttttgcaattttcctaattgccgagaactctagtccttctgaccatgtgagtatgtgaatgtgacagcaaccacgcacgaatcctccacagtggaatgataacaagaaggagaaaaagggaaagcctcttcttttccccttttccggattttgatagatcggtagcgacgacatgtgacctgccggccggatccaacgtgctcgcacttgctatctactaacattagcttacattacatgtacatatgttcatgataataattatcttggtcatcaagacatcaacgtgtcattaatcaacaacatctgtagtaataatgatgcagcgacaagaggaccaaaagagctgatcactgcaattcccatcccaaacattccaattagctgcttacttactgctatacgtactcaactgctgtgctaagttcagaagaaccacacgtttatctgtatcagatacagagcaaatagttcccttgatgtataaagctcaaaaccaattattccgacgttgtcaggatgatttggtcagtgtttttttttattagaaagggaataaataaaagatgattgacaagtcatgttaactagataagggggggattaaattaaacagaaatagtgatgatcattgggctctgttttccagttgtttgtccactaagagaaaaataatgagcaagccactattctgttttttctcatctgtttcttaacttggacacaaagaataaaagtttagagaacttgattaattaaattaattttctccctgctcatgatgttagtcagtagtcaccgactttaacgacgttgttgttagatgaagccataatgtcatctcttccagaggaatttctacaaaacaacacctaccatctctttctcagacctttttagctttcccaatagacaaattaacctacgtgtgctagcaaactatgttatacataccgatatgattcaattggtatgtgaatgagttacggtggcccatttccctatataaatgaggttagaattatttgctaatagggtctatatgttaatcaatcacccaaatagctaattaactggtactagtaggaccaatctaattttcaatagatcaatgtagggccattttacttatcaacaataagcagaaagggaagacatgacagccaagatggtgtcacggagtcctctccagaaagcaaagcttggagacaagctcattcgcaagaggaggcgcacatggaaaccacaaacacaaaaaaaaaaaaacaatcaagaaagcaatcttgcaatggcgattaaattagtagcagtgtgttaagcattaaattaatggagagcacaagataaagaagggcccccatcaaaaaccttaggaggggaatcacatgaatacacatgaggctagccggcccatccccggcgagtgggcccccaccctgttcacatgtctccatctcaccccactaaacaactcaaagaaaaatcatattccattccacactaatcctcaacataatattttaccaaacttttgaaataagaaaaaaaaacttttaagatcacttgctttttataatacagaaggaatcatataagaaatctgtttaaaaaaacttgcatactaacttgagacgatcggactcctaactgcagttcatgattttctaaaaatatatatatccaagcaaactcccacagtgaatttcatcttaagtaaaccatataataataataagactaaaatagactttacctgttgcaacgcacgggtatttttttctagtaaaacataaaaataaatgataggattgttacaacttctaaagtgtagccaccccattgaaccaaagtgtaagtactcaactgcaaattcccccgaacacttcggtggcggaaggccaggcgtgaaatagtacaacaccaaagcagccgcgcgcactcaaccgcgacagcgcctcgcctgccctctgcctaccgcgaggcgcgactcatacctcgctcgtctcacctcaccgccaaattccacaccaaaccgaacgatcaaaaggcgaggcgaacaccaccaccaccaccaccacctcaccacgacaccactccccatgtctaatccactccgctaatcaccaccaccccccgcaccaaataagtacacccaaccccaactacgccacaaaagaaaagcttacctctctctctctctctctctctctctctcttctcctttccctctcctcctcttcccaccaccaccaccgccgccgccgcctgattggtggtaatcggaggtggaggtgggcgtgatgatctctacaggcagcggctcgtcgtcggcggcgtcgtcttctgcgtcgtcgtcgggggtgagggtggcgggcatggcgaaggtgcgggggaaggcgggtgcgggtgcgggcgccgcggcggcggcggcgacgaggaccaagtggaggagcggcgcgcaggagaggatctacgggcggcgcctgctcgacgcgctgcgggccacgcgggacggggctgcaggcgggggcgggggcgcgccgccgcagccgcgggcggtgaaggccgcggcggactcggcgctggcgctcaccgcgcgggggcagtcgaggtggagccgcgccatcctgctggccggcgcggcgtcgtccaggcgccgcgtgctcgtcaaggccggcgggaagatccgccgcggcggcggtggcaacagctgccgccgcccgcaggcgcgcgccgcggcggcggcggcggctaaggcggccgcggccgcctcctccgccggcgagcccccgatgctgaaggagaggaaggtgaaggagcgcctccgcgtgctgggccgcctcgtccccggatgccggaagctccccgcgccggcgctgctcgaggagacggccgactacgtggccgcgctggagatgcaggtcaaggccatgcgcgccctcgccgacgcgctcgccgccgcgcagctctcctcgtcaactccgcagcaggcggaggccgccgccgacgagaccgagatggagaggtgagggtttcgtggtcaatcgtgagttcatcacacgatcgatgatgctggattcgattcgatggctcggaaattggaacggctcggggaaaaaataagggcgattaattagtggattattattgcgagagggtttgggatttgaggagggtaattgcgatgattgatgctgctgataatgctgctgctgctgctgctgctgatgatgatgatgatgacgatgatgatttgtaaattcttgatacttgtataagtaatgctgctctgctcctctcttgtttttttctccttgattcttgaaatgtttttctcctcctgatttccaaatcatgttggggattcctgatttcctgtttcatcttgattagtagtattatgctgtgattggggattagtgtgttttgccctgtgttaatcagggattatatgttctctctttttttttttttgcttgcgaagaattggagagaaaaaaatgtgaattctctcaaaataggtattatctcccaatctcccatactatccacttgtcaggacgatttcttcgtaagataaggtacaaaaacatgcaaattgattgacagaatctgaaaaagaaatgcctatgtagctatagcaccagcaattcgagactcgattaaataccaaatcgatgtatgaacagttcgtactttgcttatcgcaaatctggatgaccaagaacaaagaagcaatccatgatagccaatttggtcattgcggggaaagaatcgcacagtgctaaccacactgcagctactgcactttcgcaaaatggatttactgttattaaatttctaacgattttgctagatatttgtcatcaaatttctccccctaatatttgtcagatgtaattacagtacaatcgtagtgtaattatactgtaacttgcatgtaattacactgtaactataatgtaacttgtatgtaactttcaagaatctctcggtaacatgttatttcagtaaaatagaggtcgtgggaacaaattctttcatatatgtgtgtgatgtgatttttttcttcctccatagaacaaatcttgtaatagatctaacgattcaaaattacgtgaaacttacatacaagttacactgtagttacatgcaagttacagtgtaattacatacaagttacattgtaattacactacgattgtactataattacatctgtcaaatttttagtagaaaatttgtcgacaaatgtataggtggtcccaatttctaatgccgtcaagacacggcaatagtgtgcggattgaactaataattgggtaattaaacaagaacgcgtaaggcgaaagcttcctctgattcctctctggtctcccctgagtcctgacccttctgctaccggatcagattcagaccgccctgacactcgttggattaccagaaagttgccgcatttgctgacaagaagatctctgaaatgccttttttgctggtaaaaatgttctctgcacgagcgatcgacagcacggtgatgtgcaccctgcatctccttatcatcgtcgacttttcatttttgttcttcaggttatagcatcctgcatcctgcatcctgctcttttcgatttgaagaatgggaaatggggcttgtcttgagcttttgttgcttgttcatctaaacaaacttcccgtcaaaatcacatcatcttagcagacttgtggttgaactaaagaaaatatgatttggtatgcacgtgaaaatcctgaaaaaaaaggtaggactagttgcttggataggaaattacaatcggttaaaaaaaagaaaataagattgacaaacattactctgggtttgctaattagcgcacgtgtattatcagtgcacatttattttcctttccaatagcactttcatacgaaactttcttctcaaatcatttttaaggcctcaaaacttttatcttggattacaaaattttcaacttaaaatttgaaaacttttattaaaaagtgcatgtgcaaacgcacctgcacaaaatagcaatttcggcattactctcaacctgaacagtacaaatatacaatgatcatcccatttaccagaaggaaaggaaaaagattgtactgtctcgtcactagatagttataaatgagtgggtatcttaatgattctgtgatcactgtttcatatatataagtttttttgttaaattaggagtaaaaaatgtgaccattcattgttccattccttaaaaatgagattgcttaggacacttaaatttgtgtaatttgcttgtaaacattaaaaaagtatcatagctaaaaagacaccttacaaattaccaatttgctggaagatactttcggctcaattaaagtaaaaaaattcttcagacgataatacccattgagccataggcttcttacatggtattggagtgaaaacttagaaattatacaagtctaaagtatcctaagtacattgctagcatatatcatattccaactttactctagcctcatgtttgaaacttttggctcttagagcattcttatctttttaaaaaaattcttcaattgagtctcaagtgtcatatagcaaaatttgtaaaaaaaaaaaaaccctaaacactaccagtgctcttgcaacgcggcaattcttaccgaagaggaaaaaataaaagaaaaagagtaatttttactttgggccactttttattaccggtgtttcgctttggaccacccttcaacaaatgttttcaaattggaccggttaagtttaccattgtatcactttggactaccctcaactctcttattcatctacatccaatttttcatatgttaaagaaacggtctaaatacagctaaagaggtttattgacaaataggatctggcatactcgaggtcgttcatatacttgagaagagaatcggggtggtccaaagtgaaacaaatgtaagattacccagtctaatgtgaaaatgttagttgaaaggtgacccaaagtgaaataccggtaataaaaggtgacccaaagtgaaatttcctcaaagaaaaataaccatttctaattgaacggtcaattcttacccattcatggttcgattaaccatgaatcggttaaccgaacggtccaaaacactgagccaactgccaaccaaggcaaaacgggccagtcaacggacacgtcacccggtcagcgccatcgagctcacgccgcgtgtctcctctcctcctcatgccgaggagacgacgagcacgagatctctctctctctctctctctctagcttccacctcctgatccacccgaaccctagaatccactgcgacgagcagctgaggaagaggaggaggaggaggaggcgttctcctgggaggggaccccgtcccgcccgtttccgccatggcggcggcggcggcttcgtcctcctcctcgccgtgggcggggcggatggcggcggcgttcggggcgccgttcctgtggctcgtctgcctgatctacttcatccaggttccgcttccccctccccctctccgcgcccaccatttcctgcgacgcgattgatccccgattcttttggaacgctctccgttcgttcgatcgttcgttagataagagttacgcggcttcctgggaggagtgacgacagctgtccgaaaacctcgcgtttggatccatcagcaaacgcggagcggaggcgagatgccagacgagtttgagatcgacatgtggtagtgtggtacatccgtgtgcaagaggccgaactggtcgctgtctgtatagagatcgaggagtgcttataggaatttgggttcggatgattacatggtccttttgcttccttcgcttttgtaaggcaatcttggattgtttttgccaggtcaaatcgtgctctctgtgtaggatgatattatggattgcttcttgtgtcttgggtttgcctaaataagtaattatgtcattcattttaagaattggaggtctgatggctgcatgaacacatttttcttttaaatatgaaatcgaaggtagttcatttgtgatccgttgtaaggattggaactcatttagggcattaggagggtagagttatttctatgatagatgactcaatatgtttcatactagatttaactggttggttggtgtgcagacttaggtagtgaaagtttctctaaaaagagcttaatgttgatggagaatctcagatttgtgaaactatggaatgctatacgagttcagcttcggactgtaatgtctgaaaacagcctagtgtgataatttcacaattatagcaaggattggtggtatgtcatatgtcttagcatgacatgcaatgggatggggaccaaatttgtttatttgtgttgtgagctcatgtgccatgctttggtgatatgtcaaatgttagcatgttcaattagttgtaaattccttgtctcaatcagaactcttcaagataaactgtattttgtagtagagctaactaaatataaagaaggcagttttggtttaccgaagcttattttcgccattagttgaaagcttaacaaagcactacaccttttactttgatagattttaatatttattctgcaattctttagggtttcaggtcttttgtctggacagctgtctcgtaccaaatgaaggacatgatgaaactgtcaccatcaacatcacagtttttggtctcagttgcatatttcccttggagtataaagcctgtatatgggtaatgttacttctgtttgcttctgctgtgaactgaaatttaatcatgttccctacaacctaattatgttttttttgctacagagtagtttttgtaatgtactgtttcaaacatcatgtgccttacacagttacaccttagtttcagaaatcttacatgtaattatacttcttacaacaacagagtttccctgacatgtttactgtggcttatctctattgcaagtgattaaagtgtagttgcttacaaacagatgggtgctcaatatttcctgagcaagcaacaattattacttactgccttcggacaatttgtcaattatgacaattataaatattcttttgtagcataagagctaaacaatttgtcaattttatatttactgccttcacacagattaacacgattaattctaaaggatgtttctgaatagggtatatatcaactaattttggaaattattttactttagtggaaaatggattaatatgtgcactgcatttggagacccgacagtaaatgtgaaagggcaaaaggaagtgctgcaagcactccaacatcgatgggtatttttttctgttggatcgcttagttttcctcatgcatttatacccactcaaatgtttgctgcatacttgctgtggagctgtgcattatggcattatgtaacagatagtcctgtgtaacattaaaatcacaggtcttagaaatttcttctatgttgaattgcacggcttgtcggcttctgagcactggctgcccattactgtaaaacatctatatgcgtttgtgtataactataatgagtttcagattgtactgtacaaaatccagatactcgttacttccggatgagtctcctctgactacgtcagagggactttgtcactgacatgtgggacccacaaaggttgggcccacacatcagtgacccacgtccctctaactttacgtcagaggagcgcgatccgttacttacacatgcatctttgtgcctgcaggattttgtcagactgtattcccatcaagcagaggaagcgtacgccctatttgatcatttctagctgtctatctctatttccgtggctaatccttgggatgtcagaacctttgaggagctcaagcaattttcttactgctttgctgatagtacagaacttgggatctgccatggcagatgttgttatagatgcaatgattgcagaagcagttcgatcagctgggtgagtatcttagtgtaatattttcactggttagcaactactatatgattacagattatctgaactcaaaacttgactatatttttccaggccagaatttgctggtgatctccagtcactatcttggtcatcaatggcagtaggggggatttttgggagcttattggggggatatgcactgtccaatctccctatacatgttatatatattattttctcggcgcttccattgtttcaactaatttcctgcatatttgttgaggaatctccaaaaggatttgagagtagaatggataatgctgcacctaaacatgtcgaggatcaaactattgatgcttctcccggaaaaagctctagtgaatcatataaatatgaagatactagaaggcgaaaaggagctaggagaaataataaaaggaaatcattgtccaaacgacctgaggaccatgacaagaacaagtcaactaacttaaggccatacttgtctctgaaatcagcattcttcagtttatgcacagcattcaaacaaccaactattttacggtaactaatcatgttatgatttcatttcctcttatgtttacccctgtcactgaagagactaattgatatcttctttttacctgccagacctatggcgt

SEQ ID NO: 8480 - DNA, 9499 bp, Oryza sativa
tcagcccccacttcagccaccgccgcccaccgaccgtccgcccccgcgcaccgccgccgcccgtccacccccgcgcaccgctgctcgccgccaaccgcgcccgccaccgcccgcgcccgccgccgctcgccgccagccgcgcccgccgttcctgctcgccccgtcgccctgcatcgcagagagagagagagagagattttgaagagaagaccatatgacaggtgggtcccacaattttttatatatatagaatgctgactgggctgccacgcgtacgctacatggactaaaactactgcggattgggtcgaggggggtaaatggagaaagctacgcatcggacgtctggagatttgcaaatctccggacgatgttccactgtatgttgaatgaatgttgcaatgttccatcgctcgaaaaaaaaaatgtttcaacataaaatctccagacgatgtttcacattatgttgaatgaatgttgcaatgtttcaccgctcgaaaaaaaaatgttttaacaaaaattgtttcttgatgtttcatctttcattgaatgtttcaccgtgtttcaccgctttatcgaagatgtttcaatcgaatgcaacactcgataatgttgtctgcaacaaaaaaaaccaatatatgcaacatccgaagaaaccaaatgcaacatccactaccgatttaagaaacatccagaaaaaatggattgcaacatcaggaacacactatgtgcaacaaaaaacatgtagtgtgcagcctcctcaccttcgtcgccgagctcagaaccctctcaggtaatggcgtctcaagcatttccgtcgtgctgccccgttgccgccaatgtggttgccggcgctcaccgcatcccgctgtcggaactgctgcaccggccaccactcgagcgcatggtagtcctcgccggcgacgagcaccaccctacgcttccttttccatctgtcgtcggggagaagctgaagaacagcggcgcgcggtcgtcgccgttcgacgccgcccgacgcctccattgccagtgccaccaggaacacggccaccgcgtctgccacacgacgccgctgatgaacgtcgccggcgacaccagaatccggccatccgcgacggcagccccgccgtctacagcggcggtggcggcaccggcgccggctgatgacgccgtagccgcgtatgcagcgtggagacgttgagaagaagttgaacgagaggttggggatgagaaggaagaggataagatggggaaaggtgggccccatcgaccgtccggagtttgtctcgtatcggacgctcgatacgaagcattttcggggctaattcgtccggtttatatagttgggggtgaaaaatgactggttttgtggttcagggggtaattcggacgaccgcgatagttcgagaggtaattcgtactttttcctaataataataataataataataataataataataataataataataataataataataagtgaaaagatgaggccggtactatcttcacgtaccctaattagtaatcactagcttatcaggataaataaagaaggagagagatctgggcgccgaccattcggacatttcgaagaatctggctcttggaagaaaatttaagcacggtgtctcgtatgatcgtctcattaggattggattctcagatagcccattaccacaagccaaaaattaaattttgaacattaaatttagagttgattttaaagctatttcattgtacgtagtttattttcttcatttgcttttaaatcattataaacacgtatataaacgttttacttataaattattttttatctactagaaaaaatgcacgtgcgttgcaacgggtaaaggctattttaattttattattgttatacggtttagttaaagtgaaattcatcgtgataattcgcttagatatattattttttttctagaaaatcataagctgtaattaggagtccgatcatcttaagttaacatataagtttttttaaagatatttcttatacgattgctcatgtatttctgaaagcgaacaaacttaaaacttgactcaaatacggaaatatagatctgtatttctaaaagcgaacgaacttaaaaaccaactcatcaacagatgacgtaccaaagtaccggtaaaaacatctttaatttttataatagtagagatagagatagagatagagataggtatatcgtttagcttattcccttttaatctgctcaatcacacagtagaattaacgccagatgtcacagatagaatgctctctggtgcaccatcactactcactcacaagagaacgaccggaccaggggaccctgcacgctgctggctggctcaacatggcacgtactccatatatgcacgaattccacgggccatcgctttctgaatcctgacaatatctccagcctaattaactacagcaacaatcgtacgtggacggtggacccacggcatcgtctctggtcccgggtaatcccaaattcccaatatccaaatggattatatcgtcgacaataattgttctgcttgatgatgagctaaggagaaataattacgtactgtggagtggacacttgtttagcttaagccttaagataggtttcttgcggttaagatatggcatggtcaccaaagcaccaattaacgtgctccagatcgcacggtgggcacggggtttgagattagcgtcggcacgtgaggacgacgtgagctggcaggtgaggtgaagccatcgcccgggaatatccgtgtcggcaagataaacaagtccgcgtctctggttatttatttagtacaaagttagtactagtattacaagctgatgttaggtgttgatgtgtggctggtttgaggttgattatatagttttctattgtagtttattttacagtatttatttttaattaaatagctaaggacattactagtatatagaagtatattttatattttagttattaataaataatatgaataattatgaatataagtcaagagatgatctgatatttgtggaggggtcaagttgcagagtgttagtcgacaaaactagtcactacttcacgactgtagagtattttagttgatttacttttgacataccggggaaaaccgtgcaggttagtatttcactgatgtcatggtgtgtagggttagtatctgactgatatcatggtgtggaattcaattaatatgcttttcttgtttgtttctaacttgatatagatcttataaacattttggtccttcacgcctcatcaaattttcagtccactacacttacagaccactggccgtgtaaagattgtgtatacgtaataatggagttagaaaaactatttttttatgttagataggactagtaatattagccttctaatatgatgtaaaaccaaccataaataaaagctttttatttatttggtttgttatcgactcaaccgtacttaaaattgataaagcaacaaacagaacatgtataataataactatttctaccctgacacagtttccttccctcgaagtttccactcttaaggcagtgttccgcgtgcacgttttttaaaaaagtttctatataaaaattgcttaaaaaagttaaattaatccttttttaaaaaaaatagctaataatcaattaattacgctctaatataccgctccgttttccgtgcatagatgataggttcgcaaccctctctaacgaacacagcctactaccaccaaaatatacccctaccctacattaccaaaatttagcaatttatttttttcatattactaagggtgtgtttggttgcaagccacactttgccacagtttgccacgcctaaggttaggcaaatttgacaggtgtttggttgtagccacagttgtggcaagattcccctccaacaaattgggtcccacgtgtcaatggctcaaaaaagtgtggcaagattcccttaggcttagtaagttgtggctaacaatttgatcacttcaccttagacaaggtgtggcaacttttgttggcaagtaatggtaaagtgtggctgggaaccaaacagcccctaaaacttgatagtgttagacaacaaccagtcacgaaagaggttgtgcccattggcacatgatgacatgaacctgaccgagccggagttgagttgggtgcgcgtgcgcgagcacctttttctgttggtcgacgttgggtgcctttctggcaacagtttctcacttaggcccctaccatttcccaaaataacttttccggaccagaccacgcctcactctcgtcggctcgtcgccttgtccgcgcgtgcgccaccgtttccacccagattcgcgcccgccacttccgactagctcttcgcggcaaaagagatcgccggctcgccggccggcccggagcgcgggggttccgcttccgcggcggagcagccgtcggctggggaggggagatggacgccggcgagctgcccatcgtgtaccacatcggcatcgtgctggccgcgctgtgggccgcgggctccctcggcttccgccactccgtcctcttcctcctcgccttcctctacctctacatggtacggtgctcttctgccgctgccgcccgcgcctctcgctgataagttgatgcgacttttttttttatcttttttgagctcctttacggcatatgcttaggtgacagttgtgatggatgcatcgctctctgggaggtttttttttttgccttttgtttctatcagaaaatttcctttcctttcctttctgcgatgcgactgattttgtatctgattccggttgcaaatttctttcctttctgcgatgtgactgatttaatatctgattccggttgcgctttctttaaacttgagtgtataattcttagtgtgtatgggagaaaatgatgtatatcgacatgctttggaatggttgaacatgctatatggttgcttgtgtgctatggactatggttggttgattaccactgggacatggtgctaattgatagttctctatccatatgtatatatcagctggtacaatggtagggacatcaatactgccctattaatcttatgtattccataatttttgtattttggcccttttttatggaattatttggtcacaattggatatgtactaaagttcatgttatggaatagaatttatttctcttttaaataaaagagatagagtggaattcatagtttcatacttccaatatagatgaatcggcatgtcttacacatcagataatcgaaatgaaacaaaaatatgttactctttcgttccagaactaaagtaaatattgtgttaccttttcattgtaggtaaatgctcgctgtgcaatgaaattgcggaagagaatacaacatgaagaaatgaaatctgcctaccaacgaagagtatgctcctttctatgatctatgatttgttcttcttttatattttgcaaggatgaacctggttaactaggctcccacattcttttgctacttttctatttctactgagacgtctgagaacgcttgagtagatttagctcattttgttttatgtatcagctgctatctgatgcagaatcagtacgctggttaaattatgcaataaaaaagatgtggcctatctgtatggagaagatcgtctcacaacttctacgacccataataccatggttcttggataagttcaaaccttggacagttgtacggtttccttcttgcctcttgcttttgcaattgatgagattccactatatgaattgtaccttgaagttctagttttgccatgaagttctataaatttatttttatttctttaagtaggcattgccctcaatagctcaactgttgtagttatcccgcagagtaaagcaggagttcaggagctttatatgggcaggaattcaccactgtttacttcaatgagagttttacctgagacatcagatgatgaccatttggtgggtactaatgtcttctgatttgagtatttctttttcgtccatggtaaaaattgtaatgatttttgtgccatctgatggccaggttctggagatagggatgaattttctatctgctgaagatatgagtgctgtactttctatgcagctgcataagagtgtcggacttggaatgactgcaaacatgcatctgactagcatgcatgttgagggaaaggcaagttctacgtttttaaggggatgcaatttatctacttagcttcattattctgtcactaacaagatcaacttaacatactattagaaataatcaacttttaaagccgttacagcacatggattttcaagttctgtgttgtttatatctaatggtaagtttgatttcggagatactacactaagtccaatcactagatttatttgtatcttttacagtctgcttcattaggcacacttaactttttcaggttttttttcagtctattttgatcttgaaatcatccaagctatttgtttgtggttctaacgaaagcagacagatatttggtgctgagacaagtatggtgtatttccctctaacataagaaagctcctttcatcctaagtggattgaaatttatgttatgatgatgttgcctctgatatccaaatagtatgtgaacaaactatacagattaacaagatacacatattgcagaagtctcttgatcttccgtgttcattatactcaaattaacatgttaactcaaaactacatgagtaacataattctcccaaaaaaaaattgatgacataatttttttattaacctcttgctaaaaaatggtcaatgctctctactaaccttgcttgaaaaaaacagataaggacattgttgacccagcgaaaggaacagaaaaaaaatccttcgttatcttaatggaggcaaagaaattctaggcaagcaccattgttgcttgtgtaggttgattgtgatgctaaccaaggaaatggggacttcatagtcaagaaaggagatacatattcttctcagttataagaaagtatgatagtaaagggagatcatcatctaaaaatgtaagagaggcactgaactgtttgtttaactaaatagtattgtaatatgccctcctcagcatatcaggataaagagttatagagtattcgcatatattcgttcattaagcagtttcttcccccacattgtactcagaacatgcatatgttcatcaagcagattgtagtcggtgtgaagtttgtccggagttggccatttattggccgtgtgagaatatgttttgtggagcctctattatctcacgatgactgtaaagccactcattggtcatgggcttgatgtcgttgagtttccagcaatttcaggatggcaggagattctcctgtaccagcatggtcgtctctgcaatgttagtgaatttgttttttactgatcactcggccccttggaatttttccaggataagttgatgcatactgcatttgggcagacattagttgaggttagatttttatgaacttagggtgaaggctgttcattgtatattttttccttgctgatgcaacttttcttcttccagcccaatatgcttgttatcgatgtggaaaaatttgtatcgactccctcaggtaggaggaagctttgctttctgcttgtgtttaaggaatcatcctttcattcctgttgttttcctttcaatcctcctatatttgtgttagcttccaacaattgtagggttagtctattatcatatgaatcggcctctttagaccacttgctttagccaagtgttctagcaaatgctaataggatacgccccttcaaaccctgtcattgccttgtgttttttaacctacctttttttagaaaaagagtatttctctttctaactttctctgatgacagacttccagtcttgtttcaagaaaaaatatgataaccattattgctgtttactttgcattaacttcttcacattctgcagacaatgactggttcagcattgaggagagacctcctgttgcatatgtgaaacttgagattttagaaggatccgacatgaaaccatctgatatgaatggtgagaattacctgcattaatgttcatgttgcccgctgtttgattttgactcaccttacattccattatatagggctctccgacccttatgtgaaaggtcgtcttggtccttttaaattccaaactcagatacagaagaatacactatcccctaagtggtttgaagaattcaaaatacccattacatcgtgggagtcattaaatgaacttgccatggaagtgtgtgataaggaccacatgtttgatgactcgcttgggtatgtcctgtttactgaactcgtgttgctaaatggtcagctatatttggcatcaactcattgctgtattcagtttaactttgtaaaagatgacaacttggcacttattttatctcagcctcagagttagcctttctgatgttttatattgaattgacctatttggtattttatactagaaaaaaagtgaaagtacattacacttcattttgtttacagaacatgtactatagatatccatgagctgaggggtggtcagagacatgacaaatggatatcactcaagaatgtcaagaaaggaaggattcacttggcaataacagttgaagatatatcagaggttggtgataacatttttaatttttttttccgtatatttttggaacatgtaagtagtcatttcatgaaggtagggaagttgcagcaaaatgattgatagcactagacacatcctcttcatcagaatattatctagtaaaacaactgttgagctaaactatacattatgcattgaaagcttttaaaaggaaactgcaagtacgtatttaaactgttgaagttcgcccctacctaaactcattcacaattgtattttcaggagaaggggttggaagaatcatcaaggaaagttgatgctgaactaccaatatcaacatccgtcaacaagtttaatgctgatgaactgcctgatgaaaagcaagtcttagtagatgaagtggagcacattaacattgatgggcaagaacaacctggaggattatatgtgcatcgccctggcactggagttcccaagacatgggaatcacggaaagggcgagcacgtaatcctgacacggagatttacaaagaagttgacaaatcaaaggatgcgcctaccccaaaaagcagtggacaagggggtttttttggctcctttttccggaagagcttgaagaagggaagtttccatgatattgatcccggtattcctacaacgccagggcctcagagtgcaacagagcttgatccgaagatcccacaaactccacgtccaaaccttaaggaggccggtgaaaaacggacatcgataaagatagtagtcgatgaagatgcgaaaccgacaaggagtgcgggagatgcagagaacttgacagaagatgtagccaaggtgatggagaaaa

SEQ ID NO: 8481 - DNA, 8347 bp, Oryza sativa
ttccacagtaaacacacaaagctacctgcgcaagcgctccagactatccctctgacttggccattctcgtgctaggggctagatatacttgggccattcccatgaggacagggcggctacagattcctattcgtggcgatcgataaattcaccaaatggatcgaagcagtacccacgggggaaatcaaggccgacaacgccatcaaattcatcaaagggatattttgcagatacggactaccacaccgcatcataactgataacggctcccagttcatcagcgctgatttccaggactactatatcgggctgggggtcaaagtatgcttcgcctcggtctctcaccctcaaagcaacggacaaatcgagagggcaaacggcatagtactacaagggatgaaaaccagcatctacgacatactcatgtcacacaacaaaaggtgggttgaagaactcccgtcagtactatgggccgtacgcaccacaccgacaacgtctaataaggaaacacccttcttcctcgtgtacggctctgaggccatgctcccaggcgagctacaacatcagagtacacgagtacagaagtactccgacgagaaccaggaggagcagcgagatatcgatgtaaatcttctcgaggagcatcgggaacgagttgccgtctgagcagccagctatcaacagaccctccgctgttatcacgagaagcgcatccgtgcacgcatactttcgatcggcgactatgtcctccgatgagttcaaagccaagcagggcgaaacaaactctcacctaaatgggaaggaacttacacgatcacacaagtcttgcggccaagcgcattcaaaatcgcagacggcgacggtcgtgaattagcaaattcttggaacattgaccaactacgtaaattctatgtatgagtcaatatcatccatacatgtaagcacccttacagtatcaataaaggctatttctaggcccatatcacaatcaacgtgtttcgcccgatgatcccccactctgatgacacctagcgttgaaacctgtccttatgtccctttacgccgtctcgacaaggcctccgaggaacctaagggatctttggctggggacgcccaaagccgataaggccttgtcagatcctgtagagacgaaagaccatgtaagatcttgtcgtgtaagagttctcgccgtgcgtattaaccaagccgtgaaatcggaaatcaactttccaacttcacggctgggggctaggatcagagcttattcaaccaaggcaggtcaaaggtccaagagccttatcctccgagaaaattcctccgacgacaaggctgggggctagggagagtgtacgactcaaacggctgactaaagtcgttaactgagaacgcactcttacacatgacatccagagtaagaggcatttgtcaaagatagatttctttattcacaaaatactccttacagttttttcacaaatcttttgctacattacatctttttcctaagatatttgtcacaaggtacgagtactaccaagagggccaacgccagtccatagactggaagatcttttcggccaacggcgacattgaccttgccagatggtctatctccgccgaagtcctccgagaacgagcaaaacactcacgaaggtgttcgagctccaggtgcgggcgataatctcgtaggcaagccaacacgtgccccccggcataccggctcgatcgacgacactcctgcttcaaggcctcgtcgatacgcttgtcgattccatcgagttgggcacaggccccattaagccacgagatgtacccggccgctgactcctcgggatctccgcggactacttgaagctccttgcatactctggccatggatgtgcagcaaatcttcaagtacgagttaaaccatacctcacggcctcggagcgtttccacagcctgctctttcgtcacggccagcatggttctctcgagctccgccacttcaaacttcgtcttccagtattggatacgacgatcttggctagcaagggcaccctcgatatctgctaaatgtgataaccactaagtcaagctgtacatctcttttggcaacatggctgacctagtcaggtgggcattaaggggtgaagggactactaacctgaggaagtcgtcgccatccttccctctatatcaaggggttgatccacatggtcaggcgagacgtgtggttcgaactcgaataccggaattactgccagtgactcgggctgcccacgctgctggacatcctcgtcatcagtatctctacaagaggacaaaagttcccgaggtcagcatactaaagtaagccgggatagtaatcgcatgcacaaagacggtcagagttcgagttttacacattatctaggaaatacaagaagtcctactcttcaaaaagggggagaacagactctcccagatcaccgatttcttccatcacctccttacgcgtgtcgctggccgccccctggtccaagatctcgcgcagatcaagttcaggacgcgacagccttacacacgcgaggacatgacacgccccggtgtagattccgtttgacgtctcctccgcaatcctagctgcatgcttggaggggatttcccccattgccgtcgccagttccgcgagagaggaggtcagcgaaaactcatcgggattcgccgggatcgtggacgtgacgccgcataccccggcgagctggtgaaggccggtgtaggtgaccctcaacgagccccggatctcagataggttgttcccgagttctgacattcggtcctcgagccccttccgttgtcgctcgttgccggtcgccaactccctcatcttcgtgaggtcttcacgggctttagccaactcgcgcacaagtctgtcagcgcgttcgccgtcgccgcttccgacctcgcctccgcaatctcgcagccaatgccgcgagcaccggcttcgaggaggcgccccatctcgacttggagctcctcccaggtgaggactgcagctggcagatcacgacctgccgcggggtcgctgactgggccactaggcgtcgcctcccagctcccggctgcgggcatgacatccgtcgaggccacaaggggcgacgcactagaagctcttccggacttggctcgcgcagcctttgctcgcgcctccctacgggacgaccacgagtcagacaataagcgaataagaagcgcggggattcaagaattcatctacttacttctcgccaatcgtcacaatgcgttgtcgtcgtggaggtgggggagatgcatccgaggcctggaatacaatcaacgcaaagtaaggaaaaatccttcttgctgcatgatttaacgacaaaataaattaccgagggggtcgacaccatgcgacgttgtccgcttacagacgagaatttcctcggctttatcggaacattgccaccactagtggtggcagcatcagatacctccttgacggccttcactttcaaagatgacgccacctgatggtccgcgagcggtccgatgatatcagtcaaaggaagggcctacgctcaatcaagtcataaagtgatttcgaaaggagaatgcgggatgttcaccaaatatacttacgttgatggcttcatcacgttccgctgcccccttttcacaaaggggcacagggatgtcactcgccgtagtcgggccgctgatcatcacttggccgacgcggcgctccacgttttcgccgctcagacctgttaatcgagaaccaaccttcgataagtcaagaggaatgcggacacaagtatgtcaagatgaatgcgagaaagataccccgaggagaaacccgggtcgcgtcctctggcccggaatagttataagctggatgggcccgagcctgaagcggctagatccgcctaccaacgaagtctgcaacgacttcatatcccgacaaaccctgtactcagagatcgtcgatgatgtcgagaaacgactgaagagagggggtcaaggggggcttggcggtccaagacggaatcttgtccggttgatcttcgggaaccacgaagacagggttcgagtccttgatctcaagataaaaccacctattcctccacttgctgcgagaagaagggcactggaagggaatgtaacgcaacttcaggccatcccgaagtcggaacccaacgcaaccagataccctgttggattccatccaacgcagttcgtagtaaaagcaaaaaagatcaaggaaaggctctaccccgatgtaggcctcgcaaagatgcacaaagatgctaaggaaggcgatggaattggggttcaaatggagaagagaaagaccatagaaattcaaaaccaggagaagaaattcagaaggaggagggagaaaaccgcagagaacataatcttcgatcgcaaccatgcgacccaagatgggctgaggattagtacctcctacttccctctccatggttccacagccaggaagagcgccatcctcctatagtttctttaacgttgcactggtggaagccgatttgccgaggtccattgctgatcgaaggtcgccggaaaacgagcctagattgatgaactagggtttcttgcggcggcggagaaggcaaagagtgcttgcagtggggtgtgtttaacaggtttggcggacttcaaaatggactcccaaaattcctttaaataggcgcactaccgacggtgcgaattccagggaatagagagagatgcccgccggaaatttctggtcccattacacgcggcggttttttggacttcagtttaaaattcgttcgtgaccgttgggcttcaaatggcgtgctcgactacggtctatctccgcggtcctcgcaccgggaatgacaacagtctcgacacccgaagtcgcaaatggttgcacgagttcattttaagcagaagttgggggctactgtcagggttacaggttaggcataccctttacccttcgatatacgtcacatatcggtatggtatacctacacgcatacggatgcttcccgcgtactctaaggaaatccttcacagagtctatagatgggaagaatcctactcggacaagattgggtcgttaatgtatcgtacagggtctgacatctccgagttctacttggagacctccagatctgcgatataaaagggaccccccggggagggcctaaggcatcgaatctcagagccagcacaacccacacagcctacgaagccagagcctgcagggagccaagtcatcgggatctagtcgaaccaactcgactatgatctcgccggatccgacaagttcccttgttctctttgtaacctgtgttttctaccatataatcccacatcaattggattagggctattacctatcaaggggcctgaaccagtataattcttgtcttttgtttgcttgatgacgtactacgtagatccttgtaccaatgtaccccaataccctctatatccggtctacgggtatcacccatcgacagacaatgcccccctgaatcatgcccgatagggttagcgggcaaatctttctgcccgtaccccgatggatacccggagagcacccgacgctgacgatctgagaagtgcctgtcattgcttgcatcatcgctcgccgccgccgagactctactgatgctgtcgataggagagttgactacctgccgtggttgcgttgccgactctgtcgcctgctaagccccccgccgtcattgactccgctggtaccgccgcttgctcccgccacttgctcgtgctaccactgccctgagagccgccattgttcccacttgctcgtgcattgccttcagccgccatcgtcgttgcttgcccccgcgctaccttgagccaccgccatcgtcgcttgccggcgctgcctccacatgttcctttgctaaatgtgctgtcgtcgccactgcgttgaagtgaggtgggatgaaaattaggttatggtttgatgttgttggctaatgggccaagagagagatgagaatgaagatatgggccaaaatcaataatacatatatcgggtcgggtatgggttatccgcgagtaaaaggtaagatccggctgctgcccactacattatcgggtctcgggcgtgcatgcctaagggtaaaatattgcacccatgcctgtgcccatctggtcgggtaaccgcggatacctgaacccgtgagcaaaattgacatccctaattttattctctagctgcttttcctagctttcgtattcatgtgaccatgcggggtctcagtcagccaaaaaaatccaccgtgaaaaacagtcctgggggtgtaaaataaattaggtacatcatgtacggaaactgctatttcgcggctagtcgcgcgcgccctccccagcgtgactggacacagcgcgcacggggaggagggtggcagacagccgctcttttccttttttttttccttttcccgtttctattgtttcttcccctcttttccgtttctttttcgctttttcggttgtttttttcctttctttcgtttctttttcttttttcggctgttatacaaactatgtatacacatatactaagtctgtatgtatgcgtgtacaaactttatatacacatatattttttcgttttttaaacatacatatataaaatatacaaagtttgtatagtttgtatacatatatatatatatatatatatatatatatatatatatatacatatatacatatatatatgtatatacatacatacatacatacatatatgtatgtatgtatatgtatgtatgtgtatgtatgtatgtgtatgtatgtatgtatgtatgtatgtatgtatatgtatgtatgtgtatatatatatatatattatatatatatgtatatatatatatatatatatatgtatatatatatatgtatatatatatatatatatgtatatatatatatatgtatatatgtatatacacctcatattgtatgatacgaagtttatacgtacatatttaagacatatatacatacctatacatactgagactagagggctagcgctggtcgcacgggcgtgccgggcgatcagccatcccccatcgtatacctgggcagtgctgttaatgtccgcgaattaaattcgactcatatacgaggaacctaatatgaactttattttcctgttgcgagtgtatcccagcccatgtaagacgcccgtagcccatatcctatctcaaagcagtcagcgcaggcccgcatgctatcgcgacgtgcgtcctcaatccccttcgccttcccgtctgatgccacaaatcaaagccctcatcctcttcagttcaccgtgaacaccatctatggtggaccgtgcacggcctggccgattcctctccaggagtgaaaccgtcgcaatcaaagtgcagccaacaagtgtccgtgtttaattcttttcacttaacgtatgcttttattcttcaatccctgtatatcatcgttgacccttatacttttatcaagtgtacggacttactccctccgttctataataattgacgttttggacaaagttacggtgaaatttttataactttagccatcaataactttaaaaatatttagtttagagaaactaaaacaacatatatagatttgtttttcaaagcaccataataataaaagtaaacatgcatttatttattgtatatattataatagaaaaataaggttaaaggtatattttgtagaccgtgttattattcaaaacatcaattaaaatgaaactggagggagtacctgggttagcagctatcagcctatcatgccctcaccaatttagcacgacctagctccctccgttcttaaaaaaaaatctagtactccagattcatagtattagaatatatcacatccagtactagattatttttttatgaaacagaaggagtatgcccccaagaacaggcacttgcacttctgatactcatgtaggatgtagcttatgacatatactttgttggtactttgtccccagtatacttacatgatcttttttaatgattaattgatcatttcctacaaccagctctcatgtatattactatcctatctaactgactatatacacaatgcagtgttgggcaccaaagcaatatctggccatgacaccggttcacagccgtctgtcactggccctgtttgatttagcttaggattattataatctggattattaggagtaagctgaaataaacaagtagattattacgatagattattataatctataagccagattactataatctaataatctcctatggatgagctttttccagattattaggtggctaaagaccca

SEQ ID NO: 8482 - DNA, 16270 bp, Oryza sativa
tttagtggtcaacatattgaacagcacaacaaggtgaccctagttattatctctaaagggtgtattgcatccatgcatgtacagaatacaaagtaaagtgggatatctgttagtggtagtatagaggaacaacacagtgataattagagatataaacaagttatgattaaattatgcaatataattgatcatctatggaaggcagggttacacatcacatatatgtgaaactgtacacttgatgaagaagaatacaagatgcatggaaacaaataggatggtacagatttaattgagatggtgattagggaatagaaaaatatttggtacaacaaccatctgaatagacatggacttatgattgacaaaaaaagtttccaatgctctgttgcaaataatagcacttcaactaatagggtaggaccacagctgaaaattgctaaaaatcatttgatcaatcgcttagcttgcatatatgacacaaggatggttgaaagcactgcaaagatgtgcttattttttttctgtttgaagcagaatgtactcaaattaataccaaaaagtgcctgaagatgcctcaaaagagttccatgattaatcacccccatgaatttctgctccaaactagatgctatttgcaaaggtgcaatgagaatgacataatactatactttaggtgacaaacgacatcaagcttcatcgttgcaatcattgtgtagcattaccatttttgcgggtggatagctataacttgtatttctcaaatatcctatgttatcatcatataccaatattccatgtttcaataggtcaaattatttgactcacataacagtggagataaatgctgccaataggataacttatacatgttgaaaaacagtctaagcaaaacgaaaccatggatgaagtagtgttttaaacataaaaagtagatggcattacagtgtacctgttccttttccagttgacgtgataaaatagttccaaccaacttatatggatcctggaatagtgatcaaaacatgtcaaaaacatggatcatgatttaaacagtacaatacatgtaactggaatcctcatatcattttttactaataacctttttcagagaatcattgtccaaattttctttacaacttatcatgcagtccaaaataaccttctgaagtctttccattgcctctgaaaatgcacaatagatagctggttacattgttgatgatgatatcaatgcaaagaagttattatgtacatgtaaaaaaaagcaggcaataaaagttatacataaactgtatcatgtgttccaagagaaatgcatcacaaaccttgacaattaggacccacattttgatttggttgtctctcggtatcagtctctaccaaatctagacgttttggggtggaagaagatccggaacaaacatattcagactgaacatgacttgcagaacgtgttgcaagaggtgatttcaagtgcttgaggtgcccataacttcctccccgttgcctccactcatgataagacttcaaggaaatgacacaatcgacaatcttgcctactgacccagcatcaatattgtcctgcagaagcaacacaattttctgggtgattacacatcccaccatcaggattaaattgctaagcatagttaagtagcaaccttttccaaatcagaggcctcaaagcatggaagcttcagctcttgaacagcaaccaagaagttccggatgttctcaaaatactggaaagccgtcgatggctggctatcacaggaggcattagccacgacctttggcacagcgcctggttgtattttgttaattgccttgcataggacaatgccattccttacagcggcaacaaattcttgctccgatgggcaccgggagaggccgaagggccctatcacgctctcaagccaggttgcagcctggtgccgtctcaatgcttgcagaaatcaaagaaactacaatcagccaacgaatttaacgaaaactaaaccagccagcattagaacagcaaagaaattttgcgtgctacattctattaacattatttacagtactatattattctggagacaaggatgggatccatgtggctattgcttatagaaatttatctacggatcattgggattgaaacagcacgagacagcttggagaatcactgagaactagctctctaaacgcattccttgcagaaaccacggtccaagcagaagaactagctctcataatagcaagactatcgcgatttaatcaatagaagcaaaagctatgcatcatatcgcgtaagattgattcggggcctccgcatagaagcgcccaaaaacgatcacgaagtggaaccccagcgcgagattctcgcaagcactccacctaagttagcagaaatgcccccaccaaaaaaagaccaagagcttttgcccccccacaaacccgcctaaactctaaaccccaagcagcagagcaacccgcaagcaagcaagcaaaccatggaaccctcgacgagaacgccatgagagcgatcgatccaccgatcgaagaaccccctcgatcggtatcgggcccgtgggagaagagatcttaccagcctcctccgccttccgcgacgcgaggcggccgtcgcggaacgacaccctccgcggctccgccgccatgcctccccctctcccgcgctctcaacccccgccctcgttcgccacgagccgccgccgcggcgccctcgcgacgccctggggcttctggaagcttcgattgggaggaggaggagagggaagcgagacggggaaggggattggtttgaattcgaaatgtggggtgggtagtggggtgggcccggtctccgaggcggtccgagatctcgacacggatcggacggacacgctcgccccgctgggtgggtggtcggtgcgcgtgcggtgcggcgcggcgggtggggagctcgaggctcacgcttacacgtggggcccgcgggtggtggggcccagttgtcatcggctgctgcacgaagcagggccgacagcgtcaggtgctccgtcgcgactgcataggcacggcttaacagctctatataccgaccgacggccgacgagacggcagctccgcaacgattgaacactgttgctttgctttgcttttgatttgggatattaggagaaacgagaatgctaggggacgggataccgtcccccaacaggatagctcctatccacacgtgatttttatccatacactcacttgtcgccgtcgtcgtcccccgccgctgccgcgcccgtcccccgtcgccgccgctgccgccgcgcccatcccccgtcgacgccgccgctacgcccatcccccactgccgccgttgttgtcccccgccgccgccgccgccacgcccatcccccaccgccgtcgcgcccgtcccccgctaccgctgccgtcgccgtcctcgtctacaagggacggctgttgggggcgaccgcgcgtgtcggggtgctcctcccccaacgggatgtccaaccatatttagtaggaatcacctgatacctggtaggtatcatccgatacctcgcaagtatcacgtgatacatgatagaaatcgtctgatacctcgcgagtatcatgtgatacgtggtagaaatcgtctgatacatgacaggtatcgcatgatacctcgtgagtatcacgcgatacgtggttgaaatcatctgatacctgacaggtttcacatgatacctcgcgagtatcacgcgatacgtggtagaaaatcgcatgatacctgataagtatcacatgatacttgtaggtatcacttgaaacgtgtgtagaatcgtctgatatctgataggtatcacacctgatacctactcgggatcatcctgttgtgtagaatcgtctgatacctgataggtatcacacctgtcgaggagagatcctcaatagcggggaatcgtgagaccccccatttgtgagttcggcctggggcggaggctcatctcttggaaatcactcgctcgtccctaggattaccggcaagcttgcacgcagtcggattatacaggttcgggccgctatggagcgtaacaccctactcctgtgtttgggattatggatgtgttttacaaagatttcttcactctagaaagcgcactcgcttcctctcttctggagttcaggttttctcggcgtcccccccgtctcagtgggcagggtcctccttttatagctcaaggggataccacatgcgccgcctctacctaccctctctcggagggggatcccactccacttttcctgggctttaaatcgtgccttctcccggaagctaagcaacaaccggttctcgagtggaaccaggtgccggcccccgcctgacacggtggacagccctgtcattccctcataaatgaacgatgacctgtgacagcccttcctcgagtgacgctcggacgtgacgggtcatacccacccccactccgccgggtacaagagcgacgtgaggacatgattgccctatccgtcggatgtgacggtgtcaggccggtcacagatcggtcacatccgttggacagaggttagctaggcgcgccgcacgtctgcccttaccgcattaaatgcggtgagggacagttggggcatcgcacatttatggctgttcagcctgtgctctcgctctctccctccgccgcgtggcagccgggtgaaggcctcggggcgaagccgcgggatagcccgagggggtgacgccatgccccgagcccccccccccccccccggcgctttcacgactcgcgtgacgcacgaatggggctaacttgcagagtcacgtggccggagggaaagtaattcccctctacttcacacacatacccccgggtccatatctccgacaacacctgatacttactcgggatcatcccgttcgaaaaacgggataccgttatattgcagccccctaggagaaattgtttctactgaatatcacgccctccatcccaaataagtgtagttttgggttttcatgttcaacgtttgatcgtccgccttatttaaaaaaaatgactagtatttttattattattagatgataaaatataaatagtaatttatgagtgactattttttttaaaattttcaaataagacggatggccaaacgttggatatgtgttcctaataacttaaaaaggtaatgctgaaaagtaaactacgataacaaaaaaaatcaactctaaaattaagtttttaaaatttaaattttcgctagctatggctgaaaagattaaaagcacgtagagctctaaattttgggctaatttggtttgagatctaaattgaccttaccaatatttggcaatttcaatagtgtttagtgtttatttagtttggagccaaattttgatatgccaaattttgatcgcccacctgcacccgctcgatggcggcgacgtctagcggtgacttctggagttaagacaaggccagcatccaactggaggggaacgagagaggtggctggactgtattttcccatctatcagccacttgttctttctctccgtgacaaatacttatttagtcaactgagtttgacttgttttgggacatcgattttcggcctgacacatagtagccggcttctacaatgtatttggttcggttttttctgcccgcgtcggtttttgtctcacaccggagcatcctattagaatattgcactgaacatattaaaatatatatacaccatactcggcataagaaaccgaaaaaaaaaacaacacaatattcgtgcccatattaaaatttgctaatcaaattctcgaacttacgtcttctgcctttaaataagtgacctagtaacacctaatgaaaaggttatttctgttagattccgtttgtttcctagctacagatgaccaccaccaacaggcaacagcagcagcgtggcgccttgaccgtttgacctcgcaaccgaacacgcaaaagtacagtaaaaaaacgacctggcgaggccgttgcgtgcatcagcgcgcgcgagatttcccacccgccgccgcgttggcgccccgtatattcttccccgcccgcacgggccacggatccatccacccccttccttctctccgacgttgacgagcgcctcctcgatcggcggcaccggcgcgccgcccccctctcccgccttccctttccttctccgctaatcaaccggtggtgcgagagcgagagcgacgggcggaggggatcgacgatggggagcaacggcggcggcggaggtggcgggaagcaggtgctgtgggagttccacgcgacggggccccgcaacatctccaaccccagctggagggacctcatccgctcgagctggttggtggttcgcgacccatcccttctccctccctcctccttccgctgttggatcgtccatgaacatgcacatgtgctcccattcttggtcactcgcgtacggtttttgtttacatcattactacatgtctgagatgtttggagtgttaaggccattcccaacccaaaacactagacatagtttccataaactctacgtcatcgagaaattagtactagacactaatcttccaatgcaaacaccactattccatatttaaatttaatgctacttatctcacatgatgtcttggatgttgtgtagaaacgatgtcattctctttcctcatttattcatttatcatattatttttcatcctatgtggcagcttatttaatgctatagacaccattctaggaatggccttacgcgtgcttgggtcacttgtctagaactgtgaattgttacgggatttttacctgcctgcctgagaaatggttaactctgcgtggagttcagggatttttcgtgctatttgatcgaacctcgtgtcagtcgtgtgcatggagcttaaggattcctggtgtttctttatgaaacctacagagctagtcctaaaagatattatgtataaaatacagttgcccattgagaagtcatacataagtacataactgaaaaagcagaggaatgtggtgcaaacagctgttgcaaccaattgccgaggtaacgtgtgttcgtcatatttcagtatgatggcaactagatagtaccatgccaatatcatgttttttttaatcaccagtcaaggctgtaaacaaattgaatgaagtagtaactaggattgttggcaatatgttagttgaccgcttgtcatactccagcttgtagaatgctggtcgtgtagtggaaataattttcaggtaaaggaacatgtcaaattttatggctttaacatggtgcattgaacaaaatatatatatatatactactctctatgtgcagtgtcgtgtccataattttgcttaaatgtaaatgaaatttagtccacattcttgtcctagggatatgagttccctgttttgtttccatttctggagatcatgcctttttgtaatgtttgataaccaaactagtaatgtgggtagcactgatttaacagcattatttatgcttcttcaggacagatcccaactaccgaagaattgcggtttcatgcttcgtgcaggctgcgtatctactggagctagacaggcaggagaagagaaacggtgaaagcgcccttgctcctaactggtggaagccattcaagtacaagctggtgcgtcctctaattgattctagagatggatccatatatggtgtgctgctagaatgggaccagcttgctgccctatcagacttgatagtgttgagacctaatggcgccccgaaggttgtcctcgcgataaggggaacagtacttaagcagtcgacagttgtgagagacctcgaagacgacttccggttcttcaccatggagagcttgaggggctctgtcaggttcaccggtgctctcgaggcgctcaagtcggcgatcgacaagcgtggcagcaacaatgtgtgcattgctgggcattccctgggggcaggctttgctctgcaggttggcaagactttggctcaagatgggatctttgtagaatgccatctgttcaatccaccatcagtctcacttggcatggggctgaggaaacttcaggagaaagccggcaaggtcttgaagagatatgtcagtggaagttcttcaaatgctacagaactttctcacccaacagaggatggaggagcagcttctgaaattggagaagaaaagctgatcaaggaggtaaagagatgggtgccaaacctgtacataaacagctgtgactacatttgctgcttttatgctgatcgcagcggtgtcgccactgttactgccgagaagcatgatggccattctgggactcattccaagctgtttgtgattgccaaaggaccaaagaagttccttgaagctcatgggttgcagcaatggtggtcagatgattatgaactccagttggccgttcatgatagcaagctcatgtataggcaccttaagtcgctgtatgtgaatgaatcataggaaactgaattttgtaaatgcatcgtgttcttttgcttctctagccaagaaaatgtgaatttttcttttgaatggcgcatggcacaagcctcgtacattctttttttttttttgacctggaaaaacaatcccagtgagatcgctggtcaccaacttcaccacctcagggggtacatcatcccagctgagaatgttgtgaagctgatcattacaacccagtgccgttatagcatgcgctattttattacaatcccgagggcaatacttaatagcaaaagaactagagctggaatttacaaaattattcatttcattcatttgattgcacagagacgcgcctggtatctatatccattcctcagtgacccaggtttgttctcagggccaaactgttatgacaaagcctccatatgaagtgtttcacctttctcggaacctgcatattccataccttcttccagaaaaagatcaggcttgttactctcattggatgtagctgcatttcctctcctttgtctctgtctctcccagtctcggtgcactttatatgccgatttcaccaaaaacaaccccttctcgtcataatgccatgccagtacatcatccatctcaatgtgcactgggatcaagcgaattgtgtcaatatcctactcccagaaagtttgccttagcaactcaagatcccaactcctagtacttagatcaattagttcctccacctccgttataatattgttgcctctcggcgtaattggtttccttgtttggccactgaccaatacgggtcagaccaaatatttatgtgtgaaccattaccaactctccatatcatcccattcttcagtaccccaaggcctcgacagatactcctccaagtgtaggacatgcttgctgtttgctttgcctgcaagatgttcccctgtgggaagtattttgctcttcggacctgggcacacagagactcaaggttttgcagtgatctccaacccaaacaactaactgtgaatgtgaatatgactttttttttttggtaacccaaacagctaccttattgagtatagttgtgggattatgtgtccaatgtttaatcgtccgttttatttgaaattttttatgattaatatttttattgttattagatgataaaacttgaatagtactttatgcgtgacttttttttatttttttcacaaacttttcataaaccctactggacttaaaatgggacggaaggagtacattactactttaagctctgcgatgggataacaaatccagacttcatcagacacttcttgtcagatcgagcaagtgactactactagatcaccagttgacagtgacaaaagttgaaaaccaagccacaacttctattttcctgtcacattagatgtaggtattcaaaaggcgaaatcgtctcaacctgatttatttatgaccatgaacaagggcatccgttctccttgttaaacattaaaaaatcaaacggaaaagaaaagctgaataaggtacatcgcagacgacatactaaatgtttgtgcatccatgagatatacagtatgtacaataacgacacaatgtaaaatgtaattaagcagctccagcggtagctccgattattatagcaatggtggcaaggacagcctgttacatcataaaaatgccattagagtgactggaatttttttaaaaaatacaaggtacgactgaaactagataactgatcaatctagaatttcatcaaagccatttccacttatcattacattagctgttggtgttaccaagagaatatgcatcaatgaacgaattatgttaaagtacgacaatgttctctggacttgatccttcatgtatatatatgctctggctacatacatgtccaaaactcgtgtggattataatggtattggctcaagcaagcgtgcaactggtgaagagcagagatgcttcaaacatgaaaaacagtaacctaaggtatgcactgtatatgattgaacgaagttaactctattgtttttttctgaaccaacattgaaaaaaacattgaaaaaaagatcagacacaacaagttcattattgtacctgtaacctatttttgcagtactttttttgctggaatgctgaggctaacatctataaagtcatcagtccaattcctagttccctacttgctcctgatgcattattcagtatttgcacaacaaagtctgatagttgctttgtttttagaaaccaaacttcacgccttacaagagcaagatggacaaatagccgatgtgcttgaccattcgtttttgtttcatgaagattattcatgtaaacagctatacgaggaacccaaaacaagcgcgcacaaacttcatgtacaatcctgaggtgaactaatatttacatcagcatgtcatgagaaatatattttcaagtttcaacacacaagtatgacaaatggaattatgtattccttgtaaatgactagtactgatctgtttgatcacacacaccgaaaaagaacagatggaataggcagcagaaatggtacaatgcactgcagtaagaatcaaaacaaataatgttatagtatcggatgaactcaagaataaattatgttacttaccgctatagcgcatgctacatatcctggtttctccctgtagtccactctagaacaccacagtaggaatgctccgacataccaaggaatagcaccgaggaagaaaccgactatgaatctaaaaaacaagggtttgtcatgaggataagcaggtacagttcaagaaatggcatgatgcacctaaaacttttggggtactttttccagatttcaaagatgatgttgctacaataagaaatagaagaacaaagcaatgctcgcttacaaaaaccagccaatgccaatcccacagcaaggaaggcggtcatgaccatgtccacgagcacctgcttcataatctcgagctgaaagaagagcaacgaggttacaatgtactggtaattttgtaacaaaacttatctgaataagtactagttaatttggaatataataaatacataaagactggactaactcaattctgtaaaggactgctttttatgtcagaaaaatcgaactccatgtgccaaaatatttcaccgttgattacatacaaaactccaatcaaactaaggtactaaagaggtgttaattttgccattaagcaccaccccagtagtcactacactagctgcccaggtttatggagtaatggagcaatgagttttaaacaacaggagcacactactcgcctacaactggacatcacgtaagtttcaagcagaccacctaagattttgcatatcttggaccaacaacacgaaaaaaattgcataatggcagtaaataaaaacttcaattccacaaagcacggtaaatttcaagcagatagatcccggatcgcgtgatcatgccaaagatctgtaagaaaacgccctctaatcctccaattcacctcaatttcgaccaatcactcatcaaccggttctagatggttcagatcaagcagaacccctccacgatttgagcccgatcacgcaccaccgaaattccagtgatccagtccagacctaacctaacccgcatccctcgtgatcccccaaaccaggcaggccagaacattaccgggaatgccctggtacccgccgcgggggcggtagtatggatcgccctggccgtagagccccggcggcggcgcgggctgcgggtacccgacgaccggcgggcgcgggggcgggtagctgggcgggccctggaacgtcccgtactctcctcctccacctcctcctcctcctccgccgccgccgcccttggccttctcgcgctcgtcgccgccgccgccgcccatctcgtcctctcttcctccttgccgcgttcacactggtgacgagagcccaggcgaggggcgtttagacagcttggatgtacagcgacggggtcggggggcctcgagcgcgcgtggtccgtccgatgcgtgaccgacggtccagatcgtacctgggggatccattctactgttcctgtcgcgagaaaggaattaatggctcgtgacgctgatcgacgaacgggaccgtgccatcttattactacgaccgtgtcgggccctcgataaatcggtcgagaaaattgacattttgccattgtcaaaacatgttttgctagaataacacttttaaaaatgatttcgttaaaatatcactctcaaacaggggcaacatgttgcaatgccatttcatccatttcttctcaatttaatgattttttcttgctgagatgataaaaatacccttggatcctatctcatctctcttctcttacctcatcctctcttcgttgcagatggtgggtggcgctggcgcagctcgagaccatcgccgtaccgctacgagatgagaaagctggccacgtcggggatggtgccgacgccgcccttcaccgccctcaccagcttgacggcgaagctcaccgggttcacgcacaagttgccggcggtggcgacggcgaccgggaacggggaaggcagcgcgccttgggacgaggaaggcgccggcgtggacggggacgacagttcggctcggcggcgcggcgcaccaagcactcgacctgaccgcgcgccacggtgtcatccccttctccgatgagctcctcgatgtgggcagcgacctgctcacggcggagctccttgtcgaggggacctgctcgcgcgcgcagccgcagccagctccacccgcaacgtccagtcgcttgagcgggcccttcaacctcatcggggagagagatcgacgccggccatggtggagctcgccattgaagagggactttaaaatccaccacggagttaagccgatttgagtgggatttgtcgggggaattgatgaggaggacgagaggaactgatttttgcattcaaatttgggcaagagcaaccaaggagggagatcaatttggggcatgagttcatcgaagagagaaggatggtggtggacgaaggtggaagacgctcctgccaagcaggccccacggctgaggcaagggcatttgggtcaaaccaaataagcaaaatggtggaaaacatttgcaaataatcaaaattggttaaaatggcagtgtggcaagatggggtcatttgaagatggcattataacgaagccacattcggcgatggcattctggcgaaaccccaacccgagaatggctaaatatcaattttctctattagatatcccatcgtttcacttgttggaggaataaaccaagcaatatttacaaatggaggaataaaccaaataacatatttacaaatgagaaataatttgagaaaaaagttttatatatgtgttcttaacgatataaaaaaaccgaaaaataaacttcaatgaaaacccctaaaatcaacttcaaatttaaggttgaaaatttaaattttggctgataagcataagcgtaagctaaaagatgagaatgtgggattggaactcgaaacatttcgctttggtattatgttaaaagttgtatacatcgactactaatgcaattaaaaccatagggaaaagtacgaattaccccccgaactaccgtggtcgtccgaattacccctccccccgaaccacaaaaccgggcattcttcacccccaactatgcaaaccggataaattacccccctcgactcaatccgcggtggttttggtccacgtggcgtacatgtggcagtccagttagtacacgtggcagtacatgtggcgtacgcgtgggcccacttgtcagtttgtcccctcttctctctcttctcgccaagaacgggcgcccgcggcggacctccatctctctgtcaccgagaggcaacggcggagaggggcggcgacgacaatgtgcggaggcggagctcgggtggcagaggaggagcctgtagctgccggcgctcggggcggcgaagctcgagaagcccgcaactgccggtgcacggctcgtcgaggcggtggagggggcgctcgcagagcaagcagatgacggcggcgggcagagctcgggccggtgatggcgataggcggaggcgaagctcgggcggcggaggaggcgcccgcagctcggacggctgcggcgggaggacgcggcggcggcgggcggcgccaaggatcccccctgctctctcttgcgcatgctctcggaatggcagccagcggcgggcggacctcatccgggcagtcggcggcggaggcggtcctcgcccggtcggcggcaggcggcggaggcggacctcgtccggtcggcggccggcggcgaaggcggacctcctccgggcggccggtggcggaggccgaacctcgtccgggcggccggcggcggaggcggacttcgtccaggcgcgagcctccgcggcggcgccctccaccgcccgcaggtgcgccaccgcgcctcctccagcccactgccgccccgtgagagagaagagagaggaagagaggatgaggagatgacaggtgggtcccacaatttttttttataaatagagtgctgactggactgccacgcgtacgccacgtggatcaaaaccaccgcggattgggtcgaggggggtaatttgtccggtttacatagttgggggtaaaaaatgcccggttttgtagttcggagggtaattcggacgaccgcaaaagttcggggggctaattcgtactttttcctaaactatagaattgatgatgagagaagaacagccaaaactaaaaaaaaaaaaagaggagaaaggtaggctcccatcgttgagtaagccaaacggcatatttgcaaatgaaaagaaaatttctaaacaaaacttttatatacatgttcttatcaatctaaaatcaaaggctgaaaaataaacttcggtaaaaaaaaatcctaaaatcagcttaaattcatatttaaggttcaaaattcaaattttgactaataagtactccatccgtaaaaaaaaaactagatttattgtagttcatattgattatactggaaggggattgggttaaatccgttaattttttttaggacggaggaaacataataataataataataaggaaaaagtacgaattaccccctgaactatcgcggtcgtccgaattaccccttgaaccacaaaactggacattcttcacccccaactatacaaaccggacgaattacccccctcgatctaatccgcggtggttttggtctacgtggcgtacacgtggcaattcagtcagcattctatatatatatataaaattgtgggacccacctgtcatacggttctcttcaatctctctctctcggggcgatgcacggctacggggcgagcaggaacggcgggcgcgggtggcggcgagcggcggtgtgcgggggcggacgggcggcgcgggtgcgcgggggctgacggtcggtgggcggcggtggcggaggtgggggctgagggcggcggcgcggaggcggcggctgagggcggtggaggtgccgccggtggtggtgttgccgccgcgtcgccgctcggcctagacgacgccatcaccgccgctatgaccaacggtgacgacgatccccgggcggcggagcggcggtacgccggatgagcgaggtggaccgggaggagctccggtgcgtgcgccgcgcgttcgccaacctcgaccgtgcctgcaggagcacctgcagggtgccgccggggaggcctgcgcgccgcatccggttctgcttggtggggggaaaactcgtgcgggagggcgaggagtcgagga

SEQ ID NO: 8483 - DNA, 44352 bp, Oryza sativa
cccctctccccactccatcccctcctcctctccctcttctccccccccttctccacccgccgccgtcgtcgtgccgccgcgccgccgccttcgagccgccgcgccgccgccacgaagccgccgcgctgtgccacgccgtgcgccgtcgtcgccgccgctgtcggtgagccgctgcccccctgtttgtcaccgtgccgccgggtagagagagagccaagagagagagaggaagggagaagccgagggagagagaaagaaaagaaaagagaggaagaaagaaagaagccgggagagagagaaagagaaggaaaaagaaaagaaaagagagaaagagaaggaaaaagaaaagaaaagagagaaagagaaagaaaaagaaaagaaaagagagagagaaagaggggaaaatagaaaagaagaaaaggagaaaatagaagggaagttaggggagagattaggaggatataggaaataaaaatggtcggggttaatcatagattatttttggaaattcctagagtgtaatagtatttcgatcgaaattttgggttaattataggaatatgtttcttgatcggattagattaaaaattggtagtaatttagatgtaattaataactaaacaattagatgaattcttatagattattatagattatttttggtaatctctataagtcatcgattcacggtaggaattcggatttaatttttaggaattttagccgtgtattatatttaatcatttagtcatagactaaattaaatcgtacaatattataagataattttaggattttgtccgatatttagcttgcgatagaaatttctaacctattatatggatataatgcccgggtagattaaattaaaaacttatggtaacaaaatatttatacccgcaaaactagtttaggatgtataaatcgaaattgggtttgccctagttcgcgaatagtaaagttaatataaaagaatcaatttttgcattcgacttccatttggatttacttggatttttatttgaattctaaccgaatttaaatcaattttctcacgtaactataaagcccgagaagcccgagggagttgcggatccaagtgaaggccaagacccgcaagactttgagcaaggcaagtcatcactattccttgaacatgttgatcccatttacaaaattattttgtttacaaataaaattacatgcaatgatagacatcctacttgtgattatgccatgccttgattattgtttacccttaaatccttgtaaccgtgatttatgtataagtccctagtcaactatgacaaatgcttagaaatgctactctagatttatgcatactcatatttatcaaaagctatatgcttgggcaattacctttgggaagggaattgagatgcggcatgtggagacatgagcgccacattgccatgatgttgatgacatgatttgtgaaaggagaaataaaattaaataactgttttcgactggggcggacggaggatttgggtggtatccggaaaaggctagtaccgtccccggtcaattaaggaccgagccatgaagttaagcatgaaacgacgcccgtacaaccgcacttctcgtatgggtatagacctagcggaatatatagctgagcggaggcagtatccatgcatagtggtttcttgatgtgtgaggcaggggctctacggtggggcagccattggtagaaccgcgaggcgggtgtctacagtggtgtcgccatcggtaggactgccatgtgagaatttaaacataattataaattaattaatgcatgtgtgagtcttttcttcccgggtgcgccagaactcctctcactgctagaaaccgtgtacgcctagagtgcatgaggatgtgaagttcatggagcgggtactgccaatgcgaggttatcgaaaagctttgccatgacacgtctcatgtgttgggacgaggctcatgtgttgggcagtcgcggagtacgggtaaagtgtacatccactgcagtgtgagtaaatcaaaactattcgaatagccgtgctcgcggttattgagcaccgggacgtgtattacacttggctagactctaaattcttaatttgtgtgggatgggatattgcatgatgatttctttgctgatggagccacttcctgagagacgggaatgtggacgtcctcagaaaaccatgacgactcaatggcgggaagctatccttgggatcaccatggatggtggacagaaccgtcattgtttaatatgaacactggtactaaaatttgatcagtctgtgctaggtcttaggcttgtgaaaagaattacaaaacttgctttgcgcaaaagaaccatagccatcctttgaatacccttgtcatatgcattgttgctgtggtggcttgctgagtacggttggtactcacccttgcaatatacaaacttaatcaaaggtcggagatgaagcttcggaggatccctacgcttactaccaggagggtgatgaagacgatggcgctcagtaggtcttagttacagtcgttgcctatggcaatggcgtgccgctgccttgactccgctgccttacctacttctgtttttggaatgtattccggaccgcttggtccgatgatttaagactatgcctgcgggcttatgatgtaataattcgtattagacactcgtgtatgtgcacttggtatttcagctatgaattcatgtgtaccaaactacttgatccagggaaatggtacagtttacatgattgattcctgttataaaaacgggggtctacaaatggtgaggatctggaacggagggaatcacctcaacaagctacccctctacctcgcggcactggcgatcttcgagatcaaatcaacggccgccgggaagcacgacgcacacgagacaacgtgaatcgctctcggagtcatgtctcttcacggcgccatgataacggaaatcgaggagatcgctcaaacgaggaccgggaccacgacaaccaccacgatcacaacgatcgcgaacgacgggtgccagacaatactggtcatggtcgccgccgtatcgacgacgacgatggagatcggcgccgagacaacagcggaagacgacgacaggattcccgggatccaggccgtcatcctcgtaatcgtacaccggaaccaagcgacctatcgtcatcgtcatcatccgcgtcctcctcatcgtcagacagacatccacgaaggacacacgaccgccggcaacccactgcccccaacgctgggtgtagggctttcggtcgttccctacgtgatgtccgatggcctgagagattccgacccggagcaatagaaaaatatgatgggagcaccgacccaaaggagttccttcaagtctactccacagtactctatgctgccggagcagacgacaatgcgttagcaaactatttaccaaccgcgttgaagggttctacacgttcatggctgatgcatcttcctccctactcaatctcttcgtgggcagacctgtggcaacaattcatcgccaatttccaaggaacatacaagcgccacacgatcgaagacgacctacacgcgttgacacagaacttgggtgaatcattgagggaatacgttcgacgttttaacgagtgcagaaacacaattcctgaaatcaatgcttctgtaattcacgccttcaaatccggtgtcagagatcgctacactacccaggagttggcgacaagatgcatcacaaccactcggagattattcaagatcgttgagcgatgcgcccacgctgatgatgcgctaagacgcaagaacgataggccaaagaccgggggagagaagaaaccagccacggacacatctgagtcaagcaagaagaaaaatcgcaaaaacggaaaaggaaagctcaagcggaagtcctcgcagtagaatacgcgaaccctcccaaacgcccagacccacaaagcagcgacataaagaaatcatggtgctccatacacaagacggacagacattctctggaagattgccttgttttcaaaaagtcgctcgagaagcacatggcatttgaaaaaggcaagcgagtacgcgttgtcgagacgaacgaagagacggctcctcacgaaccggactcagcgtatccagactccgacctccacgtctcacacatcttcggcagttccacaacgtactcctccaagcgagaatacaagaaagtggaacgtgaaatctgtttgacgtggcagggggctgcacccaagatgaagtggtctgagcagaagatagagttctcggaagaagaccaccccaagaccgccgttatcccaggacgatatccgatcgtggtcgaacccgctattcggaacatcaaggtagcgcgagttctcattgacgatggcagcttaatcaatcttcttttcgccagcactttggacgcgaggggaattccgcaaaacgagttgacaccaactaatcaacccttccatggaattactccccaatcatcgtccagacctttgggcaagattacgttgcccgtgactttcggccaagccaacaacttccgaacagaacagatcacctttgatgttgctgaattcgatacagcttacaacgccatcattgggagaactgcacttgcgaagttcatggctgcatctcactacgcatatcaagtgcttaagatgccgggaccgaagggaacaatcactattcaggggaacgcaaagctagcagtggaatgcgacaagcggagcctcgacatggtcgagcaaacgcccagcccacacgccacgactgagccacccaagaaagtgaccaagacaaacaagacgccgaaaccagatggcgtcatcaagattgttccactctctagtgccaaccccgataagaccgtcaagatcggggcgacactaaatgagaaataggaactcacgctcatcaccttcctccgcgacaatgccgatgtgttcgcttggcagccatccgacatgccgggggtccctagggaggtgattgagcacaaactcatggtgcgacctgatgccaagccaataaagcaaagactgcggagatttgcaccagaccgaaaacaagccatacgagaagagctcgacaaacttctcaaagctggcttcatcagagaagtacttcatccagagtggctagccaatccagtcatggtacggaaggccaacggaaaatggagaatgtgtgtcgacttcaccgacctcaacaaggcgtgccccaaggatcactttccacttcctcgaatagaccaattggtggattcaacagccggttgcgaattattgagcttcctcgacgcttactctggctaccaccaaatcagcatggcaaaagaggacgaagagaagacaacattcatcacgcctttcggggtattttgctatgttaaaatgccattcggactgataacagctgggaatactttccagcgcacggtccagggcgcacttagcaaccagtttggcaacaatgtcgaggcttacgtcgacgacatcgttgtcaaaaccaagacaggcgactcattgattgacgatctgcaggaaatgttcgacaacctccgacgatatcgcctcatgctcaatcctgagaagtgcacgttcggagtaccgtcgggcaagctgctcggattccttgtctctggcagagggatagaagcaaaccctgagaagatcaaggcaatcgacaatatgaagtcgcttacaagactcaaggaggtacaaaagctaaccggatgcatggcagcactaagcagattcgtcgctaggatgggagaacgaggacaacctttcttcgctctgttgaagaaacaagacaaatttgtatggacacgggaagccgaagaggcattcattgcactcaagcgctacctatcaaacccccctgtacttgttgctccccaaactaatgaagaattattcctctatattgccgccacgccacactccgttagcactgtcattgttgtcgagagagagaaagtacagcgaccagtttattacgtcagcgaagctctccacgacgcaaagacaagatacccacagatccaaaagctgctttacgcaatcatcatgacatcaaggaagctacgccactattttcaagcccacagagtcatagttgtctcctcttcccctctcggtgaagttgtgagaaacaaagacgttgtcggccgcattgcgagatgggtaatcgagctgagccagtttgatgtccactttgtgccacgaacagccatcaagtcccaggtactcgctgacttcgttgccaattggactatgccagataacaaatcagacaaccaaggcgacaatgaaacatggacaatggcgttcgatgaggcactcaacagccaaggaactagggcaggatttatcttgacgtctccctccgaagatcaattcaagcacgcaatccacctcaacttcagggcgaccaataacactgcagaatacgaaggactactcgccgggatacgagctgcaaccacacttggggccaagcgactaatcgtcaaaggggactctgaactagtcgcgaaccaggtacacaaagattataaatgctctaattccgagttatctaagtatctcacagaagtcaggaagctagagaaaaagttcgatgggatcgaggtccgacacgtctacagtaaggacaacatcgagccagacgacctagcacgacgtgcatccagacgaaaatcgctcgagcccggcacttttctcgatatcttgatgaagccatcggtgaaagaggttagcggcgaagtcagcccgaacacccccgacattagctcggaggtcaccgaggcagaacgcgccgttgccgacatcgaaaccacagacgactggcgcgtcccactaatcaaattcatcagcagcgaggagttgcccgaggacgatacagaagccgagaaaataacccgtaaagcaaagatctactctatggtcagcaacgatctatacaagaaagcgctaaacggggtacttctcaaatgcgtctcgaccgacgatgacagacacctcctcctcgacatacatgaaggcatatgtgggtcacacgccaccggtcgaacattggtcggcaaagcttttcgacaaggctttttctggccaaccgcccttaaagatgcatgtgacatggtccagcgatgtgaagcctgtcaattccacagtaaacacacaaagctacctgcgcaagcgctccagactatccctctgacttggccattctcgtgctaggggctagatatacttgggccattcccatgaggacagggcggctacagattcctattcgtggcgatcgataaattcaccaaatggatcgaagcagtacccacgggggaaatcaaggccgacaacgccatcaaattcatcaaagggatattttgcagatacggactaccacaccgcatcataactgataacggctcccagttcatcagcgctgatttccaggactactatatcgggctgggggtcaaagtatgcttcgcctcggtctctcaccctcaaagcaacggacaaatcgagagggcaaacggcatagtactacaagggatgaaaaccagcatctacgacatactcatgtcacacaacaaaaggtgggttgaagaactcccgtcagtactatgggccgtacgcaccacaccgacaacgtctaataaggaaacacccttcttcctcgtgtacggctctgaggccatgctcccaggcgagctacaacatcagagtacacgagtacagaagtactccgacgagaaccaggaggagcagcgagatatcgatgtaaatcttctcgaggagcatcgggaacgagttgccgtctgagcagccagctatcaacagaccctccgctgttatcacgagaagcgcatccgtgcacgcatactttcgatcggcgactatgtcctccgatgagttcaaagccaagcagggcgaaacaaactctcacctaaatgggaaggaacttacacgatcacacaagtcttgcggccaagcgcattcaaaatcgcagacggcgacggtcgtgaattagcaaattcttggaacattgaccaactacgtaaattctatgtatgagtcaatatcatccatacatgtaagcacccttacagtatcaataaaggctatttctaggcccatatcacaatcaacgtgtttcgcccgatgatcccccactctgatgacacctagcgttgaaacctgtccttatgtccctttacgccgtctcgacaaggcctccgaggaacctaagggatctttggctggggacgcccaaagccgataaggccttgtcagatcctgtagagacgaaagaccatgtaagatcttgtcgtgtaagagttctcgccgtgcgtattaaccaagccgtgaaatcggaaatcaactttccaacttcacggctgggggctaggatcagagcttattcaaccaaggcaggtcaaaggtccaagagccttatcctccgagaaaattcctccgacgacaaggctgggggctagggagagtgtacgactcaaacggctgactaaagtcgttaactgagaacgcactcttacacatgacatccagagtaagaggcatttgtcaaagatagatttctttattcacaaaatactccttacagttttttcacaaatcttttgctacattacatctttttcctaagatatttgtcacaaggtacgagtactaccaagagggccaacgccagtccatagactggaagatcttttcggccaacggcgacattgaccttgccagatggtctatctccgccgaagtcctccgagaacgagcaaaacactcacgaaggtgttcgagctccaggtgcgggcgataatctcgtaggcaagccaacacgtgccccccggcataccggctcgatcgacgacactcctgcttcaaggcctcgtcgatacgcttgtcgattccatcgagttgggcacaggccccattaagccacgagatgtacccggccgctgactcctcgggatctccgcggactacttgaagctccttgcatactctggccatggatgtgcagcaaatcttcaagtacgagttaaaccatacctcacggcctcggagcgtttccacagcctgctctttcgtcacggccagcatggttctctcgagctccgccacttcaaacttcgtcttccagtattggatacgacgatcttggctagcaagggcaccctcgatatctgctaaatgtgataaccactaagtcaagctgtacatctcttttggcaacatggctgacctagtcaggtgggcattaaggggtgaagggactactaacctgaggaagtcgtcgccatccttccctctatatcaaggggttgatccacatggtcaggcgagacgtgtggttcgaactcgaataccggaattactgccagtgactcgggctgcccacgctgctggacatcctcgtcatcagtatctctacaagaggacaaaagttcccgaggtcagcatactaaagtaagccgggatagtaatcgcatgcacaaagacggtcagagttcgagttttacacattatctaggaaatacaagaagtcctactcttcaaaaagggggagaacagactctcccagatcaccgatttcttccatcacctccttacgcgtgtcgctggccgccccctggtccaagatctcgcgcagatcaagttcaggacgcgacagccttacacacgcgaggacatgacacgccccggtgtagattccgtttgacgtctcctccgcaatcctagctgcatgcttggaggggatttcccccattgccgtcgccagttccgcgagagaggaggtcagcgaaaactcatcgggattcgccgggatcgtggacgtgacgccgcataccccggcgagctggtgaaggccggtgtaggtgaccctcaacgagccccggatctcagataggttgttcccgagttctgacattcggtcctcgagccccttccgttgtcgctcgttgccggtcgccaactccctcatcttcgtgaggtcttcacgggctttagccaactcgcgcacaagtctgtcagcgcgttcgccgtcgccgcttccgacctcgcctccgcaatctcgcagccaatgccgcgagcaccggcttcgaggaggcgccccatctcgacttggagctcctcccaggtgaggactgcagctggcagatcacgacctgccgcggggtcgctgactgggccactaggcgtcgcctcccagctcccggctgcgggcatgacatccgtcgaggccacaaggggcgacgcactagaagctcttccggacttggctcgcgcagcctttgctcgcgcctccctacgggacgaccacgagtcagacaataagcgaataagaagcgcggggattcaagaattcatctacttacttctcgccaatcgtcacaatgcgttgtcgtcgtggaggtgggggagatgcatccgaggcctggaatacaatcaacgcaaagtaaggaaaaatccttcttgctgcatgatttaacgacaaaataaattaccgagggggtcgacaccatgcgacgttgtccgcttacagacgagaatttcctcggctttatcggaacattgccaccactagtggtggcagcatcagatacctccttgacggccttcactttcaaagatgacgccacctgatggtccgcgagcggtccgatgatatcagtcaaaggaagggcctacgctcaatcaagtcataaagtgatttcgaaaggagaatgcgggatgttcaccaaatatacttacgttgatggcttcatcacgttccgctgcccccttttcacaaaggggcacagggatgtcactcgccgtagtcgggccgctgatcatcacttggccgacgcggcgctccacgttttcgccgctcagacctgttaatcgagaaccaaccttcgataagtcaagaggaatgcggacacaagtatgtcaagatgaatgcgagaaagataccccgaggagaaacccgggtcgcgtcctctggcccggaatagttataagctggatgggcccgagcctgaagcggctagatccgcctaccaacgaagtctgcaacgacttcatatcccgacaaaccctgtactcagagatcgtcgatgatgtcgagaaacgactgaagagagggggtcaaggggggcttggcggtccaagacggaatcttgtccggttgatcttcgggaaccacgaagacagggttcgagtccttgatctcaagataaaaccacctattcctccacttgctgcgagaagaagggcactggaagggaatgtaacgcaacttcaggccatcccgaagtcggaacccaacgcaaccagataccctgttggattccatccaacgcagttcgtagtaaaagcaaaaaagatcaaggaaaggctctaccccgatgtaggcctcgcaaagatgcacaaagatgctaaggaaggcgatggaattggggttcaaatggagaagagaaagaccatagaaattcaaaaccaggagaagaaattcagaaggaggagggagaaaaccgcagagaacataatcttcgatcgcaaccatgcgacccaagatgggctgaggattagtacctcctacttccctctccatggttccacagccaggaagagcgccatcctcctatagtttctttaacgttgcactggtggaagccgatttgccgaggtccattgctgatcgaaggtcgccggaaaacgagcctagattgatgaactagggtttcttgcggcggcggagaaggcaaagagtgcttgcagtggggtgtgtttaacaggtttggcggacttcaaaatggactcccaaaattcctttaaataggcgcactaccgacggtgcgaattccagggaatagagagagatgcccgccggaaatttctggtcccattacacgcggcggttttttggacttcagtttaaaattcgttcgtgaccgttgggcttcaaatggcgtgctcgactacggtctatctccgcggtcctcgcaccgggaatgacaacagtctcgacacccgaagtcgcaaatggttgcacgagttcattttaagcagaagttgggggctactgtcagggttacaggttaggcataccctttacccttcgatatacgtcacatatcggtatggtatacctacacgcatacggatgcttcccgcgtactctaaggaaatccttcacagagtctatagatgggaagaatcctactcggacaagattgggtcgttaatgtatcgtacagggtctgacatctccgagttctacttggagacctccagatctgcgatataaaagggaccccccggggagggcctaaggcatcgaatctcagagccagcacaacccacacagcctacgaagccagagcctgcagggagccaagtcatcgggatctagtcgaaccaactcgactatgatctcgccggatccgacaagttcccttgttctctttgtaacctgtgttttctaccatataatcccacatcaattggattagggctattacctatcaaggggcctgaaccagtataattcttgtcttttgtttgcttgatgacgtactacgtagatccttgtaccaatgtaccccaataccctctatatccggtctacgggtatcacccatcgacagacaatgcccccctgaatcatgcccgatagggttagcgggcaaatctttctgcccgtaccccgatggatacccggagagcacccgacgctgacgatctgagaagtgcctgtcattgcttgcatcatcgctcgccgccgccgagactctactgatgctgtcgataggagagttgactacctgccgtggttgcgttgccgactctgtcgcctgctaagccccccgccgtcattgactccgctggtaccgccgcttgctcccgccacttgctcgtgctaccactgccctgagagccgccattgttcccacttgctcgtgcattgccttcagccgccatcgtcgttgcttgcccccgcgctaccttgagccaccgccatcgtcgcttgccggcgctgcctccacatgttcctttgctaaatgtgctgtcgtcgccactgcgttgaagtgaggtgggatgaaaattaggttatggtttgatgttgttggctaatgggccaagagagagatgagaatgaagatatgggccaaaatcaataatacatatatcgggtcgggtatgggttatccgcgagtaaaaaggtaagatccggctgctgcccactacattatcgggtctcgggcgtgcatgcctaagggtaaaatattgcacccatgcctgtgcccatctggtcgggtaaccgcggatacctgaacccgtgagcaaaattgacatccctaattttattctctagctgcttttcctagctttcgtattcatgtgaccatgcggggtctcagtcagccaaaaaaatccaccgtgaaaaacagtcctgggggtgtaaaataaattaggtacatcatgtacggaaactgctatttcgcggctagtcgcgcgcgccctccccagcgtgactggacacagcgcgcacggggaggagggtggcagacagccgctcttttccttttttttttccttttcccgtttctattgtttcttcccctcttttccgtttctttttcgctttttcggttgtttttttcctttctttcgtttctttttcttttttcggctgttatacaaactatgtatacacatatactaagtctgtatgtatgcgtgtacaaactttatatacacatatattttttcgttttttaaacatacatatataaaatatacaaagtttgtatagtttgtatacatatatatatatatatatatatatatatatatatatatatatatatatatatatatattgtacatcaaaagcatatgcgaatacatataaaaaatgatatagaaaatatatacaaaatttacacatatattttatcgtctatatacgtgtgtgtatatatatgtatatatatatatatatatgtatatgtatatatatgtatatgtatatatgtatatgtatgtatatgtatatgtatatatgtatatatatgtatatgtatatatatatatatgtatgtatgtatgtatatatatgtatgtatatatatatgtatgtatgtatgtatatgtatgtatgtatgtatatatatgtatatgtatatatatatatatgtatatatatatgtatatatatgtatatatatgtatatatatatgtatatatatatatatgtatgtatatacatatatacatacatatatgtatatacatacatacatacatacatatatgtatgtatgtatatgtatgtatgtgtatgtatgtatgtgtatgtatgtatgtatgtatgtatgtatgtatatgtatgtatgtgtatatatatatatatattatatatatatgtatatatatatatatatatatatgtatatatatatatgtatatatatatatatatatgtatatatatatatatgtatatatgtatatacacctcatattgtatgatacgaagtttatacgtacatatttaagacatatatacatacctatacatactgagactagagggctagcgctggtcgcacgggcgtgccggcgcgatcagccatcccccatcgtatacctgggcagtgctgttaatgtccgcgaattaaattcgactcatatacgaggaacctaatatgaactttattttcctgttgcgagtgtatcccagcccatgtaagacgcccgtagcccatatcctatctcaaagcagtcagcgcaggcccgcatgctatcgcaacgtgcgtcctcaatccccttcgccttcccgtctgatgccacaaatcaaagccctcatcctcttcagttcaccgtgaacaccatctatggtggaccgtgcacggcctggccgattcctctccaggagtgaaaccgtcgcaatcaaagtgcagccaacaagtgtccgtgtttaattcttttcacttaacgtatgcttttattcttcaatccctgtatatcatcgttgacccttatacttttatcaagtgtacggacttactccctccgttctataataattgacgttttggacaaagttacggtgaaatttttataactttagccatcaataactttaaaaatatttagtttagagaaactaaaacaacatatatagatttgtttttcaaagcaccataataataaaagtaaacatgcatttatttattgtatatattataatagaaaaataaggttaaaggtatattttgtagaccgtgttattattcaaaacatcaattaaaatgaaactggagggagtacctgggttagcagctatcagcctatcatgccctcaccaatttagcacgacctagctccctccgttcttaaaaaaaaatctagtactccagattcatagtattagaatatatcacatccagtactagattatttttttatgaaacagaaggagtatgcccccaagaacaggcacttgcacttctgatactcatgtaggatgtagcttatgacatatactttgttggtactttgtccccagtatacttacatgatcttttttaatgattaattgatcatttcctacaaccagctctcatgtatattactatcctatctaactgactatatacacaatgcagtgttgggcaccaaagcaatatctggccatgacaccggttcacagccgtctgtcactggccctgtttgatttagcttaggattattataatctggattattaggagtaagctgaaataaacaagtagattattacgatagattattataatctataagccagattactataatctaataatctcctatggatgagctttttccagattattaggtggctaaagacccactacccttagatgccttcaataatccagagaaacaaacaactcacagcttattttatgttagcttattataatccagcttagagtaatatgatttaataatctagattataataatcttaagctgaaacaaacaggccctaagtagcttctaactctatagtagattattaatctattagtttcttttcactttcatcatatacgcgacatcaaccatttcatcactaacttatgctccgagagccacctacaacttatagcccataacttttactcaaatactccattcatagcagttcaatctagaagagtagcccgactatcattcctagaggattgtgcgatagtgtaggggaatactgagaagagggtggaataatttaacccataagggcccctttgaatcgtaggaataaaaaaacggaggaatagaaaaaacatagaattctgacaggaatgtaagtgtaaaacagaggattgcaaaacacaggaaaacgcagcaatgaatgtttgattgggccacagaaaaaacgtagaaatcggatgagagagatatactcaaaggatttttactacaaggttgaacctcttgctaagtttcctccaaaaactatatacaataagccattccataggaattttgtaggaattagaaaacttcaatcttttgaatcaaagggctacatagaaaaatttcctatagaattttaatcctataaaatttcctttgattcaaaggggccctaaaagtgtggaactgctttagccaggttcaaactagaaagcatggaatacttcttctttttttcttttttgaaaatccaagtttaaaaccaaacaaacttctcagaggataaatggggtcctctcttatcgtgaattcatatattccttatggtgaatggggctatctcccgagcgtgggttgaggttcgtcatcactcatcaatgaaaaaatggaacacttaacagcattttttttactcgttttagttaacatatctttgtacttgtgcttattgtctgatttatgttaatgcatcttcttaatatgtctttgagcagctttgttttcgtgccgtttcgaaaggattttcataatagtagagagctttcagatagtgattgacgttgatataaatttatcaacaatacgcacaacaaaaagtacattctaagtgaaattttgattggttgttgggaattcaaatttaaaacaggccagttcaactaaaatttgattgaaattcagaaaaaagaaatcataccattgagactcgagattcgacacttaatcagaaaggtgaacctgagagtaaatatggttcactgacaagtgaaaacacgcccaatatataaactaaaaccattggacaggttgagagggttttacaaaagggatcattttgcccatcgaaaaccgccccaacctgctcagaaaaaaccacaccccatatgttttgtcaataaaattgacaaccgatcaccgatgaaaaccaccgaaactcaaataaaatttgtcaaaatttctagtttaacttcttcctaattctgaacaagaacaagatcgataagactgataaccactcaatcgttgcatgttgaaagtcgagtcaactatataaatccaagtatccaactctctccacggataataaacccagttgtccatcaacatgactggataatgacgagccaacatgtataggttttgtttggaagagctcgaaattccaagaagtagcttggatcgtcccgtgcatacctctgctctctgacgacctagactggtgaatgaaacatccatgtaaacacattttgatgtgccgatcagagttgcatagatcaacatcaacatggaaaatacgttcttatatcctgtggcatggtagggataaaccaaagtacgatctgggactgatctaatccaatcaaattcatgatgaccttgtgaacatctcttgattgatcaactctgtttctctgaagtttcgaagtttccatatgatcgacgcaattaaagatagaattgtatcgagaacgaagcacaaacaaatctacagttaaaaaagatcaaaagggacatgcatatgttttaagcctaatgactctctctctctcatcgctaatgacgaagatcaactcagagccacagggctcctgcctgcttcaagaccggcacgagctcgccggccatgtgcatggccatgagccgatcgagcccgcccaccagcctcccgccgatgaacaccgccgggaatgccaccgccgctccgccgcctccgtcgcccgccgcagccttgtcgccgccgtccttgcgccggcgggcctgcagcgcggcgtcgacgagcgccgccgggtcggcgtcgtcgccgacctcgagcaccgccgggttcgcgccctgccccagcagcaggcgccgcgcgacgtgcgccatgcagcacccgcgccgccccaccaccacaaccggcttctcctccaccgccctccgcacctccctctcctcgtcggccgccgccgccgccatcgccgccgccgaccttgctccttgcatttgggagcgaggaggggatcgatcgcgcgcgcgcggggcggcgagtgatcagggcggtggtctacttgtcgaggtgtgaacgcgtcgtggaccgaagcgaccgctcagatatggagccacggatggttaacttggttaggtcagcctccttgtcttggtatgcaccaatgcacataaaacatggaaatcatttgtttactccttaatttctgctcgatctgcttcattggaaattttttttggaatatatgctattatctggaaatccggccattaaacgttgaaaacacggaaagtcattaaagaaaaagatatcacgttgtgagaatgatttgctagattgatggacattatcacacaggttttgtatttgggttgaatatgtatgcattttctttcttttttttaaaaaaaaaagaatgtgagattcaattgtacaagtcgatactacgatggtcaggtgctacttggttcaaaaacaaatggaattgcctagttgtactacatatgcaaggtcagcaaaactgttgccaccgagcaccagggtgttagcaatcgtcactgccatcatcatcagttgaaaactcctcgtcgtctactcgtcttcgctcggcttgcctcggtgatatccatgtacagtatgtgtggtgtgtgtcacatgtgcgtaattatgtactactagtccattcgtttcgtcatcagtgatgcgttccgatccatctcgtacttaatgacgaacatgtcgtcttgactccactagacccaaagtacagatcagcaggaccacgtagatcaatacgtagactctacttccaaacctgagtacataattagtactttttttctctctcaaacccataccggccagttcaagctatggtacaataaacgcatgtaaaatgtttggcaagtcaatctttttttttccgagtttgggtcgtggcaactaatgagcaattacacatttccttgcatagctagaagttgatttttttttaatagagggagtagctagtttggtagcgaagtcgttcttaaatttcgttccctcccaacgtgcgcataacaacatcttcaatagcattttcaaatcagactctccaaacactcatatagctaactccccatctgatttagctagtcaaactagatactcactccaacagatcaatgctctccaaaataacaacggacccacatgtcagcctctactcttcttcctctctctcccattcttccttatgtttccttcttttcccctttccttccttcccgtcgatcacattgttgccgacgacggccgacgcatggcgcatggtggtgcagcgacgcgggaggtggaaggcagaaggcggcgcggggaagtgggaggcggcgctgggaggcggacggcggttcaccaacgccgacgctgccgaggtggtccccctctccccgccgaccactccccgcagctgagcgccgttgagctcccctcgggttgccagatctagaggccgccgccgcgaggtgttttggctggccaaatctagctagccagcgagcgagtttggccatccggttggtcagtctgttggatctcttttttgtgcttgaatggccaaaatttggctggagagactgttggagatgccctaaggtcgtctggtccttggcatgtgatgtgcactagggtttccgatctttcaaaaggttctgataaacaacgatttgggcggagtcgtaacaaaaatcgatccagcttcttgaatgcgcacgctcttgagcctcgcaatcgtagcaccacgtctcctctggttatcacccgtgtcgaaacgcggatgacctcgctgagaaggctaatccctgtttgccaatcgaagaacacaaacaagaacgagatagaaaacaaccaaaattgcagatgaatgattaagctcacgagttggggtcttacaaaccgatctagcgacgaaactgttctcgacagaataatctaagcaaaacccaaaaacctaaagatggcggcgggtactgatatatagagtttagggtcgtgcaatcccctctcgacgcaaccctaatgggttccaacacgatacacgggccaaaggcccaaatacggtgacgcagcaccaggacagattctggacgtcaacttgttcggtcaattcccattgacccggagagaatttggacgtgggaccaaaaccattggaaaggttatcttcttagctttccatccatataaagaacgccccaatccgagcatgtatgcgacctgagcgtccgttttagtgcagactagtcctggactccgaattgcactcgacgtcgacttggtttgggcctccaccttgacttagacgtccttgatgatcctccatggctctaagtccttctccaagtgtcttcttgtctcctccattatttctaagcacaatataatcattaggtaacaatctattctcgaattcatacaaagaagaacataggagcgagctcgtctctaaattcaattgtcgcgcacgagctcttgttatcggttcttgaatgaccgttggaggattgttgtgtgtattcgaggtaatgatgtccgcagcagcatgtgacagccaatgcaaaatacagtgctttattctcgattcatctcttcagtcaatctctaattatacgagactgaataaatgtgttggtcgtgcaaaagcggccaagagcagggtggtgtagttcgcctattgcgcgttccgcggggtgtacacgtctcaatagggatggagctatcgtccggctagcccagacaatcgccccggctcaccggtgaaaattccattaaatattactaatacttttgaataaactgatcaggaaatttctatagcaaatgtagctatagtgaaatttgccccgtttcaaaagtttttctaactccgccacaggtctcagtcaatgtgcgcgtctgtggcaaactggcaatgtggcatgcatgcagctggaggacgacgacgatgacgaggaagcgcgcgtgatgcgcggcgcgccgcacgtcgtcagggcccggatgatcgatgcagcgtgatgcagagtgcagggtgcgcgccgacgatggcgagcgctcacctacctagctaccgtgtgtttcgtacgcatatgtggctacctacgtacgtcgtcgtcggtcgctggcgtacggtgtgtgcgtgtgtgcatctcgcatgtggcgcgtaggctggcgtcgggtctttatctgtacacataggcgcggcgctggcgaagaatgaagcggccatcgatggggatcgatcgatcgagctgtaggctggagcctgcaggatgcatacatgcgtgcagtgcacacatggggagcgacttgcggacggtcggcatcgatggttaagaggcagcatgcaagcgaaggaccgaattaaggggccccgtatggaaattttgttgctttggttggatttgatcatctgctctgttttaatttgccggacagaatgtgctgttaattcttggatccccacctggactcctggagaaaaggagtccggtccaacaattcggccctgtcgtcgttgctggcgaattttcagtgaagctcatgagctgatgtacgttggggtgtgggtgatggtgttgtcattcagtatttcagtgtgcccgttggttttgcgtacgcctacatatacattggttttggcttgtttgcctccatcgtttttctctcaacttttgttattgctggtccaataaaaccagtatctctatacagagtgccatgttagaacgtagaaaagggttctccaaaaatttctcaggacagtacatataaattataagaaaaaataattcaaccagggtcccgtagctcagttggttagagcgttggtcttatgagccgaaggtcgcgggttcgagccccgccgggaccaatttttgctgaaaataaatgcaaatcataatattgttaaatacattttttttgctgaaaataaatgcaaatcataaacatctgtatgaagttttttttattatttaatgcaaattaaaataagtttttgctgaaaacgattgcaaatcacaaacatctgtataaagtaacttctaaaagtatttaatgcaaattgcgaccaaattttgctgaaaatgaaaacaaaccataaacatctcgggtgtagctgcttgcctcttcggcgaactatggcagcgaggtcgaggaaagaatattgttaaatgcaatttttgctgaaaataaatgcaaatcataatattgttaaatgcatttttttgctgaaaataaatgcaaatcataaacatctgtatgaagttttttttattatttaatgcaaattagaataagtttttgctgaaaacgattgcaaatcacaaacatctgtataaagtaacttctaaaagtatttaatgcaaattgcgaccaaattttgctgaaaatgaaaacaaaccataaacatctcgggtgcagccgcttgtcttatcggcgaactatggcagcgaggtcgaggaaaggcggcggcacatgtagggaggggagcaccgtcatcggacgcctctctgccctggttgctattgccaggatggaagccaccggcttcaagggctaaattgacacagcggtagtgcagtggaggaagggagaaagaggtcgcggtgaaaagggaggatagaggactactaacggtaaaatttggcatattctattgagtaaggagaaagcgcagagcggtattgatggcgtgattttgggatccaaagttagaagattgcatcagctaaagcgtatcggcggcagagttatgaaagttgccgataggacatggacgataaccaggaatcgaccccttgtcggactcggtatgggaagatttggtgacgttaccaaggggaggtcgagttctcgataaggatacaacatcttaacttatttattaaatagattgagttagttatttccttttatgttttaggaaagtttgttttatagttcgattgggcttgtaaattttttactttatccttaggaaaatttgagttatatccgataataactagtatttacttatggtataaatatatacatacagagtctttgtaaaaaacaacagttcaataatcacttttcggcgcattcctaccctagtttacaaggttttcatctcaacgagttcttatattcgagttgaactgtatcggcttagtccgatctccgacaagaggtgagttccgtcaatagtttgcttgtatcggcgaggctagggcttccatcgattaagttcgatactctaaatcagtcgatacaagcgctaatttatcatatacattgttcaatctaaattaaacaatgttatttacccatatcaggtagttcaactcagggccaccttctattgtctaaattactcttgtaaggtttttttagatcttacgatttctatcacagcttggtgctgcatcagttagttttgacctactaagttgtacttgaaattgtaagaactaatttgctctttgattgtcgatagggtcaccggggtttcattcggtcttacctgatataactattctgatttactgtctttgcttaatatattatatctatcatcttatctaagactatcaaacattcaaatctattaagcttgtaattggtcccgcaacatatcagttaagtccgatatgttgggattaagacttgtttagtatatttaactggaaacatgatatctgttgtatcagagttctagctgatatgttatctctaagaacctaagttacttcatcagctatgatataaattcatatattaatttatttcctcttgagtacaagcaactaatattgtctcggttaggtccgatctatctcgattgctcgtatttaaggcaaagatcgaattagtaattgcatgataattacctctaccgccgattgcaagtaatttaggtctaatccacaaacatatgttcatcgactagttatttcagttataaaattattctatgattgactttaactttattaattttatgctatataaattgtgtttgacatatattattgatttttctaagaaaaagttatttataattatatgtaatctagatctagcttatgaacaagtatccttcatatttatagccaattcatttgtacaatagtttacgcgatacaacatcggcctatcggctgattggctatcatttactaatttttgctattgtctatcttattaattgcaggatcacaccaaccggcacgcctttaaaccagtagttttagacctgcattaaagttaagcaattttttcagagcatcgtgttttgcatcaatgaggacacggaacgtgcaaggacacgtgagcttagagcggtgccagcgacaatgctccagttccattcatgtcttcttgggctatggcggcagaaacgagggagctcagcagcattgggcgccgccgatcccattctactggactgctgccactgccgggcatgaccatccctgtgctccttctgaacggttgaagctcgagcattgttgtcagctaaatatttcctaactaccctacctaagcattgttgccacgtcatcaaataccgtctacaatactgttatagaagtcaatctgtaccggttttaataatttgagtcttccatcccgattttatggttacattttaagggagttaaagtggacttttttctaaataaaaatacacaccaattgcctattgggcctgtccctagaatgggctcagtgggctcgctgcgagcagttacaaaacgggagaaaaattggcgagcacggcgcctccgcttcatccttttccacctctcggccggcgtcgccaaggtttgctgcgactgcgaggcaccccggagccacaaatcctccccgccttcgcgcgagctcgccggggggagagatgctgctggacgagcccctcgacttcgagaaggaggatccgctcctccctaaggcgcgccccgccaagaggtggcaatccgtccccattctactccgctttctttttttttgggtgccgattgatttgaggggttggagtggatgtcaggttttgagttccatttttgggcaattatatttctggcgcgtatggtcgggtctcgagtaatcggggtgggtgtgatttcgctggttgcgggggttcccttcttctgatttttctagggttttaggggataaagtgaaactgcaatgtcgttgctttggctggtttatgtttggtagtaggattgaagtagtagcagtagcactcagtcgatgaatccgtggtgtttgcagaagattcgtttgatgagtggtcactggttagctgacaagatgtgtagtgatgatatatattgttagttaccattggaatcgtttgccctcaaggtgtgtaaatgtgttaataacagtttggtgtaggtagtacgaccattttagagacatatttaatttaccactgcccattttcttttcaggaagaaggttattgggttggacgatcttttagaggatttctttgcaagtggtaaggatgaccttaaagcttatggtattgagtccaagcatggatccaaaggatataattcagatgatgaagacaagaaagtgaaggagaaggagattaagtttcgcaaatttgttgaggagtatgaggagcaggtagttttcaaacaaacatctgttcataaaacttttacattttctatgtatattcctgtctctaagatattattgaatttacagtcgaaagagttggatgctggtgatgatgtgccccaatggggtcagagagtttttggttgccaggttaaatggccctacatttattcagttaatgttgagtgcgacagctaagtgattttttctattttttaaaactaaatatccttatgtactgtgcctgcagaaatccccttctgttcttactgtcacaggagttgaaaattgtcaacttctgaaatcattctgtgcaaatgagcatttaggttttgatctaaacattgaacaaggttagttctgttacgagtgtctaagtatctgacttgcaaaaaaagatgatattatttgacttgtctttgtttctacttgagcttttcttcttctcgactgtaccactatggcataatattcttttatcagtcacttcaacatttctctattgctatttgtgtaggagaagggtttctagaaggcttgttggtggatggatggcttttgaagttggtcctcttgcatggctctgttgaagattctatagcatcttgggcactaaccaaatgtaagaattgatatatgtgtgtttttccagttattattgtttgattaaactgtactgtatgcttaacaccactagctaccagtgttgtactcgtgtaataagaagtttcgagttgctgcatctgacttttgggacagtgttctttccctaaatgaggtaacgtatttataagcaaatgtatggtttgtgttatactttgaagattctgcatgtaaatttttattcgttacaggctgacaaactctcagttgacattggacactttccaagctactctgttctaaagagtgccatactcaactatggatatatatttgataattgcactgaagtttccacctctgaaagtgtgattgcaggttggttccatccaaattgttcttcctttatttacagtttactcaatttttaattcactaattttcagcctcgtgattatgagcattcatgaaaaattcatgtttatttcgttatttctgaattagtacccagtagtttggacattctgaaaattaagcttttcctatttattatttgatacttcagatgatggcccacctcaaaacatcattgaatggttaaaaattacatctgcttgctgcaaaatcaggtaagtggaagcttctgaagctattatacagagattacattgccttaggtgtttctacttttctgtcattcacaaagtctaaaacaaaagacactattacacactaacaatttaacatcaactgatctctgtaacttcatatttgcttgttagtttcaacagagttattttgtgttgtaatctctcaagttttggctaaaacaaaataatcagtataaatttgtgtgttattgcttatatagatgatagctcatagttatattatattaggactggatgtttctagctctgtctgtaatactgatgttatcccagtatgatgcaaaattctgcccaaatctgcggtcactatattttgcgatgataacattctagaattgttctactgctacttaagggacattttagtttcatgattctgtcctgttctgatgttcaggcttccagtgtggctttgttgttccactatttgtgatagcgatgtctttttgtatggtgaatgtaaatctctgtattcatttaatccttctaaaacaataaatattatgatattaaccagtgtttcagtaattctgctattctttttgtaccaagttaattctatttgaatatttatttgatttacagaaatgtgcattccatattctcatcttccgaggcagaagaactccttgttattgttatttccttatttttggaccgacaacttgagggcctgctgcttattttgggagactgtctgagttcacttatcttgtacttcaattcaagtgaatgggaaagtagctgtctaatagtggctcagtccatttcccagaggtaaattttttcaaaacgtcttatttttaagacgagatctgtattggtgatttgtaaccatttaccatttcatggtatactgatgcccaattgaacaagtgctcgagtaatttatgggtgaatacattagttagatattgactaggatgcaataatgctttctcaacaagatatgtcggcgatgaaccttgttatgccgtttgctctacgttgaggactttagcttctgtacaattctattccatctcttgcaatgtttcgtgtacagtaactcatggtattttgttaaagaatagctcacatggcttttgcttacgatatttgcccatctgaaatcaacttcataacattgcagagtcacaatggacctgaattgtttaaggattgttgactgtatcactgggactgattaccgtagcaaattcttaaggagccagctggccctacaattcctcaaagttagctttggccttaaggtaagcatgattgatgagcatgtctcttcaatataccttttggtatggttgtgctagcccataaatttttgtgtgttctgcgtattcaggtggcaaatgttgagaagatcttgaagtcagtcatgtccataaatgtgaaggataaagattgcaactttttcagtctgtacgtatacctagttttgatggataacttactcttctcaagtgatgcctttagagataagcatgcgatcattaattcttggcgtaattatctgcggaattgttcaacccaaataggatgcacagactggagattatatgcctcaaaggtactaaaacattgcattctttcagttggtttttacccatttctccatcttggttataccggaccattttgtttcatccaggttcggaacaaggcttcttatcttctgcaaggtgcggtcttgagaagatctgctggcggtgctagcttacccgttcagtaatttgaacttactgaactggatcaaatggtgctgttgacagtatctatatttaaactactagcaccaaaaactgcatggcagggcaaactttcaggttcttatatttgctttaggaattgtaggccatcttttgtagacaggggcaaaatgctggcagcttgtttatggtatcatggctgacagcacatttggcccatgtatagcttgttccagtatgtggaacctttcaagattttgagacacttgtagctgattagtgattaccccttaccgtcggttttgggatttgccatccggtatggagtgcacgtgcagcttcatcagatagagtctcctcgactgatcgctggaattggtcagattttgcgtgaagcgtggaattcatcaaatgtttaccactcatatttatgaaatattgtcagcattcaatgaatctgtgttaaacaggtcatactaactaatctttaaacgagtctattacaacgtccttgtttggctgaaccgatcttaattgtcagtttctcccgttcaattaaatggctcgtatctcgatgagtccatgttacgttctgctgctgcagctggtgcttaacatggcacaaaaatacggcgagtcggccgcaatcggtgccgattcgagtttgcttgatcatattcatatctgacatctgatgatgcgtactgtatgctgtttgtcattggatctctcgtgttatcggcgccgaactgtccagattccaaacattgtttttggacttgcctgctggtagccagaaaccggcacatggggattggccggacaaccagaggtatgcgtcgccttgctctcctgctatgctagtatcagccaaaaactcctgaacaatggttaggaatagcaacattttcacttgaatcgttgcgtttcctgatccaaggccccagaattttgctatattggcagtaacatggatataaaattccctttttggtcaagattgccttgctctcctgctatgatatcagccaaaaactcctgaccagtggttagtaacagcaatattttcattatgttgcctgatccaaggcctcagaattttgctatattggcagtaacattgatataaaattatcttttttttgtcgagattatatactactcacgttggctcccttggaacctctgaattctgcaacaatttcgtaggaaatgaaacatccacccttactagttactaggatagttacaagcagtggtgttccaaacaaaatttgtgcgagaattcatgagttccaaatggagcctctcagcattatagattgtaaatcctttcatttgggtattaacaaaaagaatagggcggttgccgccatattattcatagatcaaccaaaggaggatatataaagaaaaacaaaaggtgggaagagcactgaacatctacctagatggagtatcaccctcttggattggaatggaatttgcaggcgaaagtaacaaaactcaactactgaaatggtagtagtatcatcgagttggtgcttctggtttccgcggtaaaaaaaaaaaaaactcgtgtgatcgtgtgtctggtccggtcgacgccatgtatcgatccgattttaacactcttgtcggacgttgcacgccacggcctgcgcccacatccgaagctggtccttcatctccgccgccgacctcgcgtccgcctgctgcagcctcatcgccgccgccgccggtgatcggggcgccggccgccgcacgtggtaccatgcctccgacaggtacggccgccgcacggcggcgacggcgtcgctgccggtggcggttgtggctgtgtttgcgtcgtcgttgtcgctggcggagccggagccggtgggggtgggcttgccgcggaggccagggaggacgtcggcgaggctctcgcggagctcctcctggtcgaacacgaagcccaggtccctgaacccctgcacctcgatcgactccaggtcgctcgagctcttccacttcttgtcgtggaacaggctctggtgccggacgagcggctgctggttcgcgctgaacgaccgcagctctcgccgcggtggctgcctccgatggccgccgtcgccgccgcccgacgttctcggcgtccggtcagcctgcaaggatcaatgggttaaactcgatcaatcatcatccatggcggtcaatggcgtttgggggtgggcggtgcgtaccttggtggtgggcgtgtgcgagcggcagtgtctctccagcgtgctgtgggcgtgcctgagcctggacatgcccggcgtcgtggacccggtggcggccgccgccgtatcctcgcggcgggcgtcgtcgtcgcgccccgtcgcggacgacgtgacgggcatcgacggcgcgcgccgcagcgccgacctgacaccttcctcggcgatcctggtgcggagcacgccctcgtatatcgagctccagttcaggtcgtcgtcctccgcgtcggcttcctgatcgccaccaccgcccgccgccgccggggcctcctcgacgacctcctcgtcctccttggcgatctccatcccgacgcgcggcgacgggagcgacggcgtccggaggagcctccgccccgcggacgcgaacagcctcgacgtccccaccgcctccacacctttccccggccgcccaccaccaccactcaccgtcgacggcgacctgggcagcatcggcggcctacccccgccgccgccgccgccgccatgcctcccgttcttccccagcgtgttgctaaagaaccagtactcatccagcagctccaacgccggcgccgtcccctcgccgccgccgccgccatgccccgtcaagctcatgcccgcctgctgcgtggctgcccggcgactccggattggcctcaaagccggggtgggtggtggggtggcgtggcgtggcgtggcgcggcgcgacgctgagctgatcgagagcgatgcgaggacgccgctttcttgtccgttttcactcgctcgagtggctccggttttgttgcgaggcgaggcgacggggtggggcccgcttgcggcggtgggccagccacatgcatatgccagatgacaatgcatcattcatcgcatcgctcattattgattggatcagtaattgataagcttgatatatgtacaaccactgctatctccctttcatattatacgtgattttgattttttttctagtaaaactcctttaaatttgattaatttgtaaatgatatagcaatattttttatacaaaacaaatatattatcgaaatatattcagcgttatatttaatgaaactaaattgatatagtagatgctactaaattttttttataaatttgatcaaacctaaaggattttgattagaaaaaaatcgaaacaacatactaatataaagtggagggagtggctaacaatagcctaatactaccaataatttcatttcgttttcttccggttagttccatctctcgtgcagtagtaccacagccagatgacgtgacacatatgatagttgctaattgatttgttgaaagttttgaatgctggttacttcggcgagaagaaccgaatccggtatagcaacggggaattcagtgaaacgtacagatgcagggaatatatgtttctcgagatgtgtcatttagggtgccatttgtttacggttcaggctgcgaccaaatacatcgcaatcgagaatcgaccacgctcgccatcacgtacgggttaatcaccacgtcattggttagcatctctagagaagtcgccgtctaccatgatcactcgtgataaacatgtacacacatgtgtcacgaaacctagcgatcgcaacacggtgcgagcgctatcgaataatcgatcgatcccatattcccaccacgtacaacgtcacctattacgaactccctcatcccaaaatataatactccctccgtcctaagatatactttctccgtttcacaatgtaagtcattctagcatttcatatattcatattgatattaatgaatgtagacagtcattaacatcactatgaatgtgagaaatgctaaaatgacttatattgtgaaacggagggagtaacaactttcaaccctcagaaaatataactacttctccatcagcattatttttccaaccaatcacaaccctccactagttacttttcccacctacctccactgatcatccaatcacaactcctaatataagggattttgatatttagtgcaagcaactcctaatataagggattttgatattttgcttgcactgtttgaccactcgtcttattaaaaaaattatgcaaatataaaaaacgaaaagttgtgcttaaagtactttgggtaataaataataaagtaagtcacaaataaaataaataataattttaaaattttttgaataaaacgaatgatcaaacagtgcaagcaaaatgtcaaaatctcttacattagagaacggatggagtacctactttcttaatatcgtgtctaactctaaaacttataatattctgggacggatggagtaataatttaaaatcagatgagacatatctggactcctgtgcagatacattgtacagaaaatatatctcgtttgattctatattattatgttttgggacgaaggtagtattacgtacgttggaagttgagaaaaaaaagatgggataaaagaaacacggccgtatcaagtcgatcatttgctagctatacaagctagctcatctcgcatcacccaagcagttgattaatccggtcgcaatcatgcttagcgtcggttgggtgtgctgattaggctcgcctggtttggttggctggctagccagccgatgctgtgttggtcaatttaattttattggcttcttttttttttcttttagtagctgatcaattggacgacgagatgtgtgtgtacatgagctgcaaaatgaaaaacttgagctgagctgagctcgtggaagttatgacttagcgcgagaaacggcatgtgggggagagctggctctccatgtgcggtgggccccatgggaaaactcggggcgtttccagtgatcgatcgattgattgattggtttgtgctgccgttgccgaagccgtttggatggatcggtggccgtcaaaagggggggccatatgcccacgggttggtgggatctgacggcggggatatccgcgggcgaaagctggtactgagatccagtcgtccagagatttgtggacagggtagatgacacaacaagctagtcgtaggtcatccacgcacgtaggtacagtagtaggggtagtagggttcatgctccacattgggtgatttggttaattacctttttagggcactaaaactttgcacccatactccaacaaaggagtttaggcctctttagattagaggattttcatggaaatttcggagaatagtactactaaggattactccctccttcccaaattaattatcatgtaatgaaatttaaaatttctcaaattgatcatcatataactatatggacacggatttcatcggaatacaatcaatgcagaatgggagaatatgtgtgcatgctaggggtataattgacacggtgttctaatcgatacatgtattatgggagaacgtgtacatggtgtcttgattgatgtgatttaaattatcattggtcttggtacataaacatatatgatgatcaatttgagatggagggagtataattctatatggttatttgggtttaaggaaaaggcttaaggaaaataagagagctcatgtttttgtttcctttgctaagtccaatgcagctctccctttctctctctacttcctctctcttctacaagtgattcctataaaattcatgtgatctatttcctgtgaaccatccaaaggcactagctcaaatattatgtgttttaagatccatcaatattcaaaagagcatgacaattcattactacgtttttcttattatatttttttagtatcttgcatttcaaaggaggccttaaagaggtatgataagaaaattatcgaagaattcattgtcactcgataaagagaaaacaattgatcaaaattttgactagaatgtgcgcaaaggttctactccaacatcaccagatgaggcgtgaaattcgagttgaaagcatgaagtcgccaagtgataaaaaagtttatgttccaaatctatcaaccgtagctatatttgattgaagttatacataattgtttcaagattttgaattggtgaaggaggttgtaggttctattgtacaatgaatattcttgatacgataaggattagaaacgggaggtccatactataaaaggaggtaggataatatagtgaaatggtaatggtgccagatagccgggggtagcaagaacaactgcaggtagccaatatttgtgcacggctagttcttatgggtgggtggagaaggtagagccaaaagcatagcaagcatagacagtcctagagtgtttgatgccacaagtataaacaagacagagtggatataccgatgggtatttatctagctgaaaaggactcgaagatgcgagaggtgtaaaggtttcaattgggtctatgggctatggaatcttataaaaaattgggtgtatagtaagtttccatctttatattaattgtatcggtctagtttatacttcatataactataaattttcttgttaacgtattctattgtagatatattggacaaaaacaaagctttaggtataacgcgtgaactgttcgcaaaacaacatcattaaatcatgctcaaaccgaactatgacaattcgaaccatagaataaaacatacatgtatctgaaataatataaaactaagaccaatatactaatgcgaaagagaggtaaagtgggggagaaaacatggatattatgttggttttaatatcaactcttagcccaagataaaaagaaatgttgctgcctgaggctggccggtgaactaattaacgagatgaagagcttttaataatctacagtctcacctgttgactgttgtaagggataatctatcgatgacgtgtactgctttagctgtaataacaagctcaattattatacttgtcctaaatacatactcccccgcttcataatataagtcattcgaatatttcccacatttatatggatgttagtgaataataactaaatatctcgtaaaaaatataatatgtagacgtttagctccgatgagcaaaagatcgaagacagtagccactggcgagtatggccctgcaccttggaccttggaacaaaagagttgcacgcgtacttgttgttccggatcatcctgggccgacgcgccaccaagcgctcagttttggagtggaatcaacggaaactaatcaatcctaaggttggcgccacacccacatgcatcggtcgcgctcctgccagtccggacccgtgtcccagccgcgtcggcccgggcgcgcggcacacacgtacgcgggcttcgtacgaggcatccagccctctagctcaatcggcgcagtcctccacccaaagtcctaaggaaacccatcggtcgccgtctcgccgagagcccaccaagacgtacggtctcggtgcggtctcagaaggcaggcacacggtgctatcgttgagtcgttgccacacgcgcgcttgcgctcggtccccgtgcggcgcgcgccagtagctgtgtagcacgcgatcgcaggcggggctccctccgcgcgggtgatgtgctcgcgtttgcatggccttgctggcttgctgcgcccagtatacgtgcactaatcggtcggccgagctggtttcttgggttctttacaaatgttggggagcgctatagctttccacgaaatctttagctccccaaataatttggattgtcacatatattctgggaatacagttgtagaattcaaaaagaatgaactagaaatcagaaactgaaaatcttaacttctccaaattctacgagctgacattttaccgtgatcgaccgatcaatagtttacacaacagtgcgtgtttgtctcgttgaaaaggacaaggaaggatggatgttcccttcttctgaaacacaatatatatgaacataaatatgtacactttaccgttacaagcacatttaaagactgtaccgacgtaaatagattaataaaatcatcgtatatgtcgatatgttaacggatatatcgcctacaaagaaaataattaactgtaaatatgaacacatatgtcatacctagaatttgatcttgaataatcagattccaccacaatgaatctaactagttaaattacgctattaggatccccgtacctatattgttttcatctaatttatgtcctctatatgtgtaaccgaactatatttatattttggtatagttgttttattgcatagatatttgttaacatgtgttggacaacataaattaactttaccaactgatattcttacttttatgaaaaaaatatatgtggcgttatttgtaaaaccgatcgaggtactagtactgattaaggtaccccagttcccctccaggcctggaaaaaaagggttgtgctaaaaaaaaactgttgacagttttttgttgggaaaactttcgattttctagccattagatgcgctctaggattcgtgcaacatataaagccagaataaaaaaaaatcgcatgggcaaggcagtcatcgaacatgttaagctaagccatgcaacttcttattagcaataactcttttttattttatatcacttacaccctagttatatatcacttacatcttaattatagagtagttacataacacttataccctaattacagagtaattacatgatagttatagggtagttacattgtataaaattatgatttgcaatttttttaggagcacatattacttttgaatttgaaaattttttcccttctacatgtaagccaatttcttgttgttcaatcagcttggacactaaaatttatggtttgtactagtgtggattgtccccctataaccattgatgacaaatcctgtagtcaaaaaagttttggacctcaaaaattgtcgacaactccctggctagtcccggaaaaaaaaaatccttcagcagttcagttcagctctaaatcatttactattcagaacgaacaacagcagcaaaatttgaacccgtagtcccgtacgtagcataaaaccgtaagtaacgtgcgtatgtttagcgtgcgctaagcgaaagaccaaagtacagtatagccctgtagccgaaactatagtcctgcgcctcggtacacgatacgatgcccacagagaattccgtatcaatctggggctggcacgcaacacgcgtccaattttcacccacgcgaggagtggtggtgtgggcgcgcgcgggcgcgcggtgcatcgatcggtcgcgcgctcctgcatgccggccgacccgtttcgcggcctccccgcgcgcgacgttaactcggcacaccgcgcacacgcacacgcacacgcagacgtatgggtttctaacaagttacgacgatcgtagtcgtactcgtacacccaacacccagtctcggcgcaccgacgcgatcgagctaccgcgcgcgcgcgcgcgcggagaggagcggagagggggcgcagagtgctcgctcgctctcgctgccgcgcagacgcgtttgctcccgtgcggcgcgagcccgtagcagcacgcaatgcgcggctcgaatgcacgacccgtgctcgcgcgccgttgctgctgctgctggccttgccgcgccaagtacgtgtgcactgctcgattacggacggtttcctggattttttttcgttttatacggtacggagatggatagcaaaaagactccacacatgcacacgtcggctgctgtctgctgatagtctgacacatctactgaatcagcagtcagtcactacgaccatctccaattacacacagctgagtacgggcgcagcgcaaacttgtacttgttggaataatcacaagctgtttctatctggatcaaatctgatgatcaaatccaatccaggcggtcctcgaatttcctcccttgtttgcaccgtcgacgcgttcccgctggtttccgtttgttgatcaagatgcaccaagtattattcagtacagcgacagtccaagattaaaacaatgcacagaccttgttttcctcacccgaccgtctgcaagtttgcttccaagaccagccaattatccgtgcaagtacacgcttatgagaaaatggacattttaccatcttcaaaactaggtttcgctattatgccatcttcaaaacgtgattcgataaaatgccaatctcaagcctacgctactcgttggattgtcattttctcattttcttttatttccggaatcttttgcctcttcctcatggtgatcggacgaaaatgcccctggggccattggtggaggtcaagttggagggaattttcgtcaagttagatggaaggccaccggggctgctcccggaggcgcagttcgcggcgttcgtgcgacggcactggcgggagtactctggaccagaggagtacgcgtggcggctgcgcgtgttcgccgccaacctcacccgcaccgcggcacaccaagtgctcgacccgactgcgcgccacagcatcaccccttctccgacctcatccgggaagagttcgaggcgcggttcacgggcctcgctgccaacggcgacgacgaggcggccgatgccggccacggaggaggtggccgtcctccctgctagcttcgatttggcgcgacaggggcgccgtgaccgacgtcaagatgcagggcacatgcgcctcctgctgggcctttagcaccaccggcgccgtcgagggcgacaacttcctcgccagcggcaacctccgcaacctcctcaacctcagcgagcagcagctcgtcaactgcgaccacacggtacatcacattcacatcacactcacgccactcctaatctcatctttgaactaatcgagctattgcttgccgtcctcatctttgaactaatcgagctattgcaatgcagagaagaagacggagtgcggctgcggcggcgggctgatgacaaacgcctacgcctacctaatgagctcgggaaggttgatggagcattttccaatggccataggggcatttttgtctgatcaccacgagaaagaggcaaaaagtttttgaaaataagaaaaaaatgagaaaatggcaatccagcgagtagcgtaggcttgaggttggcattttatcgaatcacgttttgaagatggcattgtagcgaaacctggttttgaagatggccaaatgtctattttctcagcttattatatatagatgatgtgtttgttcccggcaacgagacctgcaaggaggagaaaaaagaaggcgccgtagtcaaattattccatagaaacagaaacgatatactctccctctgttcagttttgacagagtttgctcatgctatttttttcatgcctaaatgtagcttacagtgctgtccatttcgctcttcattttttttaacccttttaattggtaagcagtcaagcatcagtaataatgaagcatatatacacaatgaagggagtagaatggtgaatgattaattgtttaacactcaccaacttatcatcttcgtcccatatttttattacttctaaaaaacaaaaaaaaaacagaatgttaaatacagtatctcttttcaccgccaaaataaaaaaagtcagaatattcttatcttttttttttcaaaagagcagaatctttttatcatccggctactcctgaggcatggacaatatgacagtttgcccaatattagttggatacttaaatgtcagatgccgcccctacaaataccacaataggatccttaatcccgtggcatcagtttgctcaaacgagtggtttaaccacaaaaggtgaacatatttagcatggaagaaaatcatgttgagagttgagacccatccgctctatctgcccacactggctagtctgaacttaaaaccatactaccaaatgaaaagatagagactggaactcataacatctttataccatggatttcaatgacatcgtcaagaagcctggattctaaggcttttcctcaacatatgatccttacctaatttaagagccagagaacatatgatccttacctaatctaagagccagagaagcctagctttctgaatgttgatcaagaactagaactctgcatattctgaattgctctgacttgttttcatactcgttgtctgtccattgtccactagctagtccctgatattggggactgtagagatacaagtcatttagtcaataagagagaactaaaacttcttgaacatatctgaatgaaatggatgtattcctaattcaggactgtgctattgaggtgatctgaagttctgaacaactagccatccgttccccaaagctgcttgaataagagaaagctctacttgtttaaggccaagatcttcaaaatttaaaatcctgggagaaaagagtagaaatctacgggtggatatagatttcttcaacagaaagatcaaaagctgcaattcatagtgacaccaattgaagtatctgaactgtgcctcctcaagcttatccaggccaacctttggatgcgtttcctacagcgagccagggaaatcctcttcaaaacgtatatcactgtcatggattgttcggtcctgcaattacgaacaaataagaagaaaatcacaaaaaatgcagatacggattcagatgtaacaagatggcaaaccgatcgctgaaaaattaaaatgcaattcagagtgggtttgctggtatcaaccgtcacaaggaacttcttcagattagggcgatgacaactcttgaggaacacaaagatgttgccgaggccaacggccttgaattcaagcatggttaattctagcattgtcagactctggaagttatcgaggatggccatatcaagattcgctccaggatgccgcaagaaagacacgacctaaacaatagtgttaaatgatcaaaatccatgaatcgatcgagctaaatgaaatgttggaaatccaatatatacctgaagggtattgctacagatggagagggaggtgatgttggagagaaaaggtagattgttcctgaaccattctctcaacacttgatgaccaagtatcgggggattgaagcagaagaggaggtcggtaagcaagcgggcgccgccggagaggttgaacggcgaaagggggctccccatgcaatggaagttgtggaggggagaatccggcatgacgaccacgccgcggacgttgttgcactccacgataatgaggctactcagcttccgtgatgatgcaatgatcatggcgagggggccattgcagtagaacaacgtgaggacgcggagactgggggagaggatgaccatgcggcgcaaggcctcgtcggtgattctgacgtcgttgaggtggatcttcgcaaggcaggacatgggatggacaacggcgaacatggggacgttgaggttgagccagcacagcgtgaggctggtgaggtagatacaaggcgaatcaaagaccattcaacaacagaccatgcgaatgaaaagcaattacatgaaacaacgcatatgattctctattctcctatcctgtaacatatgatccttacctaatcaaatagagtagctatagaagttaagctctgaatctgattaagaactcagactcagcatattctggatcactctgtttattgtccactagctagtccataatgctaaagactagaactctaaattttccattaggtagtccaccggaactcaaactcaactactctgaattgctctatttattgtccactagttgatctttaactaacgactaaaacatcttgtagatctttgaatgaattgaacggtacgcagaataatgatctttcaagataccgataacagtgacacgtagttggccactagttaaatcttcttggatacgagaaatgttttcttgctgaagatcaagcaccgacgacggcatcctgacggaatccttctaggagaaacaagcaacagtctatggttgcggctagccttcttcaacagaaagatcatgaacttcagctcgtgccgacaccaattgaagttcacaatctttaccacctcaagattagctaggccatcctctagcgggttttgcctctgctcgccacacctcaagattagccaagccatcctctagcgggttttgcctctgctcatcaattggatcatattcaaagagaccatgatcactggttgttgggagctgcaatgcaagcatgaaccatgatttgttcagaagtctagaacgatcaaggtgaaatcaagatgcagatacaaataatggaatcagacgcaacaaaacaggaaaacacattactacaaaatacaattcagaatggattggcacctacacaaagagctccgtcagattggggcgggtatgtcctgaggaactcatatatgttatcaaggtcgacggccttcaattcaaacatgagaaactgtagcactctcaggctctggaagttggcaaccttagcaccacgcaaggaagacaaaatctaaagagagaacaacgttaacgaaaaatccatcatcgatgagcaaacgaaatagcaacaaattaagcgaaatgaaatggtggaacggggcgaagagatcgatccagcatgcatactgacggagcgtggggctcctcaccgggagaccgcgcgggcccccctttgccggttcggccgggggcgctaagtgagcttctaaacccttgatctgtggaatggttcgcgagagagcaaacgcacaagacacgggcgatgtagacaggttcgggccgctgagaagcgtaataccctactcctgtgttctggcggatctgtctctgaaggagttacaaagagctggaaagcaagagccttctaactctagagacgctctccctactctttttccccgtcctttctacgagcttccctttctccttctttctttttttcccctttttcttggtaggcatggtcctccttttatatctcaaggggataccacatataccatttctacctacccttcttttgggtggggacccatcctactttgagcaagatttggctc

SEQ ID NO: 8484 - DNA, 24733 bp, Oryza sativa
attcctgcagcccaagaagtacaacgggcaggttgtgaagcaatcggtcaaggcgggtggcaggagttctagaaagtaaaaaaaataaacctaatgataatcatatttgatttctaaaatctcaataataataaaaatgagaggcaacgggcgggtcgtataggagtacaatggcaaagtcgacgatggttggtgggtcttctagaaagtaaaaaaatgaactccaacgatagttatgttcaacttttacaatcctaatgacaataaagagtatgcggcggatgggtcgtagaggagtacagtggtagcgtttgacgggatttctaaaaattataaaaaaaatgaaacccaacaagacaataaactccaatttttaaaggttcgggcttctaaaaagtaaaaaaataaaccccaatgataatccgtttgattttgaaatcataatgacaataaagaagggcggcagcgggtgagccgtagaggagtacagtgacaaagtcgctgacgttttggcggaacttctagaaagtaaaaaaaataaacctaaataataattatgttcgatttttaaaatagcgatggcaataaaagagaagatgcagtggacggtcatggatgaatataatggcagtgtttgtcaggacttctagaaattataaaaaagatacccaacagaacaataaactctaaaacctataagtttttagatccaatttttaaagattccaagaagaatgaatagaaaacagtggtagatcgagcaagcaaataaagaataatgtgacagaagtaaggggtaggaactgttgtgacttttaaaaactaaaaaaaattaaaaacacgaggataataaggtttagtctttaaaaatcttaagacaacgagataactatttaacaaatttgaagtaaaatcatattaaaaatatataattttatataggtgctagccgtgcaattgcgcgggtcacccagctagttgaacatatgattagcgtgctgttatatattctgtcaggttttgaacaatttcaggtttctagtcagtaaaccaagagaaaattcaaccagttctggtaaagcccggcccatattggcccactagaaccgtggccactttcctcggcccatcgtgccatccgtctctctcaccgtctccgtgctcctccgccgcccaagggtgtctccggcgactcgcccggcgccgcacgcgaagcccggagatccggctgcggcggaggcgagaaggaagagggagatgagggccgtggtgcagcgtgtcctctcggcaagcgtcgaggtgagcgggttcccctctcccactcgctagctaggaggaggaggcgagcggctgattcctgattggttggttcccgtgggttttttggttgcaggtggaggggcgggtggtgtcggcgattggccccggcctcctcgtccttgtcggcgtccacgaggccgacaccgacgccgacgctgactacatgtgtgtgcccagcttacctgctcttactatttcgttctcgcatctcactgaatctggaatctgttattttttacgtgtttattagctacttagcttctttagtggagggagatatcatgaattcgtaatgtagaatgggagaagaaatgatggttgttgataaatcaatgatactagtacttgttgccatgtttgatctggaaacgtgtatactgtatagtttggaaagagcttcttagttctagttcaattacaaaagttccatctttgcgtttcctgcaattttgtttatgctcagatcttcagtaaatgtatgatgtatccttgtgttatattgtcactctcatactaacatgaccttacgcagttgtcggaaggttctgaacatgaggctatttcctaatgagaagactgaaaaggcatgggatcaaagtgtaagtcctgactcatcttggtatcaatatgacaaaaacaacctattcaagcatgtcacatatatctcctgtacttcatttgaggtttgaagatgaacctaaataactttttccttcttgcaggttttgcagcggaaatttgaagttctattaggtaggagtaatataatacagcatttctagtcccagatttgaaaattcttaagctgtagtagctttgttgttattgacaccgttactaagctgatatactattcagtcagtcaatttaccttatatggaatcctgaagggtaacaagccagattttcatgtggctatgccacctgctaaagcaaagccattctatgcttctttagtcgagaagttccagaaatcatactcagctgatgcagtgaaaggtaatatataatgcatatctatcatttctttttgcactatgtaactagcagtcctgagttcctggttatctaattgttgttcttattacaatttgttcttttgtaatccacacaaatatggctatgttggtgtgttgcggatttaagtgatttttttccatgtttctcatggttcctacactcaagattattttataaagcacattctaagatgtattgctggtattgtacttcaccatagtaacttctgctatcaatatattataattgttcaactcttttattatttttcctttcactttccctgatatattaccatgaacatttatattaagtatttgctcagagaacaaaatttatttattgtaagccattgtcagatgagctatttctaacatgtctatacttttaactcgtcttggcagatggcatttttggagcaatgatgaaggtacctctgaataaacatatgctgtaattgcctttttgtgctctattaccctttaagatgtaaattcaatacttttgcaggtttctttagtgaacgatggccctgtaacaatgcaagttgactcatcctcattgcaaaatcctgctcagtcaaggtgagctttcctaaatttgcgtgctcatgctcataaggacatggctgattttattcatttttgtgaatctttattagcaatggtgatgttggctcagttggggacaatgaagcacaagtacctaaagagacttcttaatctctgtaactggtcttctacccttcctgcacatgatttgaacatggttatcgctgtcccacatcaagccatgcagaattttgagtttgtttttgaggtttgagcaggaagaagccctccagtgagctcgtgccatgggtgctacaagtcgtgttttcatttctccacttaaatattgattactggggaaatatattagtattcatttcgtcttcaaagacatgaattttattactgatctgtcattcatacacaaatatcaaattgattcagttggccttagtgttttgtcattgtcgtttaactccagcagtttacttccttcatcccataaaaaaccaacctagtactggatgtgacatatcctagtgctacaaatttaaacatatctctgtctagattcgttgtatcagaatatgtcacatctaatctcatatttgtttgttttttgggacggagggagtactcaagttcagcactaacagcttaaaggagtaaccgaaatgattatattcatttcttctgtgagatgatagcattatttgtctgagaaccatacatcaaagggatatgttcatgcatattattgcttgagcttttagctggttcctagaccttaattagtacttttgcagcatattattgctagagcttttctggcaacgctgctactagcatgaaactcatctctgaagctgatgaacgtacaagaactcaagaaggtgtattatattctaatttgacccactcctggccatttgctgccagcatcacctgcagttgcaaaacacaacgcagacgaagccaatacatccacccgtacaaaccctgaaccgtcaacaaaagaaagagagaagctctttcagcttacctcgcggcgtcgctgatcttgtccctgtagtcaccctgacctctcacagctgcgccggacctcggcacggcggcggcgttcgccgccggcgggcagacagacacggcgcggtatcggtcgtcctgcgcgtgcgcgacgaagccggtcacggtctgcgtcgccggagcttgcacgtgatgaggcggcggccgcacggacgacatggctccattgccgttggcaccgcggacgccggcggcggcggcgacgaagccgcccggcacgacggtggcgttgtgcggcacaacattgccaggcctggcggcggtggcgccgttgtacgccgagaccagcagcagctggtgctgcagcgtcgtcggcgacgaggcgtgcctgacgccggcggcgccggcgcagcacgcgcactggtcggcctggcggcggagcgcggcgttctcggcgcgcagggcggcgttgtcgcggcggaggcaggagacctcgcggtagcacccctcggaggggtcgcgctcccgccaccgcgcctcccaggtgagcgtctcggcggcgcggcggcgcgccgcctcggtggcgttggccttgatgagcttggtgaggttggccaccccgaagacgaggtgcagcgcgcggaagtcgttcatcctgttcgccgggaagtaggcggccagctcgcagttgggctcgcacttgcgccgctggtgcttgcacaccgcgcacgcccggcgccgccgctgccgccgccggtcatgtcgacggccggcgacaagccgacgtacgtacaacgatctctacaaactcagctgcaagatcgaagcattagcatatatatgcatgcgatggcaggatgcgagtcagcaaggagagagagagattgcgtgtacatgcatgtacacgtatatatacactcacaagatggtaaggttgaaagtagggtttacggttttgtaggttgctcacaggaagatttcaccgcagaaataggggcatggaaacttcttatctgacatctgtgtagctgcatgcagcgacactcccaatatatgcaagatgtatagtagctcatgtaccatgtgaggagtttggggacaaatgagtaaatgtataagtggaatgtagtagaaaaatgtactagtatctagtatcaaccgagtaatgtaggacagaaaaatgtatatgcagtagaaaaatgtgctatatcaacttcaagtgatattgtaagaagtggtatgtatgttgtctccgaataaaaaatttcattccagaatgcagcggcacaaaggacatgtgtgcttacattcagttatatttactgagtgtctttttttcagatagtggaaaggtcatttccaactgtgcagcagaacataacgattggttatttttgaaccatggttcctggcacagattagtttagcaacagatagaatctgttgaaatcatttacttctgatatgcaatcaatctcaacaaatatcactagacagagtaaaaggaggcattcagttcagccgtagctatgtgcgtgatgtgttagcaaagtacaatatcacattcacttttactctttcgaacttgttctatagttacttacccagaagtaatctacatgatacagtgcctttttctatccttggcctctattattttagggtgtctatggatcatccggcatatattttgatccatacaccaaaagaatgggcatggcaatgaactgccacacaagaatcacaaaacagatcagtgaaattttgaggtgttttgcgcatcaacttaacaaaatatcatcctgtttcgcctgacccaagttaatttgattgatcaagcaggtgttgctgccttgctgctttctgctccatgaacacctttgaagttcaagattcctgaaaggcctcgtcctttagcgaggtgctcaatttcagcaagcctcagtttaagatcctccaaatctttagataaactctcttcccgttgtttcaattccttgagatcaataaaaacaaccgttaagctatattttggcattatcaataaggaacctggaaatgaaaacaaacatctctctgaacctacgcatattgctaacttttactatgaagataacttaaatgatatattgtcaagtagaccggtgattaacttcttataacatttcacatcaagaatgacatactttacatattctaataatattctggcaggaactaagattttaaattaatagttaataagagattttttggtcaacagtgagtagtaaataggtatcctcattccacatgcaaagtttcaccaggtaaatggtgatttcacacttcaaaatgtttctaaagggtggcattcaaggtgtggttgaagaacacctagcagttcactaaaaacatttctgcatgtgcattccataaatttagacataaatccatattatttgggacatgttcaactctgcttactgcagcagccgctgtggctgcgacagctgaaaacgactgcaagacagcaggaggcatagtactaaagcatgtcttatcaactgatacgtcaggcatcgatcatgaccagttcctggtgattaaactaaatcaggttgccacctgctaattgttttcttatacaagattcagtgtagttatttgggttgttcattcctgattttggatgaactgtgcaaaactgggcatagtaatttttctgatgtgtcctctgggagctaagctaaatatgacactaagcacgttgatttccacttttcagtcttaaacagattgagtaaacccagaatgaacaggcctagtcgttatgatactagatatgtctatctccgtatttacatgacaaattttcagaacccaaactgcaatcatgagttataacatcttcctatggacatcaaatttaaattactctggctacagcataagggcttatagattagagttttgtatgttcattcttacgtgcaagattaaatagtgaatacgggatatatggctgttaagtgttgtagcatatttatgttcgttcaaactccaggagaaaaatatagaaatgagtcaatgctagaccgaaccacgttagaaagtaccacctcaagttcctgtttacgagcttcctccttcctagcctctgaccttgcatttctttgcacctcaaaaattaaagcagcaacagcaacctaaaaccaaaaagatgcaggtttcatttcctgatatttcaattattttctttattttttcacataacagagcaaggttacttcagcccagcaaatatattcctgtggctactataaatctattggcatacaaggttcattgtaggttaagtgaagtaccgaaaaaataaagccttctccaatgagatccgtagcagcttgtacagctttctcctcatttaaaggtgtgatttccacatctgttgcatgcccataaatgcgcctttgtatccttgtagtaacacgatggttaatctgtaacaattgttatagttacaatcggttagttatatgtcagacctcataagggcacaaaggatacggccacagcccacaacacgtaaatacatttgagagggctctatcttagaaaaagccagatgtacaaatttccaaaagcataaatcctaaggacaaggataaatctcctcaaggttcatgctccctgtattcctcaatccttatttctctaattaaaagaatatatgatgtgtattctaagtcagatatgtgaaatatgaagctccatatatggcagacagctcacatcatagacagaaacctatcatagatcagtgtccagccatttctgacaagccagaatcgaacaacctcaaatgggatgaaacgcttattgatgaatctatcagctgatgatcaagaccaactgacctacaattaaactacaaaatgcttgcacaacaccaaacagctaaagttgcttcttggaaattgctccacccattcgccagatggtactgtgctgaagtatcatcaagattcaagacagccacatttcctcctactactctttaattctttatctttacattctgtcaactctgcaaaatcccctttcacgggcacacatttcctctttcctttttcccccgaggggcacacatttcattaagtatgtaagtttttcgttaccaagaaatggatattgggagtaaatagccctaaccagatccccttcccacgagcctaacggatgctgctccgatcattttcccttatcaaaatttccttcccttaggcgctactttctccgaagaacacaacacgatgagggggagtaggaggaggaggaggaggccccgacctgcgcgatgcagatgatgaagttgcggaacttggggtggacggcggcctggttcttgaggcggctggcgatgggcttggacagcgtccgcagcgccagcgtccccagcttcgccaccggcagcgacattggcggcggcgattccctggcctcctcctccggcggcggaggattggtggaatcgtgaggggattcgattcgattcgattcgattcgatggggggagcagtacaagggtgggacgctgattggttgtgttcctgtgaaacggaacgggagtaagggagggaatgtggacttccttttgtgatgaatggcttttcgagttttgttgacttttgactaattcatcttcccctttttaaaattcaacttcttcaaaccgtattttcttgtcaagcaagtatacataaattaaaattttcgaatcagaaggggataaatgggtaattaagtggttacgaatattcatattcttgaggcatcaacaatccggtgtattcgagccatctattctattattaatttctcttgttttgaacgaagtgagcatagtttagttgtggtggaacaatttatacgaatttaaattttagatttgacacggatgatcgtatttatgactaatttttctttcagtggtagacaatgtacccctcgacttgtggagtcgtggtgacttcgtcaatcttaagataagatatgttggctcactttatggctgattattcttacagtgacacacttgttataactttgtcaatctcaagatatgccggcccagtctttcgaatgtgctcatatagatagatgtgcatgtatgcatttatagaggtgattgtgcatatgttgtgagcgtctgcgtttgtactatgtttctaaaaaaatattctaattgtttgaactaagttaaagaaatgaaagaactatcatttaccaagaaaataaaacaataacgggaaattattgaccttgtttcgtggttccaatgattttattgatttacttagttacttttgccggtttaagacatgaagggattttttcccacttttatgggataaatcgtttctgaaatgccatactaatagttattacctccgtcccaaactatactatatagataaaatctcttatatttgtgaacaagatagtatattttttaaaataaaataaaataaaataaatatgtgatatatcactcaaagtattccataacatttagggtctatttagatggttgatattttcagctctaccaaagtcggtaatgtaacaaattaactaaatatgtttcttccaatactacctaccaagatttagtaattctgaaaaatactatcaaattttggtaaagcttaactctactaaaatttgatacaccaaaatacgttaaaatttaacagtactaaatattggtatggttgatgtaggtaataattatttcgtcacttcctagatgggcatcagcccgttggtcatttggactaacgaaaatgcatgaacttaattatccttcaagaaattaagcacagaaaagtcagaacacagtataatctataatctagagtcatcgaaaaagaataactatatttgttcgggtagttttgttcttcttgtgtgataaggtgtttcaattggctttaggcatgcaccgttagctttcggcattaataacttgacaaaactaggcaataatgcatggatttctcgtaacatttaaccctatctcacctaggtaaaaaaaaaaggacatttttaccacatataccttctgttaacagcttctcaaattaaccatgctcaactacacatgctatgccctagccaattccatacattagctttttggctctttaacaaaagtgatagctagcaagtcagtgctagcttatgaacagttcaaagttgatactgactaactgtaagaagttccctcacgtatagccattttcttttgcaagtgtaaacagttacctctccgatcaagggtagatttagaaaatttgtgatactggtaagtgtcataatacactgctcatatatatttaattcatagtatcatcttctatatataaacatttgaaccatagctttcaccgaaaattgttgcggtcatctaacctacgcatatagtatccattatccaatatgtaagtatgtaactctaccaccacacttcatatttacacccttttgctattttttgacccaatacaatgtgcagtcatgtactaaggatcacttaatttttttgaaaattagatcaagcaaagctctttcatgctttccatgaacactagcccctgaagtctttaacaaaataattagtgaaaacatcttcatagaagatcctgtatcagcacaccttccattacaactaaaatgcactaagcatacagacaaataggcaattaagttaagcagcaagcactagcctatgtgtgtggatgtgcatcactaatcaaatgcaaatttctggaagggcgccaaaaccagtggcatcctcaactggataaccacctccccttgttggtaggttattgggcaccccattgctatgttgcaagctcccctttagcttaattcaaccttagaccatttgacatttggctaagcacagcaagacagctacttaaaaattgtttattattaggggcaaagatcatcctttatatatatggcactaaggctagaaataaaaatgcacatatgttaaaaacaggatcaagctagctgcattgaaaaggtaatttggtttgtgcaataatagagttgtaaagtgacatccccaattgcctttttttcttaagaacaaagtagtactagtagtaaacaaaggggagagatactctttgattaatggttcttgagaatatgcatagatctcttgccacctttttgcttgccagttaccattgcttctcttcttgctcaatgtcttcttccatgaacccatatagagcatttgcacaaaaaaaaaaaaacaactccgttgaatagttagtgcagccctatcaccatggctcaagttccatcaacttcaagtagcacgatcaagagcatggtttgtgaaaacaagaaatgaaattttagtaaattaaattgggtgctcttcttgagcccttttgtgagcttgcatgcatgcttcactccactgtagcttacttgcttacatagcttcaaaattagcactaactaatctcttcatggctacagaattagcatgcaaattaaggtttaaatccacccatgtatcgacgacgagcacagtgcttgcacgccaacgcccaagaaatccctagtttcctctctcccgacgccgccggcgtccttcaggccggcatggtggcgcaccgccgacaagacgtcgtaaggcacgttgccggcggcccccgtgagctcgctcattgcgccgccgaggttggcattgtgatggctcgcggcggcgaatagggctgcaccgtcgaacttgccgcactcgtcggccggtgaggcggtggcgccgccgggcttggtcggctcgaacggggacactaggggcatcgcggcggtggatgtcacggcgccgatctgcgcggccttctgcagcagagccgtcgcggacatgtcggtgggcgccgcgggcttcgcgtgctgctggttgctgaacacggacggcacgctctccgcctccttcgccgccgccgtggcgctcgtcagctcgctggcattcgacgacgagagcttgccgttcccgtacagccagctcagctgcgccgcgtcgaactgcggcggcggcgcgccggagctcggcgcgaagagatccacgtacagctgcggcggcactgtcgccgcgccaccgctggccaggacgccaatgtggcccatggacggcaacgcctcgccaccccacagcgacagcccgccgtgccgcgccacgccgccgtcgcacaggtccccaccgacgccccccgccgccggaccgagcatctgacccgccctgagctgccctccagccgccgccgccgccggcggcatcatcatgtttggccgcatgcccgccatccccggcccacccgacccggcgaacaggtagctctgcccgcacagcgacgtggccgtggccgccgccgccgccgcggcggccccggacgccgcgttcagcctcgccgtctcctccgccagcgcgtcgcagaacgcgcggtgcgtgatgaagctgtccctcctgcatccaatatccaaccatgcatggatcgcgttaagctatcgccaccatcgtcgacgatcatatcaaagcctggagctaacaagccatataaaactaataaactatagtcccctcttctaatgaatgtatgctaaaattttagtgggggcttttatagttgtaacgccggtagtaggggctcgagatcctcccgtggccgtggccgtggccatggcggggcggcgggtgtacctggagaagagggtgccgcagtcgcagcgatactcgcgggtgccgcaggtcttggagtgggccttccagtcggactggacggcatagcgcttggagcacttgtcgcacttccacttcttctcgccgtgcttgcggcagaagtgcttcttgatcccggtgaggtcgccgagcgcgcgcgacgggttgtggtggacgcagctcttctccgggcacacgtacacccgcttcctcggctccttcccgctccgctgccgcagcttccacggcaggttgtgccctcgccggtgcagctgcaggttctggtctcgctggaaccccttcccgcatatctcgcacacgaacctgttcgtcgccatcagcgtcctcggcgacagcgcgatcacctccgcctccggatctgcacccaccgacatcgccgttgatcagtcgagtcaaacacagcaaaatggggaagattttgaggttaattgtgttgtgcacttgcctggtgtgccggggagattgcgcttcttcttggcgggaggaggaggaggaggagggtgttcttgctgatggttggtgagaggagcgaaagggttggagatggctgcggcttcactagtcgccattgttatcaaattgctaagcttgtcgttggcttgttgctaattaatcgatcgatctctcttgggatcaaactatgctagttgctgatcgatctcctcttctgcttgactagttccctttggagacaaaagggcaacttttgttcttaggtatgggtcattacccccaagcataaataagctttgctagctagtggcaacaacaaaaccatcaaggcaggataaatatagagctttgctagtgagagtgagatcgatggagagagattgtttgtgtgtgtatgtgtgagaataaaatatttgaagtggtaaaaaggtgaaagttgaaaggtgtgtctttaggtgtttgtgcaagcatagcaagggttagctagtgtagctagtgtgtgtgggtgtgcaatgcatcatgacacatatgatgaggagaaagatagggaaagggggaaggagggggtggtaaaaagctgtggcttggtgcctttgcatttggcatgattagcccataatgtgatgcttcctgcatctgcatatccccccttctcatcaaatctcagccttcctccctctcccactgcaaaggtaagctactgcagctgctgcctctggagcctgcactgcaacagtgcaatgcatgggctgctactttctttggcctggacccacatgcaggcacacaccttcttaagtttttgaaaactagcttgttagttgttaaatagtactccctccgtttttaaatatttgacgccgttgacttttttaaatatgtttgaccgttcgtcttattcaaaaaatttaagtaattattaattatttttctatcatttgattcattgttaactatacttatatgtatacatatagttttacatatttcataaaagtttttgaataagacgaacagtcaaacatgtgctaaaaagtcaacggtgtcaaatatttagaaacggagggagtactagattgattggatcaaaatcaagaaaagggatttgctacaattgtcaattgatgttgtttgagccgtcatctcaagcggggtcccttgataggattagaatcacttgatcctgacttgacctggatttgaggctgataaaaagggtgttatatagtggggatcatgtggtcgaatttgttatcgtcttattgatcgttttgactagctaattgctatggttaaaattattatgttcttgctgactagacggaagagatcgatggattagtaatttaatttctatgataggaggagagtgatctcagcttgcgtcaataccaaaaaaaaaatatctgatcgatcgttggcgtttctttttcattatctgcaccagtgtaaaaatgacataatagtgtaagatagatggagtattaaatgcatagggccgagcaaatcaatccatttctctcaaaatttagtatgttcaaataacacgattcatggtagacacattgtctaaaaaggagttatagacaacaaaagtgctgctttttttccttgattaagttctgccttttcaaaacggaagctttcatgtgaagaatcctgtcatcttagatttgttaatttggaaagaatatacatagcttcgcttaaaagttagtaccgttttgattttaaaggaactggcgagatcaatcaaaaatagacagaatggtgcatcaaaacataaattaacaacgaaatatgtttctttctcttttcttgcacgccaacttccttgagaattgaaggaaaacaatacaagaacggttggcccgagaactactagcacacaataccacagattcactatagcactcgtgtactccttccgatccgttccaaaataattctatgttgaaaaggaaccgtcaagattcgttgtactattctattttaatctaggttgatctattttgaaattgatggagtactcccatatatggagaatttgctacattttacagtcgatctgcttctctttttttttgagagagtctctgcttaattctgatcgtgaatcaacaggtagctagtgtgaacgaggtaattaataatttctccattagcccgctacagctagctataaactatactttttcctcccttaaaagttaccaatatatattttcactccatattacgcacgcataggctagctaactatgcatccgatgatccgaaggtcaaaccattagtatacgcagctagcctttctactcgccttggatgccattctacgtatgtagtagtagcaatgtagcatagcacacgagacgacggtgacacagtagtgtctagctaccactgcactgggagctaagctagcgcacgcacgagagacaaccccagcatcgtcatcccccacgcgcagaacgagacacctccgtggattaggggacaaattacaatgcaaatcctcttatatattctaccaatgcaaatttcattgctatagcaaactagtaaaattgattaattactctgtacgtgcgtgctaatttgattaatcatctaggagaacctacgccggcgacgtagccatgatcgagctgggcgcgcgtgcgacgacgacggtgaggtgagccccagctacacgtacgcgggcggcgcggcgggcacgtgcggtggcggggcgggcggcgcgggaagcgaagagggagagaggccacggccagggggaaggcgacggcggaagcgacagcggctggaatatttgtcgctggatggcgccagcctgcttgcgtctgctcgctcgttgtattggaagactagttaaaagagaggagatcgagatggtggtggtgagattattaacagagaggtcaaaggagctagctagcactgcaggttaatttgtgcatctaaatctcacatgtttctagacatataggagagtatgctacatgcatgtatccactgatcgatcgatctctcgtgcacatgcatacgatctgatcagttttattgattccctagtttgatcgactacatcaggaacaaccccttttaatcccgggttgtaaactgagacgtccagtccgggactaaaaatatccatctttaccgccgatcaaaatagccaacaataaaaatggatttttattttttagtcccagttggtaagatggtagcgctaccatttttagtttcggttgattagtttttttctttttttccattgtttttttttgcttgcatttattgtcaccctcaaatccccacaaatcatctacaattgcccatccacaatatcatccacaatccacaagtcattgacaaaatcatccacaaatctaaaataatatacaacaaagtttacaaatcattctaaaaatattttaaaaaatcacaaaacaacagccgccgccggccgctcccgccgcccgacggtctcccctctcgtcggatctggcggaggggagactacctggccgtgcaccgcctcccatcccgctgccactgccgcttcagcggcccggtcgccgctgcggccgcttccgccgctcggccaccgccggaggagaggccgccacctgccatcgccgtcatcggaggaggggggaggaggggaaggggaggaaggggagggggaggaggtggaggagagaaaatgagataaggacgagaggcagcacgcggctcgggagagttttcatgtttttttttttaatttgggtcctggttgatataaacaattaggactaaagataatagggtctgacatgtttttgaatcgggactaaacatgatttttagtactagttcttactcaaatcgagactaatgtgatttttacgtgacttagcaaagatcacttttgtagtagtgtgtgtatccagccgtacgtacgtacgttgctggtataatatgtacaacatgtacatgactctttcgtgcgtatatagggtgctgtagttttaatttgatttgtaccgcaatttggtttgttggttcacattaaggccgagtttagttccaaattttttctttgaactttcaacttttccattacatcaaaacttttctacacacaaaaacttttaacttttccgtcacatcgtttcaatttcaaccaaacctccaattttaacgtgaactaaacacagcatcgctagagccagtcaattttggaactagccctagttaattcatgtcagtggccgggcgtgcaactgcaggcaattaatgttgtcaacgcctgccatatttacatgcaccctgcaggacgtaacgtatatgccggcatgcaacacaacatgtatagtacgtacgttacgtacgcactatatattgccatgcatggatggacttctcatgtttgtcttttgcaaatgcaaatcctttctcaacccatctgtaaattaattaacaattagtcacccttttaaaaaagaaaaaacaacatgcatacatatgcatgccaagacgaacagcagtttaccattccatgactttctggagtatagatccagcgtacgtacgtcaagctgattttttgtacgtatgcaacaagtgcaaatgctcaaggacgattctcaaattcaaaccaacatgcgtccacaactacattacatgcataacaatacaggttaagctctgcgtcatttagaaatgattagtttggatcgatgctgctggagtgctggtcagtacagtgtggtcacacaaacattggcgtaattaataaaggattcagattacatcaacttgcatgaacatacatacctaacacgtactgtaacatgcaatgcctagtcagctgatgtgtctgatggtcacatgcttgtctcacttagaattagattcctctttagctccatggaagcagtgtatgtcagggataggagatggtgaccaactacactgtttaaaatctctgactagatgagtataaaactatggatgtctagctatctgcgaggagctggtaattaattaactatattagttggctacagggtttaattatctatgtagttatgataattaaccgcaaaatttgcagagttaagtacttgcattgtactgtcgtgtctcgcttgtcacacactgatggaagctttcacctggtctctcgtagaactagaacggcgtagctaggataactagtagagactagagagagggtgtgatttttacttttaccttccaaacattttaaatttgagttctgtacttgcttccaacattgcggtaattaaggagatagagtcatagagggatcattcattaatacgatcgaatcgatccttaattagtttagctggctatatttcatttgaggtttatcatttcaatttctgaatatacatcttaaaaagcgcctttaatttgaagcaaaagatggtaatttaaccaagccactcaaaaagtaatcccacacatatatgtcgtcgatgctaattaataagaagattcagtcatgcatgactcaaaaaaaaaacaaatgctaattaaatgcatgcatgggtagtgtcatgaacatgtcatgtcagtcagatcagtcagcgtactaccggcaacgtgttggattttagagtcgctaggcgtgtatcagttaattacaattaaacttaatttgcacagctcttccgaaatccaatgtgatcgagaatatatcatgcaaacaagatcgcatcaagcagcaggcagctgcagtgaaggtcatgcatgcacattgcatgcaaaacatatcacaaaaagctagaagaagtgtgactggctgctggctgcaggtgaatatttggaagtgtgggaaggcgtctgcttgcgagctgactttagtcccaaggccctaaaccagatttatgctcctctaatagtattggtccccatgacggggaggataattagtctttttggcctttggggatttgattagtgttaactccttggactctagcgtatgaactcttgcaggccctaggatattctctcctcatgcccctagggctccacaggctttctaaagagacacaagattcctttccaaagtccacagaaaatttgcaactttttggtccccattttaattctaaatttcttgcattgcattgctagcagtagcaaggcagcttgggaggaagaggagcaatgtatatactttgggaaatgaaaactaacaaagaggtttggaaaaaagagaagccttgtcactatgagtatgtttgcttccttggattgaccttgggcaatggtcagtgtatagtttcaccgtcacaagggctggtggctagctaggctgctagtactagctaattgttgtttcttaattgaactatataggcaaattaatcaatctgatttggcaggaaactatatcgatcttgctagcagctattatattgaatgcattattgttgtatatattcaattattgttatatatagtatatagtatcatgttagttttcctttttttttacggggaatcatgttagttttcctgatgtatgcatatttacgtactgaaaatcaagacattatatatgtcatttgtatgctgagatgggtttaattggccgatcagatgaatcaaacaagcgtgtataaaaaaaaaatccctaattagctatagcattctcagatcgatagtatataatcaaaataacatatccttgatcgatcagttcatcacctaagcataaatttcttaattagtttttgtagagacattaattaattagagtgaagagctaggcgactttctcaaaatgaagagcagaacgtgcgggtgtgcaagctaggctagctgtagctaaaaactctactttggaaaagaaaattaaagtgcacaaacatataggatagctagctaggctccttttttcccccttttttctctcgtgtacatgctgcctcgctttcgttctttctgagtggagtaggggaggcgttgcgaatgcagaagccacgtatgccaaaaaataaaagggagaaaattaaccaaagctggcgacgtcgatcgaccgcttgtaattaattttaaacggatatagaaaccagaattaaggcttcgcatataaatgggttgggattttcggtggcacgtaaaataagccattaacacataaataattatgtaattattataaacttaaaaattgattatttatttgtttatgaaatttctgttaaaaacacttttgcataaaactcactgtttagcaatttaggaagtatgctcaccaagaacaaggaagtagtcgtttcgaagtagttaagtagaactcacccttaagagcaagtttaatagctaactactagctacaaatctacattagagttaacatgtataataggttagctccattttttccctccttttttctctcaatcaaaaaaaagtttttagacatgctatggatagaacggaatgcgaaagagatggggacacagattacccgatgatggttgcaggggagacctcattttccacggccgacaaaaggagaagtggaggaagggagcaagggtggtctctcactcgacttggctgacaataaggtgaatggtgagattaggcagtgctatggagccatggagggagtggtgggaggacagaactcgacgaacacatgttcctaagcgtcaagcatgtccagctctcgatctctccctcactctcatgttccctggttggttgaggtggaggatggcttgcacacgactgtgacgaaataaacaagcctccctcaaagttagctgccggcaaccgcatcatgcgcgtaaccacctctcctccccattcccttgcttccatccttacggagagcaagtttaattgtaaagtcaactgctagctataaacttatattagagctaacatgtgtaatagattagcaataaaattgtttctatttttcttcttacatatttactttagagcatgtgtagagctagctcttacatgagagctagcaatcatcatttttcaatttatctctctttcacataagtttatagttagcttatagctcactattaattaaacctgtgaggaatgaggagcctcgccaacaccccgtggttctcaaatgtacatgcaaaggcagagatatcttatgcctaccttctgcagcccgtcctcctccattagtccatccctttctactaataatcaatatatagtatataatataataagtagagataaatgtaatagtttttttaggaagataaatatattggttcacatgatcgtatgatttggagttttggacacgattgtgtggttccggcttagggtgggtaattcacgagtatgcaagttgtggcgctacaatccagccgtatgtatggtagttgtgtcgtcgtctactcaggggctcagggcccatgggctgcaacccgccgcttctcgcactgtgtggctgttcgcggccaaaaatagcaaggaacatgtgccaaactggcaacaagagtctttttgtcatgtccacatagggcctgtttagatccatttagaatgacaaataacaaataataaaagttttggttagcgttgtaaaagtactagtcggtgtttaaatgcatcttaaagttttaccattttagcactaaagaaagagaaagagagagggtgtggtcccgaagcactttttggcaaaatttgctactatggactaccaaatgccaaatgccaaatgctaaattgccaacttttgctactagtgtttagatctaaaatagcaaaaagtgctttaaaatggcaaaacttttgttattttggagggccctgtgtgtacagtggcgggggcatgggacgaccagtggcctggccccctttaataatttttatacataattatctaattacaatcaattagataatcaacttaagaaatagtgcattagctctcttcaatactgttagccccctcccattttaaatcctggcttcgtcgctactacttgcttgcgtgtgtgccgcccatcggtccatgtactaaagcaacggactcttaaattcaaacatgtacttctacacctcatttcctattatccaaacataccctgagtgacctaagaccctgcataacttgtgccaaatgaaagtaagtcagatgatggctagggatggcaacgggccaggtcaggcacgggtagagcaaaaccatgcctgacctggcaccgacaatgtcacggttacgggttagacataccctttacccttcgatatacgtcacatatcggtttggtatacctacacgcatacagatgtttcccgcgtactgtaaggaaatccttcacagagtctatggatgggaagaatcctactcggataagattgggtcgttaatgtatcgtacagggtctgacatctccgagttctacttggagacctctagatctgcaatataaaagggactacgatctcgccggatccgacaagttcccttgttctctttgtaacctgtgttttctaccatataatcccacatcaactggattagggctattacctatcaaggggcctgaatcagtataattcttgtcttttgtttgcttgatggcgtactacgtagatccttgtaccaacgtaccccaataccctctatatccggtctacgggtatcacccgttgacagtggcgcgccaggtagaggccttggtactcaaggttctactactatgtcatccagcttcgtcgacaacaacgtcagcaccagcctcagccaagtactccctgcttcaacaatgctggtatggactcaagtcggcgaaatcgtcttcccggtttacaccacgacgccgatctcaaccggtcctccaatgaccggagacgagaacgtagtggctacgaaccagggcgattccatgtcgaaaaatccccccgtcgagacggagaacggaatatcgacgacatccaagctcaagaaggattttgatacggccaaaccttgtccttccgacatgaaccacgagctgacaaagatgacttccgaagccacaaggtcttggtgtcttatccacaaaaccaagaaacacaccctgcaagattgctgggttttcctcaacgtccgtgctaaaattcgggcctgcaaagaacgtggaattcagcgtacttctccaactcgggatgtctattgtcctatttacaagacaaagaatcacgacctcttgagctgcaaagtctttctcggcgccatgaaagctcagtctcctaagtcatatatccccatcagggataacggcaaggaacaaggagcgactccaacttcagatcgattcattggggtaatcgatatcgaccctcacgaaccatcggtcttacatctccttgaggactatgggtcatcgacaacgagcgcgccgcgggaggtattggctatcgatgacgttggcacgtcagcgcacgccaacacagaagcggggaaccaatcgactactccagtccagcacatcagggccgttcaagcgatactgagggaaactccttacgatcccgttctgaaccttgaccttgagcgttggacagaacgactacgggaatcggtgactaacctcagcaacgcatttaaagaagctgctaccgcagcacaccaggagcagccaccaactggagaggccaatggtgtaacaccctgaaaattcgaccgacaaaaatctaaactctaaaaatatgggcattcaaaaactttttaaataaattgcatcatgccgattttctccgcttatttcattggaatttagtttcgaagtttatcaataacgaataaggaataattaactaggaataaaacctaaaattaaattggcaaaagaaataattaagatataatttaaaataaagatgaggtgaggatagaaatgaataaaatattatcgcgaccatatttgtatcaattaaatttaaatgcgattgaataggaatttactctaattaaattcaagtaaattatataaaaataaaatatcagtaaaataaatctagagtggatccattggttggaataacacaaatattgaataaaccatatttatgcaaaatttaggatttatagaatcaaatttaaataataaataggctaaaatcgggttaaataagaaaaaacactgttcctttcactctaggtgctcgacgtggtcccctaacccagccccctcctctttcccctctctctgtcgccaccgtcaccacgcgccgctgcccgtcgcgcctggccgcctcgcgccccgagccgccgcgcgccgtcgccatcgtcgcctgccgccgcgccgacgtcgccatcgccgtctgtcgccgtcgccatcccatcgccgctgccgcgccgcgcgccgttgccccgcgcctcgagccgtgccgctgccgcgccgcgcgccgtcccgtcgccttgcgccccacgccgctgccacgccgcgtcgccatcgcgtcacccgtcgccccgcgtcgcgccccgtgccgcgccgccttgcgccccgagccgcgccgcgtcgtcgccatcgccgcc

SEQ ID NO: 8485 - DNA, 4970 bp, Oryza sativa
taacaatgaatcaaatgataggaaaagaattaataattacttaaattttttgaataagacgaattgtcaaacatgtttaaaaaagtcaacggcatcaaatatttagggacggatggagtatatctctactattataaaaatttttgccggtactttttgtacgtcatccgtgtatgagtcggttttgaagttcgttcgctttttttaaatacatgagaagttgtataagaaatctctttaaaaaaaacttacatgctaacttaagatgatccgacttctaattgcagctcatgatttcctaaaagaatatatatatatatatatatatatatatatatccaagtgaattctcacagtgaatttcatcttaactaaatagtataacaataataaaattaaaatagcctttaccgtcgcaacgcacggactttttttttctttttttttaaaagtgcatcatgttttatatacttcacttatttcatgccagagaagaggttttttatttattgagctttgctatttcgggcatgttcatcaaaatcattaggaacactaaattttgacattggcaatttttagaggtgtttgatgtgtttgatttttgagctttaccaagttaagtgtttttatgagaggaactctaagactaccattttggtagagtagcaacgataataacatgtttaatttctgaaactactctgatttggtaatgcgaaaatttgttatggtcgaaagtgacaacaaattaaacatgccatctcatgtgagttttgtcttttattaagactttttttaaaaaaactcaaactttattagttgtgcgcatcctaaatacagaggtcacggatgtattcatcttccttatctttaaaaaaattgccgtgagtgtatccggagattattttctatatggtgaagctttaattcgttgagaacaatttcacttatggtcatgaataagaataggattcgtctgtgaaaccgaactaaattttttgaaaaatcaatcgaaattgtaactttggattacagaaggtcaatccaaatcacttaacatctcatgtataaaatccatccttactcccaattattgctaccacatcacaagtataaattccacccttcagcctagcctgctcacttcgaaacaagcctataacatgaagatagttagtacggagttcatcacaagccttccataatagaaccattaattttatatacaactgcaaagagagctacagtgatccatgcattccgttggatcaaacatgaatgcgcgagaccaacctctatattaatccacaataaaccccccaaaaaaataatctagcggtatatttcattgtttctacaataataacccctaactagcctgccggcactaaaccactggatcccatcagaacttcaaagttaagcgtagaggctgtatacacccccgttaatatagaagccggattttataaatttccattatctaaaaaaattagcctgccggtggcgcatcactgcacctttttcctccttagtttctgagcacttatgaatcacatatataagaggttgtttccaggaatgaacaggcaaacctgaacaaaccgatacattgttgtgtgcaagaagcctgtctctaggcagaaataatcaaacacgacgacaagatacaagatagttgtatcagcttggaagccgattttctcccttcttcaatttgtaaacatgtaactgtataacgatgcgacgctatcatcgtccaaacagataacgtgtaactttttttctttgctaatggaagatttaagtggggaagctctcccctagatgattactcaaaaaataaaaaatccgtccttagcccttaatttatacctcctccataaaaaaaacaaactagaagaggatttttttttggacggagggagtaattgttacccgtttggtttaggtactaccttgccttcaacatcaatgatgaggtcctctagctttaatttccacaataatgcatgaatcttcatgcacaatagccataaatttgattgctcagggaaaaaatatgtacaaaacccctaaaagcattcaagcacgtcatcttctgattccaaatataaggtcggtctacataatgtctgtactatatagaagtacatacattggtgatagtgaatctaccgttacttagagtggccatattcaaagataaatatatctttgtgtgtgtggcttggtttttttttttatgtttgtttgctatattttttcggacacaattatcatttctaagttaagaaacttaagattttttttttgaaatccattgcaagtcacaattattttgctagtttagagtaaaacctcttatcaaagctagcacaaaatgtctaaacgaagaaataatacaatggttagatcacgagtataaagcataaacactaaacaccccgaaacctcctagactaatagcgctgtgccaacactttctattcagttctcatccactccatgaccatgcaacggtgggcggccacacatgttttgcatgagacatgaaacaagctagcactgatagtgatatgtaacacaactctctcagtcataaaatatgttcatttttcaccatcttacacataaaatacaaaacaaaaatattaaaaacattcttattttatcaaatttcaatgtagtcatttctctgattatctatccccaatgtatgttttgcatgagacataaaacaagcttagcactgatagtgatatgtaacacaactctctcagacataaaatatgttcatttttcacccatcttacacataaaaatacaaaaccaaaaatattaaaaacattcttattttatcaaatttcaatgtaatcatttctctgattatctatccccaatacatttttaccttacttttataaactccgattcaataaccgctaaatataaatttattttaagataaataggaagagcagaaagctagctcggtcagcgctctcgtcgtcccttcctcccttccttccttccccttcctgcgtgctacggcagcatgaaaaaaacggccgccggcgctggcacgtgttaaacgaggctacgaccgtgccgtaacactggcgtatgcgccaacctggtagtactaatactcctacatcatacgagtggatttggtttgaactttgaaggagcctcgatttttatatctacgtcaacattatagttagtaataatagacatatctcatattttcgatgggtggctgctgggggtggagaaaaaaaagagtaaattaatattggtgggagctttgcaatttgttgggctctgtgattgtgtaggaatgatatggttttttttgacaaatcaccatatgtatgcagataattttcagggcaacctattggctccggttttaggcataactacaaaggtgtgatgaagacggtgagcttttaaaagctgcatgtcgtaagcttaagacgacggttatgcaactttttgtcaattatggatggagattcacaaatagacttcaataatgtgttctgatcttgttttggttaaatttacctttgtgtggtcatttcttctatcatttctgaactacactcgttttagagtgctagattataataataggctgtagctctctttgagcaaaggccgggatgactattccattatcttaaaaaaagtaataataaacacagattgatgttaatagccattttcttggaacaagtcaaaacccaaatgatgaaatgagtagcactccaatttataagctttcgaaccatttgacccaaaatgtttagccgtgctatcgttttcggtggagagaactaactaaattaaacctgcgtgcttcgcttccatctcattttaagggtgcagcttgctcagtgtaccgttaattaattatacagtgaaaatggtcaaacctttgtctagcttgtctttacccagacggaaaggaaaacacgcggtcaaaattattgaggatgtgggtgaaacaaccacctcgaactctatagtgagaactggagtactccgtatatgtgaaaacttgttgacattgtgtttgtgtggatatgttcaactcgagtggtacttcagaaatttgactgccgccgtattactctttctttctttcatggttttctcaagacggtttttttcacggcacgtttaaatcattattggatttgtagtttgtatacagcttacgatcgaattacgatgagggataggtggtaaacgaacaaggaatagagaagagataaaatgagaaagaaagaagatgggagcagtcaatgcatgatggccttgtttagttcgtgtgccattttttttaagtatacgaacacgcatttaaaatatcaaacataaaataataacaaaacaaattacatattccgtttgtaaactgtgagacaaatttattaagcctaattaatctgtcattagcaaatgtttattgtaacatcacattgtcaaatcatggtgtaattaagctcaaaagattcgtctcgcaatttacatgcaaactgtgcaattggttttttcatccacatttaatgctccatgcatgtgtccaaacatttgatgtgatgaaatttttggaagtttgaatgaaacactggtggagaaaccatctttgctcggttagcaaaaatacacaatagttccggttacaataaaaaccgggattaaagattatctttagtccggttcaaaagtttagagctgctttttaatctttagtcccggttgatgttaccaaccgagactaaagatctatttttaatcccggttgataacaccaaccggaaaaaaagatgcctactatctttagtcatggttggtgttaccaaccaggactaaagatctatttttagtcccggttggtaataccaaccggaacaaaaaattgtggaagaaagtacgaggcatctgccatc

SEQ ID NO: 8486 - DNA, 6570 bp, Oryza sativa
tgcacattattaagaatgtttttgaaataaaattattggacaagttttgaaactatcaagaaattgaaataaatattagacattttttttacatatgttcctttagaaaaagtatttctattttccatgtccactcacataatctaaaatttctacaataaattagataggtaactaagctaactaattcgctatacgcaagtttgttgttattctactgtaatagttgtactgaaataatgaataccttgagaaagtaagactatatctttctagagggaaaaaaatgatgctaattttgatgagaaattggtaataagagatgtttggattgacgccggcaaaagataagtatgtgggtgatgtcaagatatttggtaagataattttttttcacgtagtgtttgattcgctatcatacacacatactgacaaaaacaaaaactgcaatattgactgaagtttccgctaacgattttgccaaagcatcgtggcccatgcaccagctgcctatcggcccactaactaaactaattctgaccgaagatgccggcccgctatctcaatgttttaaatggctttttggcgctttcgttgcacagaaaatctatctaaattgagaagcacaacaggagttcacttggccattgcttcggttcgaaaggaaaacgtcgtattgtgcagttagtgagtaagcgtctttgtgaaaagagctccaaggtacagtctatctgggaaatagttatgttaattatttagtacacttaaaaaggctaggatttttgcggcgcgtaaacgaaacaagctattgttatagttaattaagtattaattactgtaaacataaaaataaacttatttgatttttcttaaaaaagaaacgtatgtataaaagacttttacataaatacattgctgggtagtttgagaatgtgttcgcatgatatagcgaagcactggctcggtcgaaccgccaaagacagggcattaattaggtggtcaatacaagtactccttccataaaaaaaaaacctaacctcattctaaaatgtgcagcgaattaaacatactctatgtccagatttattatactataattgtcacatcttagtattaggttgtcttttttttaaggatggatggagtagagcaatagcaatagtcccagtacactaagtacactcatcgatcaaagctcttattttcctcattttttttcttaattatagtcggtgcattgcataagcataataacgctcaacagtatctgccgcctaaccgcgtgcgttaatcatacgtacacagacccagtttggtttgatcctctatcaaaatttccgtagtgtcaattattgggtaagtttgacgcaatcaaataaaaattagttggtggagttgataagatgtgtcgaaaatatttcgagaggatagaacttaggctagctaaaaattatcaaatataaatgcatgacaattacattgtactctttcagttttaggttataaaatattttgactttagtagtcaaaattaaactgattcaagtttgacaaagtttataaacaaaattagtaatatttttaacccaagataaatttattataaaaataaaattaattattaatttaataaaactaatttgttaatgtaaatattactgcatttgtctataaaattagttaaatttaaagtagtttgactttgaccaaaatcaaagcatcttataacctgaaacggagagagtaatttgcactacaatgcaatttgtatgtagttttcaaaactcctatgataacacgctattttcgtgaagcgaaggctgtgagatagaatctcctcacctgtacgcgcactatgattgttttcttctcccaacatgcacaaatcttgaagtaaatgtaatgatttgaaattatgcagaagttacgtccaagttacaatataattatattgcaattgtactatatttgtatttaatacttttaaataaatttatcgataaatatatagagaggaaatagcaaaactatattttgatactgtagaaaaataaactgaccagtggcagtagtgacaagaaaaaaaccgtggcccattttctaaaccaatttctggccgaagatgccggcccactgtctcaatcgggcccttctcatgtaggccttctcctccgccatgaacagggccccgtcaaggcccatgtggccacagacgaaatagcaaaagtctcctcgcaaagatggccggagacgacgaccaaccacggcggcggtggcggcgcagggccgggattccgggaggggacgctcctcgaaccggacagagagagagaccgtacagggcgtttattcggtcggtcgccgtggggtgggggcgccacggccacatgcccgacgatgggcgatggccacgctgcgttgatagctacgtcacggagctcgccacgacggcatcccatgatgattcacgaccgccatgcacatatgctttgccccagcgtatggcgacgaagacgcgattgcgatgatggtcctggtcctggttatggttatggttatggttatggttactagtactcacgttagataggccaagagcggcgccatgattatgcatgtgtcgatcgatcaatcaggaggtgtgtagtacatgtgtacttcttggatgcaaatccactgctgtactgtacctgcagtacgtttcacctgacgtgtgggtcccacctattccgggcccacatgtcagtggcacttactgcacatgtattacaggagaggatcgtaactcgtacttcttcggttccagattaaagaaaatataatatctagatctataatagtaatgtttatttgttttgggacaaagaaaatacatggtaccatctccattctaaaataattgtatttctatcatttaaattttatcttaagaaaatatatttcttatatcatacaatataaaggattttgattggatatgacatattctaatactacgaatctgaagtacagatttgtagtactaagatatattctatctaactaaaatctcttatattttagtatgaattgagtatttctactaagcaacaaattagtatttaggtaaagatataatccctatatttctacgcacatcacctttctttaattaagtttacatataaaatatgtgcatgtctagtggtcattaaatagggttattactattatttttacggctgtttctaatcctctagtatcttagaaattaattattctgaaatgggggtggtactagtatgtacagtatgtatcatgttcgccacatccgtatactctactctattattccgccgatcaggaggcaggacgtatagtactccacgagagtatcgactggtatagataaaattattactccctccgtctcaaaatataaattttttagactttgacgcagtttttgagatgctaatttgatcaacaataactataaaagtaaaatattttagataaaaagagttacatattatgataaattgtataatgataatctagtaatgtcaattttacatgattgcgcttttttattttcttgctattgatagtcaaagttaaaaatgtttgatttgatactatgttaaaaatacttatattttaagatggagagagtaatagtgtatgtatatgtgatacaagtacaacggcatgatctaccccagtctgagggcctgtttggtacagttccaactcctaaatttaacttcaggagttaagtctggagtagagttgtggagctgtctctaattaattttgtgagagagctccatccagctctactttcagttttggtggagctgaaattgtttgtcagctctagaagggatggagctgtgaggcccagagagtcccagagacccagatctactccggtaaccaaactagataatgcgtgtcgttacgagaagtaattaaccgggaaacaaatcatgggttgttatgtggactacagcctcgacgacgcagctttgctagcgccaccggcgccggcggcgagcggccgggggacagtggccacgccgatccaggccactgtccccaaatccacggccaccgcaccggccagctcaatttttttcctttctcctttcccttttctttctccttctctttttcgtcgccatggtccctgcctctggctctgcaggcagtagaagtgagctcctgctgcacaactagggaagtgatgaaactgcaacgctaatcacggttgaccggcctcgaaatccgtgcctgtcgactgtattaactctcgctatcttcgtcaggagcctcaacctgcagcatctggacatctggatctcagttaaatttacgaacgggtcctttctcaagtccagttccctactgagagcactctataataatagagttaacttcctaatattaatcaatcttaaaaccaacacatataatagattagctataaggttggatataattttcttctcctctctctatctctcacttatatattaattgtatttgtcttgaagcttatgttaagctagctcttgcatgagagccaacacccttaactttttgttacatctctcctccacataagtttataataggcttatagctaactattttacttgctctgagcttagctatagataggagtagcacgcagtagctactggagtactcctccgtaaaaaaataagacaaactctatatttccgtgtccaacgtttaattgtccgtcttatttgaaaaaattaaaaagataagtcacgcataaagtattaatcatgttttatcctctaacaacaataaaaatactaattataaaaaaatgtcatataaaacggacagtcaaatattggatacgtagactcaggttttttttttttaaggagtactcaagtttagtgggaggatttaagcaggaggcgccatcatgagctgcggtgatgattgggtaggtggctggctaattagggcttaattaatcgggccggggctcacacctcgcctcacatggggaggtggtcttatccgtataggagtactagtgtgcaacgcgcctacgaggacgccacggtatacccgcgcgatttgcatctcatgtgatttcgatttttcttcggttgggtcattggcgagtaagagaaactagaccgaaggttcaggtccttttgaattacattaatggaaaaacaaagcaataggtaaaccataaacttctgatagaaatataagtgtaaaataaaagattagaaaataaaaaaaatataggaattaccgtttgattggagcatagaaaaaacgtaggaatcatatgaaagatagattcaaagggattttccaataggttgatctcttgcaacttttctttaaaatttctatacaattacccataccatagaaatttgaaagtataagatatgattcaatccttcgttttaaaggcttctatatgaattgaatcatccaaattttctacacttttcctacaaattaggccctaagccagaatttgaaatattgtaatttattttatagtattggttttttaatagttaacaacatgtatgtaaaaattttactcatagattgttattttaattactaataaacaatataaataagcacatgccgatggacacgtttatttatacatcctcaactcataagccattacagggtttcactcatgtatcttttcactttggtaaattttgctacaagacatcacgacttcgtgtttttagctccaggacaccgcacaaagttactttttgggaaaaacactcttaaaatatggttatttgctagcggacaccacgccattaaaataataatttccggttgaagaggagagagaaatcgcgtgaaatgtcaaaagtatccttgggcccacatgtcagctctcttatctctgtctacgaggcgaggcggggcgcggtgccaccaacagccggagcggcgtctacgaggcaaggcgaggcgaggcagggtaacaagtttgcgtttcactttttatattctgggagtaacaagttacaaatagacttcatgctatatactccatccgtccctaaatatttgacgccgttgacttttttaaacatgtttgatcgtttatcttattcgaaaacttttgtgaaatatgtaaaactatatgtatatttaacaatgaatcaaatgattggaaaagaattaataattacttaatttttttgaataagacgaattgtcaaacatgtttaaaaaagtcaacggcatcaaatatttagggacggatggagtatatctctactattataaaaatttttgccggtactttttgtacgtcatccgtgtatgagtcggttttgaagttcgttcgctttttttaaatacatgagaagttgtataagaaatctctttaaaaaaaacttacatgctaacttaagatgatccgacttctaattgcagctcatgatttcctaaaagaatactatatatatatatatatatatatatatatatatatatatatatatatatatatatatatatatatgggctgcaggaatt

SEQ ID NO: 8487 - DNA, 10826 bp, Oryza sativa
cgctcgagctcgacaggctgtacggacggacggtggtggtggacgtggacgcgtggctgctgctgccggccgtggacgcgttcaccttcttcatggtcgtcgccgtcgaggccggcgggttcctccgcggcctcctgcttctgctcgtctacccgcttctgtgcctcctcctcggcgacggcgatggcggcggcggcgcgagggcgagggccatggcgacggtggcgctggtggggctggaggagagggaggtggccagggtgggccgggcggtgatgccgaggttcctcatggcggcggcggcggcggagggcgcggaggcggtgagggcggcgcggcggtcggtcgccgtgagcgcgacgctcccgcgggtgatggtggaggcgttcctgcgggagcacgtcggcgtggacgccgtcgtggggccagagctgaggtcggtcgccggcgtcgtcgccgggatcatggatgacgccgacgcggcccgggtggcggcgaggaggctccgggcgctgctcggcgacgagatggatcagggcgaggccgacggtgccggcgccgccgtggggctcgtcggagaggggaggagtggtggcacggtgcactacctcttctcgcgttactactgcaaggtgagccgagctagttacgttgagcttttcctttttactgctctctccatacttaaaaaaaaactccatttttcagtttttggatataacatttcgcagcacatcttatttattaaaaaaaattatgattagtatttttatttttattagattatgaaatatgaatagtactttctatgcaactattttttctaactttttgcataatttttcaaataagacggccagtcactatatctagaaataaagtttttatgggatagatggagtactctttctgtttattttacttttgtacgaagccgtcatatattttaggacaaagggtgtaattagtttcaaattaaatggagataagagaaagttgcatttgcaccattgtgcatctcaaccgaactctacatttttcatttattcatctcgagatatctgctttggtgtttataccaattaggtagtacaacttatagggatagcgttgtgatgtcatcttcttgtcttctttttgtttttctttcaaaaattcattttgatatccatgtgtatgccagcaccttaattattttgtattcgtcgtgtgctcacgtggattttgtatcatgaaataggtgcagatggacgtgagaaaaaaaaaagtcgatctgtgtcttttggtatttttccttgtagacatcacatggtattttccctaaacactgtagtaccaaaataggagtaagtgacaaattaagcagcaagcgacacatgccgacctcattaatttgcttaaaagatgagtagatgacctccacgattggctactctctgtttttcttttccaatttggtgaacatccttttcgcactatccaattataaagtactgttaactgatgtccctagcaaagaaaagggccaacgaatgtccctagaaaaataattaaatctaattaatgtcccagggataaaaaagctaattaatatgtccccagaaaagaaagctactaattaatatcatttgcgaaacaatgcataagtagttaatgtgaattagtgattaaagaatgaatactctttcctttctatatatacatgctcctaataataatttaaagagttttttctttgattcgatattgttgcaatcaactactgttacttagttaacaccgttgttatcacagagcgtgacgtgtacacaattaatgtcaattaattaacgtgcatgtgtccaatccttgcaggaaaccttcactgcgactgaggctgacaagcggcggtggcggccgctgccgccgggcggcgagtgcggcggcgtcaagccgctcgtcttccacgacggccgcctcgccttcccgccgacgccgtccgccgcgctcgccatgtacgcctacctccccttcggcgtcgcgctcgccgtgtcgcgcatcatcgcgctgtccctcctcccctacggccgcgccacgttcctcgtcggcgcgctcaccggcgtgcactaccgcctcgtcggcgccggccacgacgccgccgccggcggcggcggggggaggctctacgtgtgcaaccaccgcacgctgctcgacccgatcgtggtggcggcggcgctggggaagccggtgaccgcggtgacgtacagcctgagccgggtgtcggagatgatcgcgccgatccggacggcgaggctgacgcgcgaccgggaggaggatcgccggagcatggcggcgctgctggcgcgcggcgacctggtggtgtgccccgaggggacgacgtgccgggagggttacctgctccggttcagcccgctgttcgccgagctcggcgccgacgtgaaccccgtcgcgctcgacgcccgcgtcgacatgttccacggcacgtcgacgacgccggcggccaagtggatggaccccttctacttcatgatgaacccgaagccgtcgtaccgcgtcgagttcctgccccgcgcggcgccggcgccggcggcggaggacggcggcgacagcatccgcgtcgcgaaccgggtgcagcgacagatcggcgaggcgctcgggttcgagctcaccgggatgaccaggaaggacaagtacatgatgctcgccggcaacgaaggcgtcgtggccgccgccgcggcggcggcggcgaccatcaaagccagtcgttgaacaggtgttcgatccggtcgtcgtcgccggcgatgtatcgcacatgcatacactgcaaactcagttaccataacaacagctaggaagaacttgcttcacacagttcttatgatactcataatcgtgtaattaaatatataaacacgaaaatagtttattaaagactttatatagctcattttggtccggactctggggttttgatttgaagaaaatttctaaaaaataattaatagtactcttaattatctattgataaaattaaagaaaatgcctatgaccatgcgctggattgcaagataaaacaaaaatcagacgccatcacgagtcatgactcatgagcaatgcattcactaaactctgtttttatttatcgatatctgcaagtccgcaagcatacatgcatgtaacaaggagagggtccaaataagtgagtttaatgatttttcttctcctaacctatttatatggtacgtgataagattacactaatgtatttaaacaagatctcatattatattttaataacaaaaatatatatgtttcaaccaataaaatttgatgtttcatagcgagagcgaaatgttccgatagagattatattgtatttcacatttttaatttttaatctatttttatgttttagtaatcagaattcaatgtttcttcatacatgtgagcaacatgtttctgatttggatttagctgtgctttacttttttttaattcatttttatgttgcttcccttataaagatgttcaatccgtgtatttataattgtttcattcgcggtgatttctcacatattttgtttcgaatgttttaacaactaaactttttttcttcaaaatgtataacttaatattttgatcaccttgttttgaggctcaggtcgggtgtttgacccctagtcttgtccataaaattaatttaaacttagtcgggtatataacttaattttcgctaacattagcttgttgctcggaacaaagcttatcatgggtttcaatttaagtaaacaaaactgttctcggtcctccaaagattccaaaccacgttcaataagaatacatacttccttttgtttacaaaaaccaacctaaatttagatttattcagattggttgtcctataagaagtcacatattattctaggttagtttttttttttgacgaatggagtatataagtaaggttaggatttacctactagcctccgtcccattgaacatactgtcttaagtgatgtgtgcgcatgcgtcttctatataataaaaaaaatacacatagttaattacttttgcatgacattgtactagagcatcgctttcaagtccgttaaatagcactatatatgtggttagtctgttacttgggagcaatattaattatttcaaaaatggcatcactgataaagtcaaacattatttagtcagcatcaacattgttgaggcctattccatgtggtccatgagatacccacatgcagatgtagtcatcagatatccgcacaacactctattcaaattgtactaatgaagatttgtgtaatcatttaattaacaattagcatcaacatctcctttccctcccaaaattaagcatcatgttattttcaataagcacgtcaagacatatgttatggatcgtactctgtgtaaatataaaatatcatggggttatcacacgtaacaggcagcattgccaatggcattaaacagaacaaacgatttagctcaaaggcagtcatggggttatcacacgtaacagcagatggcaatatggcatatgcttgggagcttgcgcatgttgttaaccaagcaattggctccaggcagggtttaccgcggggaacagtaatataaatacaatagtaaccttcttaaatttaaataaatttaaaaaataatttaaatttttgataaattttgtacgattttttacggttaccacggttaccgcgcggtaaccgtgcttaccaccgggacgcggtttggaaaaccctggcttggtaagcttttttttttttcttcccctttctttccgtgtgtttggggtattggggtgggggagggggattgcactcgtacacctgattttatctccaattgtaattctactatttcttcttcaactgtgtgattttgtcctcattttttaaaaacttattatgccctcgttctttttaagaggactaaacgatgttaaaatttatgtatgccctaacagatttggccctacttgtatgaggactttaattatgattttacctctgttttgacatcaaaattttaacatgaactttttacttattcagctaaaaaaaaagagtgcacacatgcttgacatgaattttaaaaccgttgaatcttcctctcgcggaatagggcaaacacaagattctgttaaggaaaatggggacagtaggaaaagtagggcaaaatcataattgatgttaaaacaaagataagaatacaaacgctgcttttttaaggcaaactcaaaagcgagtgcatcacacctatgaatgcatattttactcacatacctattttaatatacccttacataagtacttgtttaactagatgcaaagtgaatcaaggttcgctctacctagcgaagggtgcaatttactttttttaaaaaaaacactctgttagtgttaaatcatgcacagcgcgcgctataatgtactattagtacattatagcgcaatttatttaatttagcagtatgcgctgtaatgtactacaacacacaaatatttttttctcccaattcacactggatggtacagtagttctacactcagtaaacgataactaagggtaaacccgtgcgctttttgaactttctacagaagggcacccgtgtgtatatcatgtaaatgtggctatgcaaccaatttgcaggagcgttcggctcggcacaaatttaatgatttcgtttccaatttgtctagttgatggaagttcagcaggatgaagcaacaggcataaaagaataaaaaaggtagataaacagatacgagcagaaggatatcccgaaatcgaaattattgcgacacgaacacagcacgacaaagattgcgatgcatttctccaaggacgactacgtccaacggcatgcgtgcatccggagtgtcgagttcatgttcatctccagctaatactttggataagtgttcagatctagcttttttttttaaaaaaaagaaaaaggtccatatcaaagtagttcagataagtacccttcacgttttaagtacaaaaggagagtgctcaagattgtcaatccatcgctacatgcatgcatatatgggtattttcaagatgagcaaattgcatatattggtccatgttttttaaccatggtttcacattggaccaccattaactgaatgctttcactttacaccagattttattaccaaaatatatcactttggaccagtggcccacttgccagtgtggctgaggggaaaaaaaaaggaaacttctcggttgggaaggaaccagcgagtccgctgactcatctcctaccacaccgtcgatctctttccaacttcacccaaccatctcatggcggtgtgggcagagatcacgctaaagccttgggggcaacatggggagcttgggactggaaagactcgtgtggaggtcgatgttaggcgacgtcagcaaagaggagctcgtgcacgtccaggtacagcaaaagtcgagtcacggaggcgacggtggtggagaggagcttgagctccgggatggcgcgcgggcatcggagtagccgtggagatcgaggttgagccgggacggcagagaggagcttgagcccaagtatgacgtgctagtgctactgaatattgaggtcaagcgaggtgcgacgacggcggagaggagctctagctcggggacgacgtgcgggcgtaggtgaagaacgaagtcaagctagcgagggccgacggcggcggagaagagctcgagcttgaggacggcacgctggggcgacggagccgcgtaggtcaagctggggtggtggataggagctcgagctcaaggacagcgtgtggatgctgctgcctgctggtgcctggaggtcgacgtcgagcggggggagacacggcagaggtcaaggccgagggtggcacgccagcatgggactatgggagagttcgaggtcaagacggggcatgacgatagcggagattgaaatcgagactgggaaatgcatgcatgcgggaacaggcggaagtcgaggtcgagccagcggacgacatcggcggagattgaaatcaagccagggaatggcgtgcgagtgtgggcggaagtcgagatcaagccaccggacatcgagcttgattttaatcaccggccggcacgacgggaacaaaagtcgagctagcgtgacgccgtgttggcgggaggttgaccccgtgctggctagactacgagcttgagatgcgcgggcgtcagctctgttatatatgctcgagctctcttaggcgtcgtagtcttcgtggtctacagccatcgatgaaaacagttggagatgatcagatagtgatgagagattggctctgagagactgactatgggccatacgcccaaagtgaaaggttttggtataaaatttggcctaaggtgaaaacattatattaaggatagcccaaagtgaaaccatggtaaaaaaatatcaaacatgtaatttactctttcaagattgacaattcgacatgcttacaacccaaagaacgatgaaaaagaaacaaggagaaaactcgcgagaacaaacaggaattaatataccccctccaaagttataatcaaaggaaagaaaactgtcacgcatgagaaaacgtgatttttttttaacaaagacgccctagcatagcattaccagtacagaaaagaccatgccaaaaaaaagaaaatttcaatcaaatttgataaagccttcctttcacggatatattttatattttgagtgttttttaatttttaattttcaaaataaacgttcctagacttatttttaagataggaaccttttggtcacaccgatctgactgacgtggcaacattgttctaccacgccaccctgactggcatggtaggataaataacaaaactatcacgcccgccgcaggtggcatgactgtttggcgtggccaaaagattcagattttagaataaattttagaaaggtttattttgaaattaaaaaacagaagttcaaaaaatactaaaaattccatccatcacaaaacaagaattgagaagacaacaatactgcctgccatttgacaatgtttcactaaactttgtacatcaatggataagtaaattttagggccgccgagggaccgacatgatctccaaaatacaaagttaaacattgttttcaatcgtaatatattcacaaaacatctttcaaactaatattgttgaggtactcctgaggagacatacataaatggtttcttctaggttcaacctcattagatatttgtgttatctgatgagtttaaaagggttcaattgcttgtaacccaacacagaactctgttgtgattgcacggagtaattaagatatgccctagaaaatcaagttggatacttgtagagtttgattggatttaaactaactaaattgcacaagctagtgtcctacaagtaaaaagtagttggggaatgcgaataccttgcatgaataccgaaccatctagaaactacagtagaaaagtaagaaaagtacaactcaatagatccctttttctcaaaaaagaaagaaaaatatcaactcaacaggtctgaatgccaatttccttataagattagctaacacgacatgagtatatttctagaaatcaaccgggaaaaaacaatctagcagaaaagaaaaaccataccaatctagctgaagaatgttcaacaggagaaaaaggggaaagctgtaactaacattattttaacacttacaacattcataacatcaaccgtttcatcgaccacatagataaagacatacattatctaaatccattttgacagttccaagtcccattgtgatggtactgcaaaagaatgagcaactggaacacatatcactgctaatataccaaatttcttaccttctgaaactacatgacagaaaataggcgctaagctgctaagacagtaccacaccattgactcagattcctcacataggtgccctgaaaatccgggaaccgctctttaggtactaaaaaatgtaacataacattccatcaacatctcttagtaagatggatgctaccaagtccgtatctgttataagtagcgattcgcaattcattaactactttgccactcttacctggaacaggacctcaaggacttacctttgtgtcagtcagtttctcaaaccgtaaaagaggctctctctaaatgcatttaaactgcacaacttatggtgaaaagctaaaacgaatgttgaactcaccactaggcaaaagctaataccgcccataggtcctcccaaagtcatcatgtctctcatgctcaaactcgctgtatgcagcatgaggccttggggctgaatagctatcagtaatatacggatattcactcttcgagtcatttggtggaccagtagcagcaaattgtgtagctctctgatcatagtctggataagaagtttgggcataagaagtcggatgagcttgctggtgccttttaaagctttgttcaagaaattcatcccacttccttgaatgcatactcctcatggctgttactctcttcatgtggttttctctcatttctctcaatgactacattgaaaataataatgacatcaggaaatactgaagggttacttggtagacattttcaacataaaaaggaagttgttagaaagcaaccacgctgcaattatgaaattgaagccacaacacccttttgtgaatacatctaatttcaaaacataagccacagctaacaaaattatccgaatatgaaaaggttgcctgccgcagtcaatacaactcaattaaatcaatgacagaaatgttagtatgttataacatagaacaaccaaaaggaataactaatcatgacaagtgttttaggttgtgttgttctgaagtaacctccaacgtttcatacacacaaattaagttgctggaaattctgcaaatgatgatgggaatcaatggagtgcactcaacaattttaaaaataaaagacacaatggaccctcaaatattatgtggaatgtggattgatgtactccagatttcacttcacatattaatcatgcagttataaaaacaaaaaatgttgaaaaaataaattgaacagagtaagagtttggaagttcagctgtttccaactgaaaggctggaagtggaagggcaaaaatatactacatgccaaatttaagcaatcattgggtaaactaaagaacattcttatttgcaatgagccaatgacagaaacactgaaacatatagttctaatactattcatgctgtggctacacaaaatagaccctgaaattatcggttttcttataaaagaaagtaaagaatacatgtgttgcaaactcttcttatcatggacagatcaaaccaccatgttaataaaaaataacaagaactctcaatcagataccaccagtgaccattttatattgaaaataagttacctaacagagaaatgatgagctattcaatatgccaataagaatttacctcacgatgcttgtagttctcttcatcctcctctttgtcacgggctatagctaactccatagcttctcttttgaactccatttcaagctcttccaaagtttgaggataggaaggcaggtcaaacttaaggcttaatcgggaatcggttccacgcgtctcagtgctccaggtatttggcacatatgtagctgcatattggttattcccatcatttgatctaagggaatcatcaatatatgagggttgacatggagattttgattgggctggacggcctttagctccatagttggcagaagcttcagcaaaaggaagaac

SEQ ID NO: 8488 - DNA, 12949 bp, Oryza sativa
agacaaagctgtgcgagaaatcgggtacttcagcaagcatgtgttcctcctctttcccgtcaggaggtccatgatgctagagtaggttctgtccttcaagaagcttcattcccttccctaccagcacaatcaaggaaggcaccagcacatagtcagagctcaaggactgcagcaaggattggggaccagcagtttcgtcctttatcagttactagtaacaggaatgttgctttagcacagcagggtacaagaacattacctgaaaacacccatgtatctgggcttgcacaatacagcaagagaactgagaacatgcaccaagctgttcagcctcagttcctaaaaaataattctttgatcccttctggctcaacaagccgccctgtgcatgtccccagttctgctggaaatgaaaggcaagacacattcagcaacagccaggtgttatccagtgtggaggacattcttgcagcaaataaagccctggttgagaaaatgcgggctgcattaggaatggatcaggatatgttcaacgcatttaaagagatcgctggggaatatcggcaaggtgttatcaattcttcagagtacctttcatatgtaaagcagtttggtctcttgcaccttgttcctgaaatggccaggttattgcctgatgctcagaagcagaaggagcttgcagatgcctactatgccaatttgcgccttacaagcctccaagaaaatggtgggggtggaaccgataactcgaaacaaggcaatcagaataagaaggggaaggggggagttcctgacgccataggaaccagtaatgctgcaacagatccgctgaaagataagttgctgaatactgccatcaagttccagtcaaattacatgccccaggaagggtgttgtggcgtgcagcgaaaagaagggagaacaacagatggatcttctcagggtctgcctttgaagggtgcttggcaaagccgtgggggccagagactcttcatgagcaaagcaaagaagtgacgaattggttttgcaggtcaagttagttagacctgccatttgagccgctacgaaatgtcaaggtttgtgtctatctggtgtgtgtctgatagttgagtacatgagtgcagcaatcatgtgtgatgcgtttgcattttgatttttttttcttttttgtctatcatgtgtggtgcgtttgcattttgatttttttttctttttgtctattttttgtgtggtgcgtgcgtttggtagaccatggaacttgagactagaacggtccacaccatactgcatagtggagttttgcaacttcacatgagtgaatttgggctatagacggttctgttgctgtcaactcaaaactccttttaatacgaagttatggtcaaaatcgtaccttgatagagataaaagataatgtcaaactcatatgttctgtaaatacttttgccgaggaagtgctaattactactcaaattagtgcaagccatgtcggtcgttcactgctttgccgacaagtcagagtttgatttgcatctttgccatataaatacatttcattgatcgatcatccatagccagccagaagacaccgacgaggcgtgaccggaccgccaccgccatcacctccgcatggagcggcttggcggcgtgccactagtggttcccctacgtggagcacctgttgggcgacggcgacgtacgagcagctagctgttcccagtgccgatgacgtcgaggccgggcacctacaactacaagcgtgcggcggccggccccttgcctttttgtttggttccctcccaaacattaccaaacctccttgctaaacctagccaaatatgtggctttatttggcttataaattgatggccacaccttatgcaaggtttggcttaaaagatgggtgtataacatgtgggtctttgaattaaaaaactgtagcaaagtgtggcaaagtttggtaaaacgagggaatgaaccaaacagcctctagccctagccttgccttaagagtaagtctattttacctccctcatctcttgcccctggttaatttgcctccctgaattgcaaaaccggatatagcacctcccttatttttaaaaaccggtgtaaatcgactcctttgatggttttggaggtggttttgtcctacatggcgcatgtgggacccacatgtcagtaagaaaaaaaaaataaaaattttacacccggtacgtgtcagtcatccttttattttttttcgtcacctctctttcccattctctctctctccctggcggagtcgtcgtctccggcgagcccttcccaatcgcccgcaacccagtcatgaacaccgcggcgtacctgttcgacatggcgggggtcctcgccggggtctcctggccacggccccagctcgggtcagccccgtttggtgaccagatggatcagcccattggcctacccggtgttgtacagcaccctctcctccgcaccgacggccttgccgacgcatcgccacggctcgacgacgacgaacgccgtgccgcgatgtccctctctactgctgggtttgtctccatggcgtcatcgcgcgcggggaggatgagctcccacatgatgggccggggctgctagtgctgcgaggtggcagggtggccttctcctcctcctcatcgtcgttctcgcccgatgccgagctcctccaggatgatgaaactcgagcatcgccggggaaggcagcgggcggcgtcaagctggacccctcccccgtagtcgccggcatggccatgcagctggacacctgagcaccgacgacgactcctacttcttcagcaccccttacgccatgtcgttcagatatagctccatcattaagaagcaagcaggcaggcaggcaggcaagcaatcaattgaacaacgcaaaccaaaaaccgctgtagcagctgctagctagctctggtcacaactcgctagagccaaccgcaatcgatctcaacaacgaatgcttgaattggatttcgtggcgtgcgcagggaggagctcgccgaccactacgccggagaaagagagagaacgggagagaggatgactgagatgtgggatttttttttattattttttttaactagcaatagggtcccatgagcgccacgtaagatgaaatcgcttctgaaaccacttaaagagtcgatttgcaccagtttccaagaatggaggaggccttgtaaccggttttgcgattgagggaggtacagtagacttattccccttgcctaattaccccttcggccttcaaaaagatgtcgatgtccctcacgaaggaagaagctgtcgtcgctcctccgccaaaacttgtcggctagctcaaggacaagccgaggcagtactcttttagctcgatatgctaaccaagccatgaaccaatcccaagctcggcttggcttgtttccatccctaggtctaggtgtgccaactcctgccagacagtggggtggctcgaaatcgagctcgcctgctttatattcacgatggtcgccattgccaacaccatgggcgctgggaggaagaagctaaagtagtccaagggcacttctatccaggatggcattgtaattgtaccatctacgccacgcagtggtgaacaagaataaaaattattgaaaatcctatacatatcaattagcaaattattaactactatactaattaatatgatataaattagctagaattgagtaatttacctgtggtcctgtgaccctggtaagcactacgtaggttcgcccattgacaccgcgctagttgtcagtggtaatttattaaatcccatttaaacggtggtgtttcaataaaaccatttttttgcaatggcgtgatctcaaacttctccgtgtcagcgtacgtacggaaatatggaattattgttctcaacttgttttttaacccttatatatggtcatggactagtactccttgtacgttatggaggagtatttattttctctggtcttcccagctgtgttgttcaaggagtacatggttgcatctgattggagtagtcatcagctttatttttatcttctctagaccgtgtagagtgactgtagagtgtagacgtaggatacagtactacacaggaaaggcgttcataaatgcgaaaacgataataactgtaccacctatagaacagtgaatttacttccttctgacccagaagtaaatgtctgtgcaatagcatgtggtaaattaaagtcttgcatctgcctcaacattactgctaggttttagtacctttttttctctttttcttttttaaaatactgtgatatgttcatgtctgtcccatgattagtataaaaagctcttaagttcaatcttcagtgtagtactagtagtttgtagggttgatttgcatgcatggcatgttgttttatattaattaacttgcttctaaattccaattgatatagtaaatgagagcttcctggctagcttcctctctctcatacacacaagagacaccatcataagaatgtcttgcaggtatgtcacttctccaagggacagtgtagaacctcaactctgaccatattcaaacacataaaatgctgagcacgatcagtaattacttctacctctgtttcagaatataagcatttctccacatttctaaaatttatctgaaacggagagatgtgatgtgacacaccagaaatgcttatgttttgaagcagagatagtaatatatatagccatcaccatacaataacacaataatgatcacatttagcattattcatgcctcgagctcgaaacagtggtagtactactacatgatcacgaacttaattaaaacacaaaatataagaagggacctaattaaaacaaacaaacacaaccaaccaacaaacagatagaataatcctcctccaaatgcatgtaaagaaaagagatagaagagacactactcataatagaacgctagctagacacagtgcaagctaactgcacatatgaagatataacgcgcgcgcgtcatatagccatccatattgcatgcaacgccgtgcgctacatagagcacattacccgcgcagcagcggcgacgccgccggcgacggcgaggtctctcatggcttcttggcctgcttgtcggcggcggcgggggagccgggcatgccgccgccgaggccaggtgagccgccgccgaggccgccgaacatgggcatgctgccgaagccgccgaggccgccgggggtggagccgctgctgccggggaggctgaaccccgggatgctgctgccgggcatgccgccgaacgccggcaccgcgctcccgaagcggtcgaacggcgggaacgtcgtcggctgcaccaccgtgtccttgctctccgccgccgccgccgccgccgccttgatgttcctcgcctccgccgcgccgaccaccgcgagcaccagcaccgccgccaccgccatcatcttgctcgacttctccatctctagctcgatctctcttgcaaaagctaagctaagctcgagtgtgcaagctgctgctgctgctgatcgatgtggagttggaggaggagggagagaggaggggagaggatttatagcggaggagaagctcatcgtcatcgatcggcagagaagacggtaggtgggaggcgtaactgcggatgttaaaggagggggtacctgctgctgttactgcaatcctgtgatccccattaatacttttgctcttacagatcatcaatataaatgtagtacacatgtaggagtaatatgatatggagtagtatggctctcaatgactttggatgaattggcacaacggaaaggaggaggaggagagaggagagaaatgaacaaaccctagctagatctgtggttgtggttgggagctagtagtggcattcaaaatgttgtgaaacccttttaattagacagcttgcattgcatgtaaggggggttagtgtactaagaccaagtataatagcaggctataagccaactatatgcttatgtggaggaaagagaatttaaaaaatgcagaggattggctctcatacaagagctagctattcacatacttcaagacaaatacattaaatatataggtaagagatagagagaggaggagaaaaaaagaaataaccttatagctcatttactatacatgtttactccaatataaattataagcttatagttagctctattattaaacttgctctaatgaactagttatggattggtgtgcctgatgatgatatcatatggcacttggtaggcaatggaaaacaagagagatggcatattaatggcattgcctttttttttgtgtgtccaactgtgattaaatgtgggatactactaatgaaggacttagcatctattactgatattaatttaacataaagaaaaactttattgatctcagataattaattgcatcaatgtgatattattaatcgatctaagagacaacctgtcaacctctgcatatagctaggatatggatgccctaggatatgcagagagcctgagattattaaaaaggaaaaagtacgaattacccccccaaatctatcgcgctcgtccgaattacccccctaaaccacaaaaccggacattcttcacccccaactatgcaaaccagacaaattaccccccctcgacccaatccgcggtggttttggcctatgtggcgtacacgtggcaatccagtcagcattttattttatttttaatggtgggacccacatgtcagacccctctttctctcttcctccctctctctttctctctcttcatcggttagcggcagcggcgcacacgtcggtggccggcacgcatggcgcggcgcgaggaagggcgatgggcggcggcgcgggggcgggccggcggtcggcgcgcacgcggcgcaccgggaggtggaggggatgggggagaggcgggcgtcggcggccatggccggaagcgtcggggggaggacgggggacggcggacggaggcgcacgttgggagctggagcggtgtcgggaggaggacggggaggaggagcaagagaggcggaagagggaggaagcagcggcggaggaggaggccgttcccgcgaccaaatccgtcggcgccacacggggggacgaccgtcgtcggatccgcacgggcgacggccaccgcacctccccactaccgtcagatccacacggttgcgcaatccaccttgccgggagaggagaggggagaggaggagtgggggagaagaggagaagaaggccgttcccgctcgtcgggtcagggcggggcagcagctgcggcggcggtggcaactgcggtggaggcggcgcatgaggtcctgtgggcgcacggctacgcatcgacggcggggcggcaactgcggtggacggcggcgcgcggggaaggggcggccgccgtagtgccggcgtgtccgagctccacgccaccgcgacggtatgggcatgaacattatgccgctacaaaactataacacgcataagattaataccaaaatccgagatgatttgaagttttgaacccaaacccacagagaactctaggcagctctcggacaaccgacgtataaacgtacccgtttgttctccatttaactaattaaaaggaggacatttttgaaccaggagaaaaagaaagaaaatctgtttagattttagagcgattaatcggttgaagctagacagggagatcaaagaactgtttggccatgactttctataagcatggatacgtacgatagagaatctagttgatcgtgacacttaacactaggaaagaactcgtgtatgcgtgtgagtgataattaatgtgtatcatcctggcaattataacaattaatcattatatatcgccgctcgattgattcatttcatcgttggtatacattatatatttatatggttgtgtgttactaccacgctaatgaaaacggaccatatatatgttcttgagtgttcttcaactttcacggggttaattattaatcaatttattaccacggtcagatcataacctcatcgctgcctgctagtcttgtgcgtactagcagcacaaatccagtactggtttgacaaaaaatggtaggatcaaatatgtcagacattacagcttgcgtgcatgtggtgtagtagctcttctgttctttactccagttcagagagaatcaaattcgctagctggagtactatttccgtaacttggatggagcttcaacttcgctagatagtaacaatgggaggttaaatttctacttgactaatttaatttagtgactatagcaaatgataactattactgttgttttgtttgttataatttgcctttagcggctgaggaataaacacaacttggaactaccagtttatactttgcatacatctgctgttaattgcatgcacctgcagatcgatctactcccataagcagatttatagctcttggaactttggaagaatggtagttgggtgacataatgctactagatgcatgggcacggccaacatgccctgatcagggatatggccggggtcttttggctcatagcatcatactattacacctagctagagattcctagttagctagaaaatgacaagttgattattcgtgtggtccttttatatatctctgctacttaaaaatatggttgttctcttttcaaaccatcgcgtgtaatgtcagaaaaccccgtagaaaaaactgaatcggcccacctcccatcatacacaatttttccccagctaaaaattaactagctagaaaaactcgatagaaaaaataaaccctatataaaactattattccttgaaatcccattgcaacgcatgggcatagcgctagtgagtttggaaaattggtgagattttcctattgccatcatatcttgaaacgactcttcaaattaataaaataataaaatggcgtcactgttaatgttatatgtgcataaattccttttgctcttaatttgattttaattgtggcatttctctaatgtcctagttaaaccattttttccaaaaaagaaaaaaaaacctaagccctcatttcttccgtgcgatctaaatagttataagagatccttcaaaaaattagaaaaataaatattgtattgggtgtcttagcctataaaaacatgcataatcaaactcgtctatatgtacggacgaactaaaacaacaatccaactactttggtgccattggaattgttattttgtttctgcgtgtgtggattaaatttgaatttacatgttagtacatggatgtatatgacatgattatgtatttcaattcatttttaaatttatttggaccatgtatatgtgaaagcgtaagattaggaagctttgtaataaagttgagggaatgtccacaatacctaaatttagacagatccaatttaaaagattttataggttcattaattaagacttggcagaagaactaataagtttctctaacagttaaagacccttaagatcacaaaattaatttcatttcaaaattatttgcaaaaggatatcaatttgtaatacatgaagccatacatcgttataagcaataattaaggacgaccttataagatatatatataattctccatagtgtggtagtacgtactgcatcagaatatatgctagctatgtacactactagcctagtttacacgcagtacatgtacgtatacgcccgttgtgaattgatcacggtgtgacgactttgagccatggatagctgtatatataacgatccacggatcggagtcacgcgccagccatcgctagctaagctgtgtagccccacagaggcaatactaacccgtttgggatagaatttttactggattattactatttactatcaatttcattataaaggtaaaaaatattataaacatatatataaattttacagataactcagaacaattggtctaagcaatacagtagattttctaaaggcattcatattttttaaaaaatatgggaaacgtgtagtgtaaaacaaataatcggtgtcactgattcgatgaagtatatgaaaacaacatggcccactgtaaattagggggtgtgtacgtgaatggtttagacgacgcgatgaggcttacaatcttgtaaatggccaaaaattcagaaattttaggggtcaccaaaattttttaaaaatattaaaattatttaaattttaaataaattatgtctgaattctaatatattttggtcagctcataaaaacttgaagaacaaaaataaaataaaaaattcagatgggatagtttcttttttagataatggattagattaaaaccggcctatacaaatttgtggggcgagacagtttcatgcccagaggatatgtgaaactaccgaaatttccatcctagcacgatcgatcaagggattggaaacctctgacgaacgtggtgcctgacatgtggaccctacctctcgcgggcccacctatcaatgaccacgtcaggggaagttcacgtcagatggtccctttcctcgatcgatcgagttgatcgattggtggcaagtggagagcgccggcatgcatgctgcgtcacgtacgtcggtgacatcgatcgtcgttgcccatggatgcatgtctgattagctctaagctgcggcgcccatggatgagtgagcgagttagtgaccacaagtccacaactgatggacccagcagctagcttagctgatggagaattaacgagacgagacgagctagatcgacgtgtgagatgacatgagacccgtgcaaagacagaggaaggcaggcacagcaaattagctggaaagaatgagagagaaaaggaggtatctagccggccagttaaccccccaaaaccgaccggtacgtagtgcacacgctgccagcttaaattcctcaccggacaccggacaccggccaaccagcaggcccctgccctcctccgtgctccctagagctatcgcatttaggcctggtttagttcttaacttttttttcgaacttttaattttttcatcacattaaaacttttctatatacataaacttgtaactttttcatcacatcgttccaatttcaatcaaactttcaattttaacgtgaactaaacacacccttagctaattatccaagtaggtacatgggggctttgatttcttgtttccttttcctttcccctttccccgatgattcttgctcagccaaagtgtcaaagtgatatatactctgtgatttatttcccgtgaaactaatcgatccatcgagctaaatcgctctctagcacattggatcctgctggtatatattctaccattctggtgcgctcgctcgcaggtgaccacaattccgctaaaatcaatcaaaatgcactaacctatagccagcgcgccctcctggtccctggggagtagtgcactgtggtggtggagtagtactccttaaatttgaacatagtttatatttagattaaaatttaaaagtgaaattcttttgggaccgagggtgtacgtagctgactagctggtggcgttgccatatgcgtacgtatctggttttgcttagctcaacgcagtaaatgagagctacgacgacagctgagcagggagcaaaggagggaacagagagattcagagatgcaggtgtatggccctgtcctgccctggatccgtcaatcgacagccgatgttgcctggcaaatgtcacatttctttgcaagttactactccctccgtttcacaacgtaagtcatcctaacatttctcatatttaaattgatgctaatgaatctagacatatatatctatctagattcattaacaccaatatgaatatgagaaatgctagagtgacttacattgtgaaacgaaggaagtagtacagtaattaggatgggaagagtacgcacaggagtgtgtttagttcctgaaaaacgttagaagtttgaagaaagttaggagtttgaaaaaaaaagttaaaagtttatgtgtgtaaaaaagtttttgatgtgatatgatgtgatggaaagttaggaatagggggaaactagacacggccatacatatcgagaattctcgagatgtttcattcattcattaacttgggctgtagtttttacttgctgtccattagccatttgctgcatgctggtgtactcatcacatcggttttccgcctcgcctggacgacagccggctaatccccatgcgcgattctccagccggtgacagctccgtgaatttcgaccccgtgtacttaacaatacttacccctgtttgcttttattattaaacttctgatacctaaaaatattatgcacatatgaacacgccttcgttttcaatcaaaaatttaggtaagagagatttgttgtcggccttcatctctctaggtatgtgttcggtgcactactggtgggtctggtgtgtatctatgtgggtacatctctcatgtcataaggaaaacactacctcatatataatttcttataaaagacaatatttaaaacccaatgtcagtttccacttagatttgagccttcaacggataaaatgcatactaatatcagggcgatattcttttaaaataaaattaactgcgtggagattgaatttcgaaaaaaggccggtactatatattgccagtgtaatcatctgcttggaataaaggtggtgtacattcagagtgcactctactgttactactacaactatacaagtacttagatatcttaattgcatgccaatacaattatacaagtatagtatagtagtactagaactagtacacagtagcacataggagaattatagacctttttatggtcagacacccaccgactatatagtagaaatttctggattatatatagtcggtgcattgcataagcgtaataatattcaacagtatctgccgcctaactactta

SEQ ID NO: 8489 - DNA, 24878 bp, Oryza sativa
ccgccgcgtcgagtcggccgtgacgcagctcactcagctcgtcagcaacctcctcgccatgcacaagaagctccgcgacatcacgccgcagcaccaacaccaacaccaccaccaccccggcaacaacaacaacaagaacggcacagccgacggcgccgccgccggaggggatgacaccggcccgtcgtcggatctaccgccatgggtgacggacgtcgtcaacgatgtcgaggaggaggtcacggcgacgcgcggacgagggaggtcgtcgtcgtcgggaaggaaggcgatgcgcgtggacgtggtggtggcgcaggacgggagcgggcggtggcggacggtgagcgaggcggtggcgcgggcgccgagccacagcaggaggaggtacgtgatctacgtgaagcgaggggtgtacgaggagaacgtggaggtgaggaagaagaagacgaacatcgtcatcgtcggcgaggggatgggggagacggtcatcaccggcagccggagcatggccgccggctggaccaccttccggagcgccacgtttggtaaattctagtgcaccgcagtgatttaatttgtctttttgctaattactcctacttttgctactcattttggttacacactcgttacttcgttagtattcatatacgaataccccgctgcgttgctgcaaaaaattaagatgcatatactatatacaaataaaatataatttaattaaaaactaaaacaatttgatataattgagcttaaaataattgagattgtagattttttttagagaagaaaaaagagacaatttagactatagatctatcatccaaatgctagaaataatttaagtgatgtggtttaatgagagaagagaaaaatatcattaactatacttagtgggatgaactatatgagtatataggattagaccaacatgatcgccaaatatatagttttgaaaggctacatatatccagttggatatagaggctgggtaaaaaaatatcattctctaaaaaataaaaaaaataaaaatatagttttgaaaatatttttgttatttaaacatgtttgcaaaacatatagcccaatacctatgaatgtatatcaaccaaaagtcattgattcgagagtattgtatagaaccatgatatttgtggtctcaaggttttactaaacccttcacttttagcaagaaaatacggagttctctaaaaaaattagtgataaggaacatcctttatactctagaacaatcataaaagcgatcatacgtgcatgtatagcagcttatacctttccagcctattatctactcctatagatcgaaccgaccgaccacaatcgtgaccgcatgcaaaagtgcgcggcggcacccagtaaattagccgcacacgaaccattatgacagcaagattcacgtgtgctttgcttgcatcaagccctcatctaggctggcagataaaccggctcgtgcatatgcatgcgcgctaagaaaagaatatccttagagcatcaccaaccgtctatctatataattccccaaaactaattttgagggattttaatccaaaaatcagctccaacagatcccctactctcctacctgagttttggagttcccttcccccgattcctcgctccgtttatatgcggacgcgaaagtcgcacccaatcacgcaatcccgcctctctcccttgttcccgcgtgtggaaaatagcgatctttctacgcgtgaaagaaaaaaaacagaattttctcttggtagtttaacaaaagggtccacttttaagttttggggattaaatttaggctatctgttggaggaaggagttttttcacttcctattttcagtttagaaaacccaaaaacaaatttttaggagaaaattatagataatctgttggtgatgctttaagatgtcctcttgcaaaaagttttccatcctccacatatctagggtttgtttgttcggtttattccggactattgactattacgatgtagtagaattaattattcccttttcaaaccccctctaattcatgctacttagggattaaccgagcaatgccttagagttgatgttgtacttaaatttaaaccgcggcacaatgaaatcaaaacataaatttgaatgagattttaagtggagttaaatttgtacttcatccgtttaagttatttgaccttttcttagtcaaacttttttttaagatttgatcaagtttgcataaaaatataataacacttttaatacaaaataaacatattatcagaatatatccaatgttaaatttaattaaactaatttggtattatatatgttattgttttttcttataaatttgatcgaacctaaattttgactaactcaaatgttttataatataaaacggagggagtaactgaatttggtttgtgtgtgcgtgcgtgcagcggtgtcgggggcggggttcatcgcacgggacatgacgattcggaacacggcggggccggcggcgcaccaggcggtggcgctgcgcgtcgactccgatcgctccgccttcttccgcatcgccgtcgagggccaccaggacacgctctacgcgcactccctccgccagttctaccgcgactgccgcgtctccggcaccgtcgacttcatcttcggcaacggcatcgccgtcatccagcgcaccaccatctctaccctcccgcccgccgccggccagaacgccggcagcgtcacggcgcagggccggagggaccccaaccagaacaccggcttcgccctccatgcttgcatcgtggaggccaagtacccgacctacctcggacgcccgtggaagcccttctcccgggtggtcgtcatggagtcctacctcggcgcaggtgtccagccgcgcggatggctggagtgggacggcgacggcggcgagctcgccacgctattctacggggagtaccgcaactatgggcctggcgccaacatcggcggccgggtgcggtggcccggataccacgtgatcatggacgccgccgtcgctgtgcgcttcaccgtgcggcggttcatcgacggcctcgcttggctaccctccaccggcgtcaccttcaccgctgacctcaacaggaaatgacgacgtatacacggatgcagatgctctgattgaacttccccctgatatgtgggcccgcgaacggtggggcccacatatcagtcactacgttcctctgactttacgtcagagaatcccaaataccacatacacacacaaaatcagttattcatttggtttggttaattataaattggatatataccagaaagaatatgtttttttttgaattaagtatatactaagctagttatacgcatagctcatatatatggattcatgtaattgatgaacaatagatatatatacaagtttcatgtgaacatcctccaaacaaaaatttctgggagtacttttttaggtctatattaaaaaacttccgtaaattttgttggtgaaaacgtttaaatgtaactacaatgtcatttatagtgtatattttgatccttgccctcgctcgatcctgtcaatttttattcacccaccctagcacaaatcttcaacatctgacggttagaaaatcgcaagtttttttaaaaaaaaatcaccattttttttaaacaaatcctttttttttctagagattttggaaatgtattagaacttgagaaaagtggttgcaaaatcatttggtcaaaggaggcaaggcccaagaaaagtctaaggcccaggaaaagtccaaggcccaaggactgccctgaccctgacacgcgccaagctgttcctccagtttccacgattcttcgtcgtcttctctacttctccctctccgccttcaaaagcgacgctctccacctgcgtcctcgtcatcctcccctagacagacaaactccagctcctcctcctcctccgcgctcgagatcccgcctccgcctccgcctcccccagtcgccggcgagcaactccggtgaagcgcgagctacggattaaggtgcgccctccccctcctcctcctctcgctaccgagcaagtggtcacggatcttggaattggattggattggattgttcacggatcgggggatctcatctcccccttgtccccggttggatccaactcctcctcctgttgttgttggtggtggtggtggtgatgtgagggggttcgctccaagcataggtagatctccccacctttgctgtttgtttgctcgctccccgggtcgtcgtcgcctcgcgcggacccgatctgatcccgcctagagcctcgaggggggatggtggatcatggggggggggggagtggtgagaggatctgtctctgtcttacggattgtggcgtggagcgctgttctcgtgggcgtattacgtatttacgtgttgccttgctttgatcccatggattgttttgggtttgggggggcttcgctgagatttggagctagaattttggtagtggaatacttgcttatgtgccaaacaggttgattatatactgtgccctccaaatttcgctatgaacagcattggggaataatgtctggtgatttgaggcgacatgctggtgtagattacactcgtgcggtggattacacctaaagagcaaatggtccatatgtttgttgctgctagcatgaactggagcaagatagagcttgctgttgtacttttactagcgaaaacgtttgctgtctgcaaacctgtttatcacataatcacattgttacatcctcccccaagttattcttaatgatttagatgttttttttttcacataacatttagatttatctttcctcgttttaatctgtcagaagcttagtatcgtaattggcaagatgaactttgtgtttaacccatgaatctcccttgaaattgtgagataccccctccgtttcatattataagccgctttgacttttttaaagtcgaacttcttgaaaatttgacaaagtttatagaaaaatgtagcaacatttatagcaccaaattagttttattcaatcccacattgaatatattttgatagtttctttgttttatgttgaaaatattgctatatttttctataaatttagtcaaagcgaaagaagtttaacttaggaaaaagtcaaagtgacttataatatgaaacggcggtagtagtatttaatatttggtcaaaggagtcgtggcttgtttggatttcttagtgttgctgtgctgttgtcagtttagagaacgaagctcaagtaaaggacaaatgaaccactacaattttggtccatctttacgagagtgactgctatgcaagtaatacaagtgaatcatgtttacctaaagagctcttttaggcttttgcagtgctccacactctgtgtttacatgtccacttttgcttgggttaaatgtcagcctgtccttttaccttgttcctttgcaatgtcctttgtttaccttgttcctttctaaaatggatatgttagacaataacaaaatgaaacgtcaaggttctctactgcaagctccatagcttatcacgatgattagtgtgccttattgtctgttgtatgacactgggtgcgattctggtacagatacttatatgtcaacatacttttcctaataattttgaccaaccgatctgaatatctagtgacatcctttatgaattaggcatttcatcaaactgttagaaaggtgagcagtatattcttgtcacaggaaggtactacgccgctgtttatttgtataacctgatgtgtcttaggaaatcagttgttaatataatctttatgcagttgattacaaatgaatcaaattctttcttttgtgtttatgatgttcagcgaaaatcatggtattctttctatgtaatcttgtaagaattctctattctgattatagtcttttttattggcattatcagaagtgcaccatggccaaggtcaagccaaaggcactgctggcacaaagcaagcagaagaagagccccactcaaattggcgcaactacaataatcacctacatcgtcctgggagcccttgtcgtctcttccgtttactatgctctcaaatattggcagaacagaggaccagcagcagcagaaggcattgtgggcaactaaggcagctgtgtaaaatgttgttgtatcatcttgttgggtaattttggttgttacagttcagtaaatgaaacatagacagaaggcctcatgttgaagctttagttttatctcctggtaaattgcattaatatttatttgatatgtcgttcttcgacatggatgactctgttgggccgatcttgttaagagtgacatacatgacagttgcagctgtgaaagttgcatgtgatgccatcaaaacgctgattaagaagctttggtaaaacgttttcccatctatgacatgccattatcttctacttcaatagaatgtcatatcagctattactttgctttctctcagatacgtattgtggtgttagaatatcatatcagctattactttgctttctcacattcgtattgtggtgttatagtttggtattaagtcaacctctctaatttgaccaaatttataaaagaatgcagtggcacctacatcatcaaattattttccttaaaatctaacatgaaatatgtcttgataatgtatttattggtagtgtaaaccatgattattttttatgagcaaatttgacaaaaccacaattaatatggatcaagttgcataacgataaagattttgacgcaggcagcctataggttttatggtcagaacatttcacaaaaacgtactgttgatctctctaaggctatgtttggcattccatgttaaaaaaaaatcctcccgacgtatcaaacataacggtttattaatacatgatcaattaagtattagctaaaataccttaaaaattggttattatgatttttaaaacaactttgctatagactttattttaaaaagtaccattcaaaaagcgtgcgtgcgacaaacgagagagtaaaaattgggaaaagggatatagaacttagcctaactcaatattgtagcaaaataataattaatgaacttagttgctactacaacttatgtatgatggattagaggacttataacattttggatataagtttaaaactcatacaattgaagaaaaatttattaacagcatgattttataaaactgtaggactccataatatcgtaggccgaaacctctctgattttatgcaacatgaaccataatgagttagggttgtgtttagattcaaagtttggatccaaacttcagtctttttccatcacttcaatctgtcatacacacacaacttttcagtcacatcatctccaatttcaactaaaatccaaactttggatccaactaaacacagcctaggttttataaatatcttttctgtaaacttgatccaagtttaagagcttcaacttagaaaaaaaaacaccttacaacttagaacggatgaagtattaatagtttacaagtgatagaaagacattcagatctcagtataccttattaacatctcatcaggataattgatagtctttgcttgttccaacagcacatcataattcaaggtgattttaaattttaaggtttgggtttttaaaaagctctttaatttatttgtcatcttaaaaaatcatgaaacaagagatataggcaaagaaataaaataaagggatgatgaaaacccataaatgttattcctaaaactttaaatcagcttccggctagtataatccaatgctgaagcatgaaccacctatgctaaagcatgggaatttagtactagtggctaccagtggtccagcgtgcccaaagccctgatttttttttcactttgttggtttagtgtaatcatttcagaacgaaccaaaatgcacgaacagggcagtgcagagtggcccctcatccaaaaggaggcaccccattcgggttttgccatttgtgtagtctccctagtctcgtgcgatcaatcattgacatatcctgtctcgtgatcttttaaactagccactctaacagtacagccaactattaactctatctattattgtatcgtccatatctgatctaataatctacttgtacaatagctaattatatattcaaactatacctttattgcttggccccgctccgctctatcgtatttttttagctcgcgtgctacaactgactataaatatatagctcgattttcttttctattttaactcagacacgaatttaagataatggcttctatagctcacctacgtcaccatatttatattgcacttactttaatcacaaacagacactacattgtagccgatctaaaaggtacagatctactagctagttattaatatatatatactctccgtctcaaaaataacttaacctatagaacatgatttatcctagtaaacgaatttggataaaggtttgcttagattcgtcacgtcctatcctaggttgggttatttcgggacaaaaagaatactatttcagcatatgtagaactcgacaaaactttaacaatatatatttttagacaaaactgaatatataattttgatgtattaagtatagttacatataatgttttagaaagatatgaaccgtatatactccctccgtttcatattataaaacgttttgatctccccattactcgtattcacttattcactgacacctgtaaaaaatacatagattaatacaaaattattcaaaatcgaaaatgacttataaagtgaaacatataaaatatgttcgggcttgtgtgaggttcagcttaagtataagccaggccacaaatattttgaatctctagaattaattttagggcattttcctttttttaaaaaaaaaaatagacttggcttttggaccgttgaaaacacaggcctaaaaggtactagtatatctgaaagttattattattattattactttggtcatatatctttggtttatacgccataactttagataatggttttcaagcataccttatccagaacaatgacatgtagtgtagtatcattctggccgagcgaacttcgtcatgtccgcacatttgcgtggaaatggcgtgcgttggtctccggtcaccggttagaagtacccgcgtgatcgctaccgcttggtagcctgcaatgtccctttgcctgattgcgaccgttctctcttctactcctttttttttttcttttgagaactctcttctactcctaactcctctctaccttccttgctatagctagcttccatgttgctgctagtgatgtttggtgcacccaaccactttcaggatacgtgtcccagctgtacttttcagctaactgtagtcttcgtgcatggtttcgcaggtcagacttttttatttggtaaggaagtttctctaattctactctctctgtcgaaaaattatgtgtctagattcatcgtgtatagagtttgactctttcctagatagatccgtctaaaaataaatcaacatttatacataaatctagattagcctaccttcagtatgaaacttggtttattttttagatagaaggaggagctaaaacccaattgcatggtcatgtaaatatctctctactctttttctttgactatgttatatgaagagatataattactccaaatttacaaataagaacaggttccctccatcttaaaatgtatctatttttagaattcaaatttgtttaaaaattttagatgtttctacctacctctgtctcaaattctcaaccaatcatacctatcttccatttaattcttcacctatttttttcttctcaactatttacaatattgcaccattcaatttttacacacttctttaattcccctaaaaacatctgaaaatgcttaacttttgaaacgggaaagtaccaataattacttcaaagttaattatgaataaatataaggaatccatactatgtaccagacaagtgtactatttgtccagatacatattctagatcccttatatatgtggttggaagtagtagatgcaatactacaatctagctaaaagttatttggattttagccttttctctttttctcccacttctctatttaatttgtatatgttgcagcgcgtctaaagctgatgaaaaagtgtggtaatgtgttataactcactattaattgtatatactctatggagtatgttctaagtctacttcttccgtccaaaaaaaactcattcctagcatttcaagataaaaatagtggagtgagaatgactaaaatgccattaatcattgaaaaaatagtaagagtgataggtaggtaaagggtattgaagggataaagcttctcgttttacgtgctgagggtaggtaggatgatagaaattagttttttttttataaaatttaaactctagaagttgctttttttttggacggagggagtacaatagattctatttttatggttaactataaaaacacattatttttgttgtgcaaaaaaaaagatttatgctactccctccgggctgataatacttgtcgttttagataagggtgaggtcaaactttagaatctttaattatgaatcatttttaaaatatttatctttcaaatatagtgactacatgtatagattagtcttaaaaagtactttaataagatcatatatttgttaacacttttttacatattataatagaaaataatggtcaaagttgtttttttaagaccgcgcccttgtccaaaacgacaagtattatcaacccggaaggagtatatatttatcgataaattttcacggtataattatagtgtaattatattgtaagtacaatgtaactttcaggcacatctggaagtaaaggaatggcttaatatttcagaacgttcaaccttcctttcaagtatggagatcttttttttgtcaaagaagttcttatgcatatgtgcagaatgaaagatcctttaaaacaaactgtttttagttggttacaaaccttatagtcttcttgtgtgacctttatgtaactctgtaaccttgtaaatattttctttttttataaaactacactgctgggcaaagccctggcagtatttccaataaaaaaaagtaactttcatattattttgaatcattataccaaacgaggaagaaaaatcatagcgcatcgtgttaccgtggatttttaaaagttacatataatttatattataattaaatgcaagtcataatatcatggtactaagattataaaatttatcaataaatatgtataaatatgagggaaaaaattccaagaaaacgggtgctatgtaatttgcacacgattagttaattagctggtcttgaggtcttttccgtggtcacctcagcgaaacaaaaaagaaatgacttttacgtgcctttgacactgtctcgtgcttatccgtacaaaccatgcgtcgtccgttgtcgacggaaacaaaattacgagctggctgtcggctgtcgccacttgccaaaataacaaggacttcgcatttgacagatggctacaacataaatgacgcaaattaaaggagacgttccagaattaaccaggacaacacacacacacgtaacaataatggtttgattgttcaataaaagaaaaacgctaattggattggctccttttaccgacggatagatggatcagccgtcgccatcgcctgtctctagcttcttgccgacgtcctgtagaactcctaagaaaaaaacatcaacatcaagaatatcaaaacatctaatccctccttctcattttaagcacagctatgagtttccttattcaactttaatcgtccgtcttattttaaaaacatttaaaaaaattaaaagcataagtcagcataaaataatattaatgttttattatctaataaaaacaaaatactaataatagagaaaatttcaaataagacggacgatcaaaattagacacggaaactcataggcgtgcttaaaatgggacgaagggagtatccttttaaaattaatcttgattggtcgcatatatatgcaggatatttcacaatgcacatttactctttatataaataagcaaatatatttttttgtagatggtgatatttttaaaaaaatatctcaaaaatcttagataataattaaattggtatagagggatcacggagaagagccgtaagagactagtgccaattcatctatagctaattcatataatagttgcttactatactattaatatataatcccacctgtcatacacacactgtgtcttgaagtccatgctgcagctggctacagatctgtagcccgctgctcttctctcccatcttttatctcattaaaatatatttatagctggctaataatctactattgtacctgctctaacgctgctgcctacggctaccaacatcgatcttgctcgtgtgtatcctggattcacggtgacataccctttttgccttttttatgttcacgctaacatcggtttatggccaccgtttgcttaccgaggctggataaagttggagcccatcgattggtctaataaatcaaactaaaaaataaaacttaaattttcgaacatagttttttaagatattttcaattttaacttctctatttagattcgtagtactatgatgtatcacatctctttaaaatcctttatatatattatgggacaaaggagtatataacataacgagtataaaagctaactcgatagtttctgggctgggagattgtcctcatgcacatcaataatcacttcatgcacatttcccaagccagctaggatgttggtttgcccaacccagatcttctcgccgtatagatttggccatcgagagtgacacaatagtaagggtgtaagtggctagctagcccataaaacccacttataaaacaaagcaaaccacttacctatttatttggatctatgagtgggttcatggattagccgcttacacccttacaaaataatgctcatgaattcgtttattgcagaaggccatcgctgctttcttttgatcgtcacatactcacattgagtcgataaacatcgttgcgatacaatggactggtatattcatctgaaccatggcattgaaaaaaatcagttgcaccatactagtgagtcaaaaaatggtacaagtttaataagtatatatagatggaagtgtcatttactcaatccaccctaatttatatctctacttctataaaagagagtaatggtagtgatgagtgatgaatatatcaccatctacagcagtaactctatacttttaaataaaaaggaaaatattataggccagaggactcatatgtcaaccacccctaccaccacattccaacttaaaatggaaaagaaaaacgacagtgtgggccaaaggtcctacaacttagtagcaaatatatgtagaaattaatagatgatatatgtcaaaaatgatgctaataatgggtcaacaatcattttatttgaattaaaatcttgttgcaacgctgacaatatgctactaataatgcttcgagggatgaagaaaacctatagatttgattgctttaaaagcaaaactttttttttctctttagtccactcccttgtgtagcggagcatgggccctgtttggagaactaaccaagagttattttaagagctattttttagcacaaagaaatagccctacaataaaatagccataacttgtttggatccaagggttattttgagagctatttgacctttaatgcacattcccatggagagagaagccgcttttcagtgagccccacccaaatagtctcaattagcacctcttgaggggatagtttttttggtgggttatttccaaatagccctgaaatagctcacctgtttagaacttttagattatttggggctatttgagagggctaaaaaatagcccagggatccaaacaggggcttggtgtcgccgtgtcatggaaaaacccgtccaaaaagcatccattatccatatcacggtaagagccttgagtaaaatgaaaacagggacaaaaaaaaaaaactggttggtccaaccgatccaaccgatcctacatggccccatgccacgctatagccaccaagtaaaaataataacaaaaaggaacatatgctatatctttctgcaacgcataggtatattgatttgtttagacctgtttagatcaatttactatggcaattttttttaaaagttttattggtaaaagatttggtattacaatttcataagttggtatttagatgcatggtaaagtttcgttattaattgctgctgcctctctcgtgcacggggcccgatgcttttttggccaaatttgctgctatggacttccaaataacaaatgctaacttgcctaatttttgctactagtgtttagatttattttgctaaaaagtggtcctaaacggtaaaacttttgtcatttcgaaggatctaaacaagctcttaatattctagtgtctataaacatcacctactcacaaacgacacttttaataagaatttacattttaatgatatgataaatttagtgatggtctccgtctctttaaatgtgtgttctggaccatattgatggggtgtatgatgtactcattttaagctaatccatacagttcaaaatccgtcttgatttttatctcattaactacatttaatccataagttgataagatttatcctccgttattccttatatatgcctacaccgatattatactttcttaatgagtagctattttagtttttcttaataaagttatcttttgaattaggagcatgcgtgtgtgtgggtaagaagaaagtgcagagtaaaaaggaatagagaaaaagggcaggggagtacggatccccgtgaagctgtgaagcgtccacttgcttgcacttgcccaaagaatccgatggccgtagaaaattttttaggttttgttgtcacattaaatatacgaagtattaaacgtattctactagcaaaataaattatatattccaccagaaagcctaattaatccgttattaacaaatattttactgtagcatcacattatcaaatcatggcacaattaagcttaaaagattcgtctcgcaatttacacgtaaactgtgtaattgattttttttcacatttaatacttaatacatatatccaaacattctgtgtgataggtgaaaagtttttgttctgggaactactctctccgtcctataatataagagattttaagtttttgtttgcgttgtttgaccaattgtcttattaaaaaaaatttgaaattattatttattttttgtgacatactttattattcaaagtattttaagcctaactttttattttttatatttgtataaattttttaaataagacgagtggttaaatagtgtaaaaaaactcaaaattataggacgcaccccgcctcctggctgtccttggttgcccacgcacgaccgtccaccccgcaaaaggataagaaaaaaattgatcgacgagacacatcacaagtgggaacattttactaccagtgacagtgagagactagcgtcgcgcacatgcacatcttgtgcgtctcaccctcaccggcaggttaccgcaccgctgctaggcagctaggctgctcttgtcggattttttccatgaaaacgaatctcttcgtggccgtgttccgttacttttaaaaaaaattaaaggatacggacacacatttaaagtattaaacgcagactaataataaaacaaataatagatatgtattaagcctaattaatctatcattagcatatgtttattgtagcaacatattatcaaatcatggtgtaattatgcttaaaagattcgtctaataatttatatgtaaactgtacaattagtttttttcgtccatatttaatgtcttatgtatgtgtttaaaaatttaatgtgatgaaaaaattagaagtttgaagggagacacagccgtagccgcatgcgtttgcgcgagtgcacagctactcgcacgcagcgagcagcgaccccgcgaaccctcctctaccagcacggacggcaaccacgttggagtagtagaagtagtactcgtacgtgctgggtctgtgacgcccgcgtcttgtcgtgtcgatcactcactccacacccgcgcgcgtccgtccaccaccacacccaaccccgcgaatcggcgccccgatcgaaaccgagagcgttttccttttctctttcccgttttttcgccgctcgcgcggcacgggcaggtagtagtacgtcgtcgcgcgtcgcggttgggggcttggctaccgcgcgtctcgcggtttcgcaccggcgcgagcgcgacgagaagagaggagcgatgcgacgagcgttgcgttgcggtttttttgcgttttggttgggtttggatcggggtggggggtggggggtgggggcagaggcgcagagcgtgtcggctagcgtacttgcccgttttcatatttcagctgttgctttctcggctggagtcgagacttttcccctccacatgcctgcctgcacgctttcctggctgccatctgcaccacaggccacactgcatccgctgcccggcacagacttccgggtgggtgcaccggataataaaggtatggttaagccaaagtagggagtttgaatccaaactagtacttctctatcacatcaacatatcatacacacaactttttagtcacattatcttcaatttcaaccaaaatccaaacttgcgctgaactaaacacagcctagggcgttatcattaagaacaattcttttaacatcgagtttagttccaaactttttcttagaacttctaatttttccatcacatcaaaacttttctacacacatactcgtaaactcccaacttttccgtcacatcatttcaatttcaaccaaatttctaatttttagcgtgaactaaacataccctaagatgtactctctccgttcaaaaatataagaatctaaaatcggatgaaatattttctagtctgttcatatttatagtattagaaaatatcccatccgatttaggttcttatatttgggacgaagaaagtatattttattttagcttccgttaatatattttttaagctactaaacggtgtattttgtgcgaatactttaagtatagaagttgctctaaaatattaaataaatttattttttaagtttgaaatattaaaattcaattaattatatgctaatggctttctcagtttgcatatccgtatataatctttatcttcgtcaaatttaaatgggtcttaacaaacatttcttttctctgcttcagcaaatctaaacgtcggccctgtttggatccatgggttattttttaccctccctcacgtagccccagatagcccaaaaattccaaacatgtgagctatttcagggcttttttggaaataacccatccaaaaaaactattcctctcaaggggtgctaagagcaagtttaatagtatagccaactactagctccaaatcatttatagccaatgaattcatagaatagttgcttactattaatacatggtcccacctgtcatatacatattacgtcttagagtccatactgtagctagcaacagatcgtagcccgctgctattatctctcttcttttatctctttaaaatatatttatagctggcttatagtatgctattgtacctgctctaattggggctatttcgggtgggcccactgaaaaaatgtcttttctctctctcttcgtgggaaagtgcattaaaagccaaatagctctcaaaataacccttggatccaaacaacttatggctatttcgttatgtaaaaaatagctcttaaaataactcttggctagttctccaaacagagccgtcagtacgtgatggggctaaagtcaatgttttcttgggtaagtcgaagacattatacttgtagttgtagttgaagggaattaaaggacggatggttcggaaaacagatgaagaatggtccaaagaaaagaaaattaaagtcatcattcggtgccaaggtcatgaatatcagttgaataaataaacaccgaggcatatggaaaaacgataaggtaaatttcaatctgtagaattatactctctccatctacttttgataatcatatttccaaatctaaaaattttatttttaataggcatatttttattggtatgcaatatttatttttcaatgaggggcaacaatagctgccaaatattgtaccggtatttataagtatttatttattgagaaagaatcaacgactcgcagatacattatggatgcaagatcatagcttgggtaaaactaggtcctagcagcttgattttcccaagagtttgaactactaccaattggagcaataaggttatcatgggctcatggccactaatctaccaaacggtccattggttggctgaaatgaattcaattttcaaattttgatttcaattcacagcctttcaaccgaactactccctttagttattgtccggttattaccagttggttactcaacaacttaggttggtagtggtttgtttagatgggaacaagacagaaggaaggaacatatgtagcgtaatgcgtatctttgtttactctgtttgtttttggtcatcaaggacacgagcgagttacaaatggccatacgagcaaaaatacaggcaaaacgccctctgcttacgtggtaaaatgcgcgtgaccagtttaaaatatgtacagagcacatcgtaatactctctccatcccgatttggcgatttgatcatctctaagcaaatgacatcaagaataagggcatccaaatactccctccattccaaattaatctatatatagttttttttattattcctaaatgatctacatatttattcatttattaagcctattcgttatttgtgcattggagtaaatggacattgatacatgcatccatgcaaacaagtatttataacccacatgcaatatcttgatttactattggctagaaaatagtggagatggtgcatacattgctagagtaaatatagtatgagaaaattattagcttttcttggtcttggtgtacctctaaaatatgtatatcaatttagaatggagggagtattcatcattactccccccgtcccataatacaagggattttgagttttagtttgcattgtttgaccactcatcttattcaaaaaatttgtgcaaatataaaaaacgaaaagttgtgcttaaagtactttagataataaagtaagtcaaaaaatcaaataattattctaacttttttgaataatacgagtggtcaaacagtgcaatcaaaactcaaaatcccttatattatgggacagagggagtatcaaattaatcctcattggttaaggtgcttcatcgcttcatgtcctgtgtattgctcatattttaaatattgcataccattacacgaatagaaattattttttattggtttcatacaacaccatttaatgatgcatatttactctttgaaaaaaaacactttgttaaatgatgatcattttgagaagacctcaaaaatcttagaggatgattaaaatggaatggagggagtaataagagcaggtacgataacagactataagccagctataaacacatattgagaagataaaagaggaaagagaagagcagcgggctataacagccagctgcaacatagactccaagacacaatgcatgtatgacaggtaagaccatgtattaatagtataatactctgtatatgcttatagataactattgtaaatcgaccatagatgatttagaactaataattggctatactattaaacctgctctaattaatgaatcaaactgtcaccaatgaatgaaattagggcctggtttagttacaactttttctttaaacttccaacttttccatcacatcaaaattttcctacacgcataaattttcaacttttttcttaaaacttctaattttggcgtggaactaaatacactctaaatataaaatcctgggcaataaatgctcgggctaaaacaaggatggaacacgtcagcgggtccatccctatctcactcggtcggtgctagtactgcttccacgagatccatccgagcagcagcagcagcagtagccgccgccgatccgagaaaaagaagaaaaagaaaaagaaaaccagcaaccgaagcgacaactcctctcccgcaacttcaccgtctcgtctcatctcatctcgtctcgccccgctgtaatctcgtaccgcgtcatctcgcggagacgcgagaaaaagtccgcgcgcttctctctctctctctctctctccctctcgtgggccgctgcccgcacgtcgcactcacgaccggacgccagctcacgaatatccacccgatttaatcccgcccccttcgattccgccgctccgcgcgtatcgcataggcgagttgtcgtatcgatacgcgcacccacttatacataagccgacctccttatcgtagataagcaagtgggggtggcgtggggagagagaaaagggcgagaggtctgcaacgcatcgaagaaagcgagactaaagtttctctctcctctcctctctctctctttctttctctcgcgacctcctcctccttccacatctccgtctctctctctctcatcacgaggggaggcggcggcggcgacggggaaaccctagaattcggcggggtgaagcggtgaaggcgcccgcggcagatcggagccgggaggggggtttcagcggcggcgggggggcggcgccatgtcgtcgctcagccgggagctcgtgttcctcatcctccagttcctcgacgaggagaagttcaaggagaccgtgcacaagtgcgtagcctttctccctcccctgcctctctcgctggtttcttcgttcgccggttgggttggaccgtgggctctgtttttttttgggtgattcggtgggaggttggttgggcgcaggcgactctgctttttttgggatttgtttcgcgagtgtttgtgcgtgttttttttatctatgatttttttttgcgtgatgcgtctccagattttttttttagttttgggctttgagttccatcggaaaaaaaaattcgctctgtttgatctgttaatatgcaaggaaattttttccgaagttttttttggctggtttggtcaaagtttttttcctcgtggttttctccaggatggttgttagtattttatcaatttggtcaatatcaatttttgggggaggggctctggtcatggtatttttattttattgggatagttgagggggagatttgaaatttcgagctcacatgcgcctctttttttttttcgctttgccttgttcgggaaaaaaaaacttgtctgttttttttatcccgaatcctattctctgtcggctgcttaaattcgtctgaacaattgaatctctagattcaatgtgattaagtcggtgattggttttgtcattataatcacttgtgctgtgtcgactgagccagtaattgtacatgtcatttctctggattgcatcaacaccgtcgaaataattgagaattatttacgaaaatataaccaaattttaagcaagcagtcgggcaattataacttacaaagctgttgttgaacttgtctgaacttatgttctgtactttctgtcgtttctgctcaaatttttacattgtagactttatagtggcatacggtaggttagtccgaattagagtgtccagcttgacacccgaaggtctccgtcattgcaattgagctctgctgtcactcgtttactgctcattctacgaaaagatggggaaaaaaaatccttcaactaatgttctatttccttgtcacgactattatgttggattcaatggtacatttggtctagcaaggtgtaatttcctaatatggtacattctgttttaggcttgagcaagagtcaggattcttcttcaacatgaagtactttgaagagaaggtccatgctggggagtgggatgaagtggagaaatatctttcaggtttcaccaaggtggatgacaataggtattctatgaagatattctttgagatcagaaagcagaagtatttggaagcacttgacaggtataatttcatatctgaagggaaagttcccatttcaaccaaaaaaaggacttgtgttccatccttttggcactgggtgagatataacttctactaattttcatattcatttatatattttttttgtaacaggcatgatagagcaaaggcagtagatattcttgttaaagatcttaaagtcttctcgacattcaacgaggagttatataaagagataacacagcttctaactcttgagaatttcaggttcttacttcatcttgccttgtattttctgttgactgttgtgcgagtgtgttgataggcttgctagttgaattttgcattattagggttctttagattattcctttatctgaacaatgacaccaaagaaatgtataatgtgttgacagagacaatgagctgttgatgtttcttgaattgatttttttagttaccacttaccaggtaatggtggtttagttgtgctcatggatcattcatatcttcacactgctgatcaggacatgaaagcatttccttagagcgatatacttcatgagcattttaagtttccacttggtgcagctgtgacttgcaataagtttgccatcacggagaactaaagtagggcatggattcttcttttttcttttttttgatagaacatgaaattgaatgtgtagttgagtgcgccctccagtacagaagctacacaaacctgctctgataatcgagttgtagttactttgagttaggcattttggagttttaagttatgagtgaatacattttccttttggaaagagcttctagtaagagtttactgccactactttgttaattgcctttgaattaacaaaaattgtggaattacttgttctgcttttaacagcacttcccatgccttttttaatcaacctactgtgcttcatactatcatgttcttagcttcctattgccataaaactgtcaaattatcaactatctgttgttttcttgcagggaaaatgaacagctgtctaagtacggggataccaaatctgctcgcagtataatgctgattgagctcaaaaaacttattgaagcgaacccccttttccgggaaaagcttgttttcccaactctcaaggcatcacgccttcggactttaatcaaccaaaggtttgggaagacaatatactattgctatttgttacattatatgacctgtttgagtgttcactgtgattttctgttatatgtgagttcataattctatgacgacatttgcagcttgaactggcagcatcagctttgtaagaatcctcggccaaatccagatatcaagactttgttcactgatcatacctgcactccgccaaatggagctcgtgcttcaccagtttctgtaccactggcagcggttccaaaggccggtggcacatacccaccacttacagctcatactgtatgtttgagatttaccatttcttctttgcatgattttatgaatgcctcttttcacttttactcactatatccattaatgcagccatttcaacctcctcctgctggtccatctttagcgggttggatggcaaatgctgctgctgctacatcatctgttccatctgctgttgtggcggcatcatcactacctgttccgccaaatcaaggtaagatgatacttttctgttgatatttgctaattgataatgtgagcgtttttactgttcttttattatattattctgacctaaatctgcaatatttcctactgtacaacttctttattcacactaggtattgctatttctctgatactaatattttctaattcattgcactaatgatcattgctttctgatttcacatgtctgacttaatggttattttccatatgaatttgacatgttttctcatttttttaataaagaaaataagtttaaaactgctaaataagaaaaggtgagttgggacatatactagataccccctcagtttcataatgtaagactttctagcatcacacacattcatatagatgtaaatgaatctagacatatatatgtgtctagattcattaacatctatatgaatgtgggtgatgctagaaagtcttacattatgaaacggaggaagtaattctgttggcccatagaatacggttacaggcatcaactattcagcaatgcggttctttggttctttgatgttttgcctaatccttctagcttgaagtacatctaacacctctaagacaaagcctaattctctttggcaacataaatgtacatgaacatttattatttctgctttgcatgtcctgatatgttgttttcttttgtcacgttctcatgacatacaacttatcgtactatttcctcagctgtcccaatcatgaaacgaccaactataacagactatcaaagtgcagaatctgagcaactaatgaagcgattgaggccaagtggacatggtgttgatgaggtaatgttgcatttgcatagaagatatatggctggtgcattttctatcaattattcaaagtcatctacgcttatgttcaggccacctatcctgcaccaattccccaacctttatggtcagtggaggatcttcccaggacagtagcttgtacattgtcacagggatctagtgtaaccagcatggattttcatccaactcggcatacactattact

SEQ ID NO: 8490 - DNA, 11924 bp, Oryza sativa
gcatcaactattcagcaatgcggttctttggttctttgatgttttgcctaatccttctagcttgaagtacatctaacacctctaagacaaagcctaattctctttggcaacataaatgtacatgaacatttattatttctgctttgcatgtcctgatatgttgttttcttttgtcacgttctcatgacatacaacttatcgtactatttcctcagctgtcccaatcatgaaacgaccaactataacagactatcaaagtgcagaatctgagcaactaatgaagcgattgaggccaagtggacatggtgttgatgaggtaatgttgcatttgcatagaagatatatggctggtgcattttctatcaattattcaaagtcatctacgcttatgttcaggccacctatcctgcaccaattccccaacctttatggtcagtggaggatcttcccaggacagtagcttgtacattgtcacagggatctagtgtaaccagcatggattttcatccaactcggcatacactattactaggtacaatcaagctctttatgttattaaaatctatttaaaaaatatgtgcaatagtaagtacagaagtctgattctttaagcatgaatgattgaatacaacttagccaaacgatatatcattttcttatcacgcttattactttatcagttggatctaccaatggtgaaattacactttgggaggttggtatgcgtgagagactgttttcaaagcccttcaaaatttgggacattcaagcttgttcaccacaatttcaggtatttttttattgctttttatagttgatccagtacaaacatctatagttgtgatcttatatgcctctttattttacctcccgtgaaaagagtgtggctaaagagtcttccatatccattaaccgggttacctggagtcctgatggagacttgataggttggtatccattttataattctgtcagtaatattgtgtttcactttatttgttgcttaggtttcctttgtggtttcaggtgtcgcatttgcaaaacatttgattcatctgcatgcatatcagcaaccaaatgagacgcggcaagttctagaggtactgcaatacttccaactgtccttaatcatatggttatagaccaaatgtcagttttataaatatcacaatactttattagttcaagtctgtcactaaacccttttattcatcatgtcagattgacgctcattctggagcagttaatgacatagcattctcccggccaaataagcaactttgtgttgtcacttgtggagatgataggctgataaaggtattagatgcttcttggatggttatcttcaattttccccctagccttggtctccttcaacttcacttttcttttgtaggtctgggatatgcatggacagaaactgttttcatttgaagggcatgaggcaccagtgtattccatctgccctcaccacaaagagagtattcaggtgggttttctgaacagaatatgatatttccagttgtggtgcttattttataagatagacaatttcttctcaagattgaacagaggtagtatgcgtgattattaatgtgtccatcagtaaaaaaggggctgtctaatgttattaatgtcgatttcttgtgttgatgtgctattcttatgttccctgaagtttatcttctcaacctccctcgacgggaatattcaggcatggctttatgatcatatgggatccagggtagattatgatgctccaggaaaatggtgtactagtatgctttatagcgctgatggaactaggtaagcagaggtattactttcgtaccgaaagttgtctttagttattggtgctgtactaatttacttgtttttcatatgaaggttgttctcatgtggaacaagtaaagatggagattcatatttagttgagtggaatgaaagtgaaggatctatcaagaggacatattctgggtttcgtaaaaagtcagctggtgttggtgtggtgcagtttgacacagctcagaatcacattttggctgctggtgaagataatcagattaagttctgggatgttgataatacaaccatgcttagctctactgaagctgacggaggcttaccggttagtctatgttccctactgtgttaaacatttttttctcttttggtagtctaaaactgtgtacattctatcagggtcttccacggttgaggttcaataaagaaggcaatcttcttgctgttactacagtggacaatgggtttaagatacttgcaaatgctgatggactcagaactttacgagcatttggaaaccgacctttcgaagcatttagatcgcaatatgaagcttcttctatgaaggttcctgcacactctttgctgcttgttattgttgtgggtctagttttagaaaatccatgaccttgaatattgcatttacaggtctctggtgctcctgttgttgcgggcatttctcctaatattggtcggatggatcacatcgacaggaattctcctgcaaagccatctcctataatggtatggtaatccacagacgaaagatttcccaaagtttcatctgtttaatgcctctttgcttaccttactgttagcaattgaaacacaatctgacttaattatggatttaatagaatggtggtgatccagcatctagaagcatcgatataaagcctagaatttcagaagaaaggcccgataaagcaaaaccctgggagctgatggaagtcctaaatgctcagcaatgccgtgtagctacaatgccagaaactccagaccaagccagcagggtttgatccaacttgttcttgcgtagtttgcacttctcttcatgtaatcgttcagaaggctaacaacatttatagacaggttgtcagacttctgacacaaattctggtgttggcttgctagcacttggttccaatgccattcaaaggctgtggaaatgggctcggaatgatcaaaatcagtgggaaggtatattactctctctttgttctttggggtttaggctaatcaagggcagcgtgtaattctgtcaattctgctaagcaggccacagccaatgtagtgccacaacattggcaaccaaacagtggtcttgtcatgcaaaatgatacagcagataccaatcctgaggatgcagttccatgcattgctctctccaagaatgattcttatgtgatgtctgcatgtggtgggaaggtttcactgtttaacatgatgacatttaaggtaaatgctcaatatcttttttggataaatacttcaaaattcaggaaattttaattatgcttccttcatgcaggtgatgacaacattcatgccaccacctccagcatcaacctttttagcatttcaccctcaagacaataatatcatagcaattggaatggaagattcaaccatccatatatacaatgtcagggtagatgaggtactgcatacataaaatttgcacatactgtaatttattgagccattgctattcatttatattgagctttattttctttccaggtcaaaactagattgaaagggcatcaaaggaggataactggtttggccttctcaaacaacctacaaatacttgtgtcttcaggggctgatgcacaggttactatagccaaaacactttattttacactttacattcattgattctgttgatggatcagtatggctgctagtttatttatctttctcaaaagaaccactcaacccttggataataataatgtcactctgtttccactttgcagctttgtgtgtgggccaccgatacttgggaaaagaaaaaatctgttgctattcaaatgccagctgggaaaactccatcaggggatacttgggtccagtttaactctgactggagtcgtttgttagtagtacatgagactcagctagctatatatgatgcatcaaaaatggaaagaatctaccaggtagctatatatgctgtatcaaaaatggatagaattcctatgttcataattgatcaaataattttgttctggtttgctaaaatctcttttttatctctcttgtttcagtggatacctcaggacgctttgtcagctcccatttcacatgcatcatactcacgcaacagccagttggtttttgctgcctttaccgatggtaacataggaatttttgatgtggagaacttgagattaagatgccgaattgcacctccagcatacttatcttctgcagccataaacaggtactcactactttacgtatgatatacgcacgaaatttacctaaggccatatgagaactagatgtgctgatacagttttaaatttcagtatctgattgtccatgtatattgctacaatatataatgtagtacgagtgtcctagcactttgacctgtaatcatcgtgcattcgtgctcaacatgtcccacccctcctctgccatgccttgagccatgactcctttctgttaggaacagtgcgatatcctaatagctaatgccatataagtctactaatcgaagtttgagatatgaggattatgattttacatgatcctgttagtcaatttaagaaggattaactggcatttttgttctaccaagttttatggcaatcttagttgccctgaaatactctgaattggtagtcttatctagagtagctagatataatatgatcaaaaacacctaatttcaagtgggaaatacataaacattatatgccaaacttttgttgacaagttttgacatttgaaaccccgctcattagaaggttgcgtattattgctatttattcctccatcgagcttcatctaaaaacatatatgtttccctgcaccagcaatccatcggtctaccctcttgtcgtcgctgcacatccacaggagtcgaatcaatttgcggttgggctttcagatggatctgttaaagtgattgaacccttggagtccgaagggaagtggggaacgacgcctcccacggaaaacggggtgcccaatggcaggacgtcaacatcatcagcaactagcaacccagctgcagaccaaatccaaagatagacgtgcatgccggttggatcttcactgtaaagcttttctaatcttttacattgacttgtttgtatgttgatgtgactaggctattgttgcatttgttggaaaagcaaacagaaaaaaaatggaatcgtaagatcaggtgtgcttgtaacttgtcggatgtttgccctagttatgaaaaggttatcttgtaatagggatagtccataaaattaggttttctcagtataactgggacgtcggatgctgtagttatctttgcttagatgcttttcaagctatacatagtttttccttccttcatgttcattttttttccccaactgttgtggtggttcggacatgaaaaggaagacggtgattgacggatgccttgaatgccgtcggatttttggtagaaagagatactagcatctacctaattgttgcataagttcgttgaaagaaaataagtttgtgtgctaacaacgggaattttatgatttatgctattgaattgcctatatgggcacaatgagatgtcattaatgtaccatctgaagtcgttgtcagctaaaaaaccatatttgcttgtagattttgacggccagagtcacctaacgaggaactttcttgtgctcattttaaagagtaaattgagtcgacgttacatgaggaactttcttgtgctcattttaaagagttacatgaactgaacttgtaagaggtgtactatcttaatacacaattgggatacacaaatgcatgcatgctcagcatgactcttgctgatgtccacatactattactcctttcgttacaatgttagtaaataatagaacaacttatggatgtgacatatcttatttctttctataatataataacttatgattggatatgtcacatcatagtgttacgaatctaaacaagatatatcatattcaatattaggttattatattatactagcaaggaagagtactaccgtaaacttctcattctcatgagtggtcctatgtatatcggctgtgttcggagcagtagtcagtttttcagttgcacatttagtagggtattaattaatcaaatactccctctgttttatattataagacattttgactttggtcaaagtcaaactactctaagtttgactaattttttagaaaaaaatagtaaatttttaaccgaagacaaatatattatgaaaaattattcaattatagatttaataaaactatgctggtgttgtaaatattactattttttttctacagagttagtcaattttagagtagtttgactttggtcgaagttaaaacgtcttgtaacctggaacagaaatggagggagtattaactatcacaaactataaaaaaagtatttgttttcaaagaaatttctctatagaaagttgacttttataaaatatatatatttaacaatctaggaagcatgcttactaaatcaaaacttgaaaatctagagttgcaatgtttagtttatttagccaaaactaaaccgaataaaacgactatactctcgatctaaaataaaccaacttttagagtttgaattttattccaaaataaactaacttctatcttcttacctaccatcaacacatatcaagaagataaaagaagagagaagagtaacgggctatagatttgtagccagctgcagcacagactccaagtcacaatgtatgtatgacttatgtgactatgtattaatagtgtattatatgtttataggtaactattgtatgaattgattattaagttgactataattgatttggatagttggctataataaacctgctcttagagccggtgcaacagtagatataaaccagctataaacatatttaaaggagataaaacaagatagaaaagagaagcgagttacagatttgtagtcagctatagcacggactctaaaatgcatatgtgtatgacaggtgtgaccatatattaattatgtaatactccctccatattttaatgtatgacaccgttgactttttaaccaacgtttgaccattcgtcttattcaaattttttatgcaaatacaaaaatacttatatcatgcttaaagaacatttgatgataaatcaagtcacaataaaaataaatgataattacataaaattttttttaataaaacgaaaggtcaaacgtttattaaaaagtcaactgcgttatacattaaaatacgaaggaagtatatgtttgtaggtaactattatatgaattgaactattaagttgactgtaaataatttggagccagcagtttgtcctattaaacttgctcttaacgagtagtgccctgtgcacgcgtacggctgcctaatgcagagcctgacgtggcgagctgccgccccggaagcccatagaaccaactccaccatagattagtagtactagtactagtattagtattagtgttaaagcgatgcaagcaaagaggctgttctagaagcaagcagacgccacgccacggaagaatctagaaccccacccccatcccccagcccaacccccacacgaagcgaaacgcaatttctctccaaaccaaaacacccgaggcggagaggccgaggcggcgaggcggcggcggcgaccgatctgtgcggggagggggatcgccggagatgttcctggttgactggttctacggggtgctggcctcgctggggctgtggcagaaggaggccaagatcctcttcctcggcctcgacaacgccggcaagaccaccctcctccacatgctcaaggacgaggtaggtcgcccggatcgatcgatcgatcgagatttgtactgatttggttggttctgatttgtgttgggatttgggtgcagcggctcgtgcagcaccagccgacgcagtacccgacgtcggaggagctgagcatcggcaagatcaagttcaaggccttcgacctcggcggccaccagatcgcccgccgcgtctggaaggactactacgccaaggtttaccttcagttctaattctactgctcctatatctttgttacttgctgttagatttgttccttgtgcgatggatgggaagcagcgcttgtttgattggaacgaactagggttttaggcatgagggtatcggggattagacatgatgcatatgagtagatgaagaatcggtcgtcttgctcacttcatgggcagggatttggtggtttaattcagtaccgattgctctttttggatcttgcagaggaaaaaaaatcccctgattgagcaattggatgtgttgctggtgcttgtactcaatttagccatgagctccagcattcagattagttataataaggaaaaattggttctatgccatcgaaagttttcaatgggttgtcttgtgaacatacaagctggacaaaaggttgcacatagtacttttttcggtaaacttggcctgtttgtttcagcttagtcttattaccttctgcgtataagctggccttttgatttttgcagtttatgaagacctgcaaatttgagggtagtgtaataactctagtccataaaaaccaaaatgatgctaaaaaaatctagctttttgcttattagtgcttgtgttatgacttaaaaaaaggatgatgaactgttcgtttgctacacaaaatatgtattagcatcagttttttttttaattattgttctcttgttctttttcaaaacaaaaaaggcatgttcactataaaaaaaaagtgaattgctcatgttccgctgtgtttggagagcttttccaaatgtatgattgatgcttcctagttgaccaacataccaccaaagactatgaagcctggttaccactgctaataacgctggtacacaggctgaactgcagttttcggtggtatgttggcaatgtaggaagtctgagtgatatatctgcaaggttgtccagacatactggtcgatagtcaatttccactaaaaaagtcagagccttgccaaacaaagcatataagggtttaacaaacagaacaaatttacaccgactatgggttgtttattatccaattttaattgttcttgtgttcttcttttcccgaagaaagcactgacaacaaaagtttgaaattgtccatgtaccactatatttagagaactttccaaatgtatgcctcatacttcctcattgaccaatataccacaaaacactacaatgttggcctctttaccactatcaagacacttctcccagtccattttgtctgttgagcatcaggacattaataagtgtggagtgccttgctctacatcatcctctgtaaacagtctggggttgcagttttatgtggtatgttggcaatgtaggaagtctgaatcgtatatttgcaaggttgtccaaacatacttgtctgtaggcaatttctcagctaaaaaaattgaagtcttgaaattatctataattttgtcctctatatgtgcttaaaacttgctgagttcacatgccagttttttatgaaagctccctcgtgccaacaacaaggcaaatgaattagtttgcgtatattgctgcgatcaagggtactgtacattatgttgacctttacttaatctgcacaaattgtcatattttgtttcctttctgggagtatttcatggcttagctactattatagatggtaagtatgtttaaccaattttgaccaaccatatctgtcatatcaatcttgaactttagtgcttgaatagtttggagcatgatttccatcttcctctaagagtcctctttgaaaagataatgcgtcactttctcaggtttcaaacttcttcctctctagtccacaaaatgcctttcaaatttctgcagaaacacgttagaccaagcagttcacaagtttcaacaaatagaacaacttcataccgatcttgattattctcatgttcttttttccaaagaaagcatgtgaaccataataatttgggggattgtcggcatacctggagaactttccgaatatattactcatgcttcgcagttgatcaacataccaccaaaggacgggtgttggcctgtttaccgctgttgaggcaatttttcctcgtattttctggcaagaatcaggacatcgatgagtgccttattctacatgaatctcgggcaaacaggctttggctatagtttcagtggtatgttggaaatttaggaagtctgagtggtatatctgcaaggttgtccagacatgctggtctcttgcaatttccgctaaaaatgtagaaatgtaggagcctggccagatgaagcctaagggtggactggcttaaagaaaagaacataagtttcaacaacagtacaaatttgcaccggctatggattgttagcatcagtgatcagtctttgactatgttagcgttcttctccaaaaggaagtattcacaatgaaaatttggaattgtccatgtaccactatgtttggagaacttcccaaatgtatgactcatgcttccatgttgaccaacataccaccaaaatattatgatgttcgcatgttgccctgtttaccactattaatcaagacactccccctcctctcttttgttttcctggtgaacatcaatatattggtaaacaggctaaggttgtaattttctgtggtatgttggcaatgtaggaagtctgaatggtatatctgcaaggttgtccagatgtactgggctgtaggcaattctggcttgccagctgaaaatgtagaaggcttgatctaatatatgattttgtcctttgtactgtccttgcttgaaacttctaattcacatgccgattttctttacatgcaaactcaccctttcttaaaacttctaattcacatgctgattttctttacatgcaaactcatctttcttaaaactggactaattcacattctggttttacatgggcaatttgccttttttttttattccctgctgggaatttttccagcttagctattatcatgtattgcaagcatgtttaacaagtttgagaaaccatatctatatgtaacattgtcatatcaatcatgaacttgatgtgttgtatgatcacaatttatagtgtataattatcaaggtatatacgtgacgaacacttcatggactcttttggcactgagatctgtgcaaattgattcttaaagtcaagtatgattaactactggcgccactagtatgtgttatgatacctttagggtgcagggaaattatgcacgtgtcacgatattgatggcaacagtatcttccagagttcagttcttgctttaagtcctgtttgggtctcctggcgcagtttacaaatgaggaaactgtggttatggggtgccaacattttaactgtggtgttacgagatgctcttaatatgatttctataccattggcatcttgctgtcagagaaacaaagatatggggaaaatcgaatgttggcagtgcagtcatggactagtgagaatgggctggggaaccttcattttaagcctttatgtcccccatgaataatttactggaacacattttgtctacaattgctccaaatgtttggaatgcatcttttcaagccaatgtctgtatgactgacgtggtttcaaccattctgccctgcaataggccagaaggaagttgcaccatcaagctgaccaccaattctgtggggaaaaggaaatcctaattcgatgactacatgttctcaatcgcgagatgcaaaatgcttcttgttttgcgaaattcacatttggcctgtagtggagtagactcgattcttcatattttgtaactcgaggagtcattacttgttagactatccacctggaatttggtgacttaactttctgtattggctgtttttaattcctg

SEQ ID NO: 8491 - DNA, 22847 bp, Oryza sativa
attcctgcagccccgcggcggcgggcggcgctgcggcgcgacggcgtggcctggcggcggcacggcggcgggcggaggcccaggcggcctcgcggcggcgcggcggggcggaggcctcacggtggtgggcggcacggcggcggaccgcggggcctcgcggcgggcggcgcggcagcggccgatagcatgtgttttttttctttttttttaaaaaatttgtgattcggatctgtgtatttgatttgtgtgtgatgtccgtgaatatgtgatgtatttgtgatgaattttgtagaagttgtgatgtaattttgttttaagattttgtgatctatttgaatatggccgatttggggatttgaggattggggataatttatttgggattttgggatggggatagagtaaaatcaatatattaaaaacacaatgaagaaaagaaaataataatagagcaaccagatctagctagctaggctagctctatctttagtcccggttggtgaaaggctctttttagtcccggttggtaacaccaaccgggactaaagatgtatttttactcccggttttttcacctgggactaaagatcgtcccggattggtagtcccggtttgaaaaccgggactacagggggttatgaaccgggagtaaagcccctttctccaccagtggaactaaacactgccaatatgtggagctcatgaatctttttaccctgttctgtaaaaggaagtgaatggtttccgaacccatccgttttgcggcatatttgcaaaagaaaagtaatttgtaaataaaacttttatatgtgtgtttttagtgatctaaaagcaaaggctggaaaataaacttcgatgaaaaaacccccaaatcaactctacatttaaggctaaaaatttaaattttggctgataagtataagtataagcgaaaagacgaggcttttcattagtttgggggcaggggtatatcaatttaataaatgtattttagatgaataagttaggaagctaacatgaacttgttttcttaacatacgtgtagtaagtttttacatgaatgtgatccatctgtcgacgattgaagtagacagacaaccatggtaaatgcccatggctagcaaaaaagagatttgggcatgcttatggcatgctaaaatgtggacaccctacgcaagatcttttaggattttctgtcgaccactttacaacgcgatgctctaaggagtggccttcttcaccatgtagacttgcatctagcgcagaggaaagccgttgccttttagggcaaggcttagataactaacgtggaggaaagttattgctttgtagggtaaggcctagatagccaacatagaatggagcgtttatctcgtatggtgttaaggtgccttctgcaagacacgaatgcagaactagatacttcatgtgcaccaacaccgatcaaaaaatagaatataatgcatatacctttgttgaccgaaaactctaaacaacttgacgacaccagatttgaggttcacaacgttgaattgaaggtgtgcaagaatcttgatgttgcctaggggtgaacgtgtttaaatttttcgcaatagataagtctcaaaactaggagcgcgtagatgcacttttaaggtcgtcgacaacctagagatagaggagccgacgggaggagagagagaaagagcatatggatggtgctagttgggtctaaggcaatgacactaagtccagtcagctttggagccaccgacagtgagatggatattagcgactcaggtgagaacaacgacgctatgactcttgatgaggaggagagatacatgagaaacaatgtgacgatagagtaacgtagggagaaaatgggttgttatgtaatttgttccttttctattggcctttatccgtaattttttggcctaaacaatatgaagaaaaatatattacattgatttatatcatttgaagccaccacgtattatgccgaagaaatttcttaagagcacgacttcgatacagtaggtagcacagtactgtatcacactttttctcccagatacaatataagagcatctccaacaacctccttatccccctctctaagttaaattttagcaattttggctcaatttcatcctccaacagactggctatcgagctggccaaagtcctccttccactagccaaatttggccagctaaaatagcctagccaattgtgggccccacgccgacagcatccctctcccctttctctctccgccaactgtcgtcgtcaagatgccatcgctggtgctgtcgaggttgtcgttgccggacgccgccgtcgcccgccgtcgtcgcgccggcgccagatccactattgccggacgccgccgtcgtcgtgccattgccagatccgagaggtcgtcgttgcgccgtcgccagccgtcgtcggcgctgttgtcaaccgtcgtctccgaggtcgtcgttgcccgacgccgcgccgtcgctagccgtcgtcgacgccgtcgccagattcgtcgccagccgaggtcatcgtcgcctgtcgtcgtcatcgccatgccccggcggattcggccggtgcggcatatggtagaggacgccgtcatctcgctcctgccgtcgtgttcgccgcccgtgccaattggccaccccgcgtccatgcgagctcggcccgagcggcggcggcggcggatggcgatggggcggcggcagcggcggcggatggctctcggtggcggcggcggatggcgatggggcggcggcggcggcacctgttgcgagctaagcagagtgcgtttgaggaaaaggggggagagatgaggaagaagaaagggttgtagagactgacacgtgggtcccactgtcataggcaaataatagagaggatgaatggataggctgttggagtaaataagagtttgactggctaaattagatggagagttggccaaatagacatttggagagttagatttggagagactgttggagatgctctaacaaaatcacaatccccattgtaattatccacggagtaccgctaggacctgtttgacatagctctaattgctaagtttaactctaagagctgggtctgtagtggagttgttgatcagactaaacccgctccacctatgtggtttattttgtgatagcacttcaacctgctccgtctcctattttaaaatggagttgaaattgtttggttggacttcgggcctgtttggatccagggactaagtccttgccacatcgaatgttgggatactaattagaagtattaaacgtaaactaatgacaatacccatttcataactttgaactaattcgcgagatgaatctattgagcctaattaatccatgattagtctatatgatgctacagtaaacatgtgctaattatggattaattaggtttaaaaaaattgtcttgcgaattagctttcatttataagattagttttgtaagtagtctatgtttaatactttaaattagtgtcaaatattaaaagagagtttagtcttccgattcaaacaccatcagcttcaatagctgtgaaaataattttcttggattcttacatggatgacgatcctgtaccgagcaccgtagcactagcacgttccaagggcgaccaaaaaggtactacacggttttgccctttccatcctgtacagcctccgagtttcatcagcattcgaaacgattttgaatcaagcgtgtactactactacccatggtcctggaattttcacccgcatctgccctgacccatcccacctccaccaccaccacctgcgccgcaagcatcagcccacccccgcagacgctggtcctccccttcctcctcccctgccgccggtgaccgttcctcctgtgcacacgcctcgagttcaaaactcaaaccccagatcagatctaaccccgacccaaccccaaccaggggcagattcgtcattctccccccacacctttattcgaatcttgcgtcctttgatgcggtaaaaaaaaaacaaacaagtcacgcacaccaacaccaacaataatgacccttctcccacacccccactgacgcgtgggccatcgcggagtatgggccccactcgacagcgacacggacgggggctgcaccgcgacgcagtccccggtccgggcgatttgaccggtcaaaaggcgtggccacgaaccaaaccccaaggcggcagcaggtgggccccacctgtctgtgggcgtgggccccgcgtcctgtggtggtggtgggtgctttgactgcacccctcccctccctcaggcggaaatcatttcggtttcggagagagagagagaggatttttttttccttcggcttatgtagtattgcgctgcgtcccgacaagcaaaagcaagaggaggaggccgcggctagcgagcgagcgagagagaggggagaagaagaggtgggacagccgggagatccatccctgtggagaggagggagggaggaaggaggcgttggaggaggagaggtgcgttgcggtttgttcgttcttgctgcttcgatttggtttgcttcttcttcttcttcttcttcttcttcttcttcttcttcttcttcttcttcttcttcttgtttgtggtttgaggcgattacaacgcgagttcgccgttctgcgagggcggtggctgatccgtctgctgggatctacgttttcttcgcggtttcggtggattttgcgggggtttcggggattcttgagacgtcggtgtgttgcggttgtgttcaaacctcccaagcgcgtggattctttttggggggtctctaatttgtgtcggcgattagtcaacgtggagcaattatacggatttccgagggattttctggtatttattgctgcaaatcgggcaagttcttggcttcggatggggcttggagtaaagatagatcatttacgccatagattcgtacccaaatgctcagttttttttattggtttgcactttccccttcgttagaggctcgtatgctcgcgcctgcctcatagcagatgcggatgagttcaaactcaagaatagatgcagaagagagcctgaatcaggaggagttcgtcaagaaacgtgaacagggtgcagggatccctattttggcttgattgaaggcggttttggagggggaaagttgcttagctgaacaacatttttgcgcatagcagcaaactgttgcttgtgttggagccgacggcaatgaaagaatgccttttttgtagctggttttggacataaagagtattttttatggttgctttcttgctaaaaatatggtgttttagtgcaagtcattcagtgtaaatctccaagcattcttatatacttgttccttttcctcctcctggatgagtcttggatgagtgcatttctctctgttcatctctttgctcttcacctgatgattgtttcatggtggatgcgtgttagatgcactgagttgcttagcatggtgaatcagtgctttgtgaactgcgtggttccactttttaactgatgtttgttattgacgatctcgcaggttgaccgatagatccattgcggagttgagtgttgatgcaaagctgattcgccatcgtttagctttttataagagatgggttcagtaggggttgcgccgtctgggttaaagaacagcagtagcaccagcatgggtgctgagaagttgcctgatcagatgcatgatctgaagataagggacgataaggtaagtctatcatgatgagaagtttaatttcttccatgtgccatgtaaatttgactttgttgtaacatgtcgaactgaatggtaaatccaggaagttgaagcgactattattaacggcaagggaacagaaaccggccacataattgtcacaactactggtggcagaaatggtcagccgaaacaggtgatttcctgataccatgttgtgatttcagaacaaatgccatctgactgtcgcgatctgaaattgttcatcgattataaagcaatcttcatttctaattgatattcttggataatcttgcagacagttagctacatggctgagcgtattgtagggcaaggttcatttgggattgtcttccaggttagttgcaacatctttgggttttcatatatttcaccaatcaccaggaagctaagtagctaacttaacatcattaactctactagcaccactttttttgtatgtagcaaattgttgatacacgataaccttctcttgttaagatgtcctaaatgttcttcatgtctgtaatagtgatatcattttgaccattttcaggcaaaatgtctggagacaggtgagacagttgctatcaagaaggttcttcaggataagcgctacaagaaccgtgagcttcagaccatgcgccttcttgaccacccaaatgttgtagctctgaagcactgtttcttctctacaactgagaaggatgaactgtatctaaacttggttcttgagtatgtgcctgaaactgttcatcgtgttgtgaagcattacaacaagatgaaccagcgtatgccacttatctatgtgaagctgtatatgtaccaggtaatattctgttatgtacctttttggatactttgttcttttgacttatgttgtgtagcaggctatattcagacaaactagccagtagcataccgagatgactttgaatttagtttgaaatttgttgacagatttgtagggcattagcttacatccataatagcatcggagtttgccacagagatatcaagccacagaatcttctggtatgcttgaatgttgttacccattcatctcaaataccaccctcttatttctgtaactttataattgatgtttgaacttctaatcaggtaaacccacatacccatcaactcaagctatgtgactttgggagtgcaaaagttctggtaagacaattaagaaatccacaacttgttatattataagcagttacagtctggtcttatcctccctatgtactaatttgtaggtcaagggagaaccgaacatatcgtacatttgctcccgatactatagggctccggagctcatatttggtgccaccgaatacactacagctattgacatctggtctgctggatgtgttcttgctgaacttatgttagggcaggtaagcggctggattttctttgcacattttggggaagtttgttgtttaccaccctggactctattgtcgaagtcggtatgccttacaattgttttctgttcgacagcctctgtttcctggtgaaagtggtgtagaccaacttgtggaaatcatcaaggttagtgccaattctggtgtttagttggccttgcgagttgttcggaggtgcagaagtttgtaacattaaaactgatcacacatcgcaggtccttggaacacctacaagggaggaaattaaatgcatgaatccaaactataccgagttcaagtttccacagattaaagcacacccatggcacaaggtgcaaagtctatctatttctgttgttatactttcagcaatcgtccagtatcaggtgattaaccatatatgtaaaatatttaggtattccataaaaggttgcctccagaagctgttgatcttgtctctaggctgctccagtactcacccaacctaagatgcactgctgtaagtatatatttaatggttgaagtacagataaattagtattatggcacttagttcctgagataattgtgcagacattcatttcataaatattttctgttacctttgaccaggtggaagcacttgttcacccattctttgatgagcttcgagaccctaatgctcgccttccgaatggccgctttttgcctcctctcttcaacttcaagcctcatggtaagttgtgaaacatgatcacatttatccttgttgatattaccagttaaagtttgttcaagcaggcacttcaattgttctggttatttccgttgtaaacttacaatttgggagctgcaagtcataactttctgatatgatcagctacttacgttgcccctttcttgtttcttgcagaactgaaaggaatcccatcagatattatggcgaaattgatcccagaacatgtgaagaagcaatgctcctatgcaggagtatgagacagcttccgcacgacccccctggaaatttccatgacaagtgcccatttcctcccccctggacgacgatggatcgtcagcatatgcgtgcatgatggttggtgaagatgtgaagttacgttgttgttgtatgaccaccttgttgaccagtgtagttgagtagcagtatgttgcgatggcgaaactttgacatgtaaccggtgcacccacaccatccctcccctactaaccctcacccacctgagaattgagaattcccatagctgatgatctgtaatatgttctagagcagtttaagaatgtatttattatggtgtagttgatccatatgttgggatcctcctcgtcgattttcttggttctttgtgccctagactgctacctggtttttagactgttctgaaaatgctgctagtaccttctatctactgtacttgtttgctccttggtgctattgctccagcctcagctatgaggatgctctggcatatgaacgtatggacaagttcgtcgatgacctgaccttggtagttttacctgtgttcgagttgtgctggtccaggtgtttggctgcgttgcaaggtgtgcaagtttggttcgtccgcagaggtcatctaaatgctgttaggagtctgctaacactacttgctcttggaaagttgtaggggctcattttggacgtagaaatttcacaagattttagcacgaatcagttcagttcagttacggaattcgtctaaaattaattgatttctacagatttcgcttgaaatttcgttcgttccaaaaggaggcgttccgtttcttgcagaaattaacttctctaaaatctagcgttcctttgctactccgtagtttccgtcgaataatgtaaaatataatcgaaatgtaaaattcaaatgtactgttgttcatgaacactttgtactcttcagtctcttttcgcccaacagcagaaactgctggagggagaagatcagaattcagaagagttgtcgagagagagaagagaagccgcggaagggggaaaaaagggaggcggcggaaggggatcggagatgccgctgggcaagtactactgcgactactgcgagaagcagttccaggacacccccgccgcccgcaagcgccacctcgacggcgcccagcaccaccgcgcccgcgccctctggtacgacgccgtccgccgccaaggttgcccccccactcctcctcctcctcctccccttcgctcttctcgctccgacaccttctgacccttctcccccctcccgcagagcttcacggcggcggcggcggcgctcctcccctcctccaccagcccggcgccgccgccatcggcgtctgccaacacttcgtccgtacggtgtgtacttgcgattctgccgatcttattacatctgttactactcaacgaggatgactaacatttctgcaattgaccccattttttggtgtttttttaggggacgtgcaagtttggggattcatgtagatacttccacccgaagccacctcctgctaatccaggaccagctccttctggtgactgtacttcttgtgctctgttttgtttttaaatttttgagtaaattttagaaaactgcaactatagtgacaaaactatcagtttgctgcaataatagcgttggaaataatcacaaaactacagcttttacgtgatatgctgctatagttgttacctatgtgtaccgtagcagtatatcatgtaaaagttggagttttgagataatttcctacgctattatttctgcaaactgaaatatatcagtaatgttgcagcaaactgatagttttgtcactatagttgcagttttctgaaatttactctaaagtttttggtatatttccgcaaaggtgatttttagtaagattcttcagtgaaagtctgcttgatgttgggatataattgttcgttatattctacaactcattggattgcctttgcccccattgggtgttgatctgaactatatagacttcattacgtactggcgcggtactgccattaggtcttcacagattcatatacagttgaattcatcttgatgttggcgcgcaaagcgaagacgctagcttgatgttaacttggtgcatcgaattgccgtgcaacttagttattttagaggatcatctgtattttgcccttgtttcggaattctaccaatacctttttcttcctccagttttatctaagatgaagtaattagctgcctgtaagcttgtaaccaagtctgttggattatatttttgcaccattgtagagcactgctcaattctctcagccccgtgtagtgtacacaaaacaaagcagggtagtatatttgtatgtgtgtgcaattgtgaattgcaaatacacaaatgcaactttcatgaaattagtagcctatagtactatccgcatatttgagtttccttatcagttgttactactattatgagtgcacgacaaatttacgacaatcactgttcctatttctataagataattcttagaacacgttgttctaaattagattaaaaactgtggataggacttaagttctgacttgcccttttattatccaggccctgtctctggaccaatggcgcagcagtctaatattcaaggaagtcaacccaattttgttggatatcaggcagcagatggaagttctttctcaggtgatctgattatggcacactcagcaaaaaataatattgttacagctagctggagtagtgcagaaaattgaatggctctcactgcttcctcccaactgatgattggattttattccaacacaacttctcgttttctgttctaattaatttaggatctggtttttagttcttacataactttctccattcagcttggattaaatcaatgaatggagacatttggtagttattatatgttagtcaagcacatcattattaaaatatgaacttaatgtcttgactctcgaccatagctgccgcaacgagtcgtaaaatggactctatatattacctttactctcgccttttttttgttgcaatatagtaaggtccaacgtgcattcatagcatattttaggtaggttgcttttgtagcatgccatgccacagctattggacctgtgaaacattattgtatagataatgtaaaatggggatagaagtgaatgaaaaaaatggttttctctatttattcagcatgttttccatccagtcacctgtcatgccatgaataggacactttgcacctgccaggttgccatgcaatcattggatgtactcctttatccatgtaggtccaatggttggtgctactaatgtggtgcgatgtttctaggcaatttgattgcatctctgtctgtcggttggtctcttttattgatgaatgaggggctagatactatgacatttaaatagtttggcttaccctagaatctgtggtcaaactactgaattcatgagaagcgtgctcaaaagccttgccctaagcaatgaattctgatgctctgggatgcaaaagctgcaagggtagcatatgttttagggtgtgtttagttcacaccaaaattggaagtttgattgaaattggaacgacgtgacagaaaagttagaagtttgtatgtgtaggaaagttttgatgtgatgaaaaagttggaagtttgaagaaaaaatttggaactaaactcggccttagtatattttgaagtatttataccagatctcactctagcgagtttcttgttgatagtaatatctaattgatttctttctctcttttttttctacagggaacattctagggggtcacacctcatggggcaacttgcctccatcactgcggccacctcctgaaggcggctatcctccatttccttttgtagactggggttgaattgcttgttaatctgaaggtgccatatgttgaaacttcatgccggctatgcaatagttcaaacacacaatgaattttactattgctctctacaaatgggtttatattagctgtgagaatgctctcatatgcagtggaacctgtacctctagtgaactgggagcctggttttcacttaaaatgctcctattaggaagtgatccctctttgtagttaaaattgtgttgtccgaagggagaagactaaaggatgtagctcccctgatctacgtggcctccaagaaaaagaacagcacgctacaacagacctcagccacagaccagtggctgctcgatctagaccttcctccagcctcaagctggacaacggagctggtcagccagctaatcaatgtctggagtgcagtgcacaacgtgcatttcacagagaatgaggaggacaagatagtgtggaagctcactagccacggtgaatataaggcgacgtcggcctacaaagcgcagctcctaggtactactgccaccaactttaacatcctaatatggaagccgtgggcaccgcgcaagtgcaagacctttgcctggttgatcatccaaaatagagtttggacctccgacagactggcaaccaggggttggcagaacaactctttctgccccttatgcagacacacccaagaaactgctctccacctcctcgcagaatgcagatacaccaggaaaatttgggcggcgttatctgattggactaggtgtggtcaactgaaccctggacaatggcaaccagctcaatcggtgttagagtggtgggaggccaccgccaacttgaaggaagtcccaaagaaagcactccgcacgttaacacttctggtcaactgggaaatctggaacgagagaaatcgtagaattttccagcacaaagagctatctacaggaagtctgttggccaaaattaaagaggaggccaaaacatggtctcgggcgggggcgaggcatcttggtagctggcttgctttttatttttagctcagtaggaccgaaggtcctgggcctggtttttcttactcgtaaagtttactccttctctattcaatgaaattggcagcttgccgattcgttcaaaaaaaaaattgtgttgtccagcctccttttggcactgtcaggtctgtaattgaatgggctggaaacctggatgggcagggattctagcccatcaacattatgcttccataagatatgttacacttaaacctagttactgaggtttcaattttggtctccatttaccaaccaacttttttaaatttgtagaaggcgtgttctataatctgggattttggccaattcacagtgccaattgtgcgtcagcaatcaggaagattgcatcactcatcagcctgacaaattttgcctacaataagggactaggctcatctgacgtaaagtcagagggacatggccactgacgtatgggcccatgaaggtgggccccacatgtcagggacccacgtccctctgattttacgtaagaggagctcggtcctacaataaggggcaatagccttatgctttctcttgatcttagaagcaacataccgagcttacaatttgcactgaccatacggaaaataatcaaagtttttttttcacacagaattacattaatagggaaggtccagcaaatctccattcgataggcaagcacacggctatatatattatcctgaaaaatatgcttgtctggataagtttgatcagatcgtttgcatccaagctgcctggcgatcgactccaggccaccgcaggcatgagaccagccaccgttcttcctccacatcgttgtcggagaagaagccgcatcgccggggcatcgccggatgcttcgaacaagacctctccgcctcctccgccgcctccctcgcgccgctgacgagctgcctctcctcgacgtcgacgccgatgacgattgctcgcagcagcagcaggagggaagccattggctactactggctcgtcagctcccaatggcggtttggaatgatgctcaaggaggagctacttatagtgagcttttaagttgtttgtttagaggtttcaggtaaatctggatttcttgcaaggaatttgcactgttcttgcaaggatatttttgctggtgggtcacagaaaggttgtgacaagggtttggttgttctggggctctgctagtgtggactctaggtgaacagaatcattaggcgaatgctgtaaatcgaaatatctgctagttcttcagtttgttcatccaacattctagttgtgcttttaggtgaaaaggatagccctttatgcatgcacaatgttctgtccttctctgtctgaatttttctctcggtttagcacatagttttgcactgcatgatttggtacagtgttacctaactgaataactgaattctattctcaattcgttcaattcgtgcactgcattagcaggtgaagtatacgccatgaccaagctctttgttggtcataccaactgctgatccaggcccagtacagctcgttttcttctacaaatggcacaaaaatgactgcaatgtttgctctctctgcatctcgttgatacatataacaattagcaagatatattatcagtcgtgtcaataccagttagtctgacaaactaaataaaacccttcagaatatgacacttgtgctcattctcatatgataatacgcctttctgtatttcttgtatgttctaaggcaaaatttgctacaggacaccgaaagattggaccctttattgtgagatacccgaagatcgtgtatttgctcgtggtcacttaaaaaatgtggtaattagctggcggacattggccgcattattttattattttcggtggaaacggagagagaaactttggttaaagacaagtttgcctatggtcaatctctctttctctattcttcttcttcctctctttctgtgtgtcgttggaccctcagctccccagccccggcggcgagcgacatgcatgcgtcgggcggagcgaacagccgctgaatccaggcaccacgatgggcagcggagagggcagcgacgggctggatcacgggctgcttgcttcttgcttgaagatgagaaaccaaaattctgctgcttgaggacgaaccaaacgacaaggagggcttgctgctgctaacaggtggcgtgagttggatggaattgccgcgccggcggcgggtagagcgatgacgacgagccgcggcgaggcctgacgggcagaccgcgatggacggcgtggacggccgactggatctgacgacctccgcacggatcgggccactctcgttgaacgcttgaactcgccgttgcggatccgacggggatggcgacggcggtgtcgaagtcagtggctaagccgcatcccaggttgcccaccaccgcgcagccgctgccatgaccgactgccgcctcccgccagccgatctcctcctccgttgctccccttcctattccctttcaccataggctttgcctcaccgaggagagtccgttttcccctttcccctctccctccacctctgagccagaccaccaccgccaccaccatagccagccggagctgagctctttgtgttgctgttccggctatctccttctcccctttgcttgacaccaccctccccggatgcgcgtcgctcaagaacatcatccgccaccaacgtagccgatccccggccaccggagcaccaacgccctactctctccctctcctctgttactcggctggaagcgggaagaagaacagtgtttaggggcattttgttacttacacaacgctttctctctctattttaaccggaaataataaaataataggagaaatgtgcagcagctaattaccactatttatagtacccatgaaaagatcacgatcttcaggtgtctcatagcaaagtctgcaatctttcggtgtcctgtagtaaattttgccatgttctatgagctcccaaataaacggattccaaaaaaaaatgagaaaattgactgttttgcttgctcagtagtcagtagcggagtcgaaataagaaacacaaaaaaatcactactgatggagaggctgaatatagttgcattatttctttttttttttaaaaaaaaaacttaaattcatactaactcaaggcttgttcagttcattgaaaaaaaaaaaaccttaccatttgttggtgtagacaaaatttagcaagattaagggcctgttcactttgatgccattttcaaccttaccaaattttgataaagttgctaaaaaagtggctacatttagtttgttgccaaattttggtaactatataagaaatcctgccaaaattttggcaagttgccaaaatggtaatgccaaaatttggtaaggttttttttatatcaatgtaaacaggccctaatatatgaaggtggtctttagtttgatacattacaaaattttggcatagttttgtgagtagaagtttctagaattaccaaatgttggtagcaatagtgaaagttgtgatggtaaaatcttgtttagtttgttgtcttatcaaaatttggcaatatcaatttttttagagaatggcaatataaaaatttggtatggttgattttggtaacaaactgaacgccctcaagtgcatttttcaaacggtgtcggggctagccctctggattgagatcaagcacattgccataactttggggtattttcagccctccgatctacagcgaacgaacgagagtaatcgctacagtatactacagtatatcgtgaatagtaccctggtacaatacatttgtctacagtaaacaactgcatatcactattgcatactgtaacatcagactcattttactgtgcgtctctaccatttgctcctaaggtcagaggagccggatcctagtcctccggcctccctccacaccttgctgtccaagctataaatgatatggcatcattgacgattgatcttaagaaaatgacactagattcagatattagaattatataatgaacacaatcagtactaatttctgaatatggaatatgtcatggtaacaatctgtgcaatcgcaaattaaccagcaagttatctcaaaggagagatatacagtttcaacaaaagaaacaaaatcagaaaattggcaattgagcagccacgttggttatctgcaagaatgacatttgaaaactaggtcagcatgccaataacacaacagcaaaacaaaagaaaggggaaaattatgagaaattggcaaaacaaagtttaatcaaaatcaagttccttttcctgatcattagtctcagcagctctcttttctaatgattctgtatcttcctagacagattttcatagctcatgaccctaggcctgcttttgccaagaaatattgagaagttgtagttgtacaaatttaattggcacacaagatgcctcaccttaagagattaaaaattatactcatttcatttcgtttcaggttataaaatgttttgactttggtcaaagtcaaactgtttcaaatttaactaagtttatagacaaatatagtaatatttacattaccaaattaattttattaaattaataattaaatataattttataataaatttatcttggataaaaaatattactattttttctataattttgatcaaacttgaagcggtttgacttcaaagggagggagtagcagtcatcgtccttgcaactgtattaggacacctggcccaagatcctacggacgaaagagtgaaagatcagagcccaaaaatagagaaaatctatcctacagtattccgtctcttcccttctttctgtgtctcttcccctccactcactctctctctctatcttcccctccactcgatccctctctctgtgactaccacccatgagcacggaggcggcgacgacggcggcggcaacgacggcaacggtgacgacggcggcggtgacgacggcggcggtgacgacagcggcgaagacggcggcggcggcaacgacggcgatgacaacgacgacggtgcaatcaccatcggcccccgcggacgacctggacgacagccggcggagctcctgaccatcacgggcgacgaccgccgttgagaagcctccccatcaagctcctcaaggcgctcctcctcttcgtcgttcttgtcggtagcttcctggccgatgccgccctcctcctcctcggcggcgctggcgcctcctacggtcggggagcggtggacgcggtcaccgggggcgagcgcttggcacaacatgagcgatgaggagctgctctaggcggcgtcgatggagccacgggttcggcggtttggagcgaggcacaacgacgagcgacggaatggcacaaggtaggcaccagatctatcgccttctcttcctcttcctccgccgccgccccgctgctcgacttccctgacccacgactcctcctcctcctcctcctctctcttgggatatcacgctgatacccaagtaccaaggcctgatacctagttatcagtcgatactcaggtaccaaggcctgatacctaggtatcagcttgacacccagggtaccaggtatcagtcgatacccaggtaccaaggcctgatacttagtattagctcgatacccagggtaccaggtatcagtcgatagtcgataccagggtaccagttgataccaatgtaccaggtaccacctcggtaccttacccaagatacgaggattggatatggtggaatcgcaggatagcgtgggcctccacacgaaattgatgaagcttattaaatctctcgggattttagttatcccgtgactgctaggagcaacggaataccgtggggtagcagccctccaaaaatatgcgcatgtgaagtagcaaaaccgaaaaaaaaaattggcaccatatttttttagcaaaactgtaccggagctgagcaccgttggatccaaatcaaccgtgggcagatgtactgctttacaacgggtggcactggtaaagccccacaggataacacacccgatgcgcgccaagctcgccgtgccggtcccctcgccggcgccgccgcggccgccctccgtcacgttccgctgcctccgccccagaacaccacccacccgtgcgcccgccacacccgcgcgcgcccttgggaacggcggcggcggcggcggtggcggtagccccctgggacgcgcatggccgggcgtcgccgccgcgctcttcggcgccgggttcgtcctcggcccgctcctcgacggcatccactcccgcgtcggcctccagctctaccacaacggcgccgtcgatgtcggccccctccacacgcacatcctggtgatgaccggcgacgcgttcacatcctccatccattaacgattctttgcatctttgctctgctcttcgccggagttgctgaaccgtggtcgccgtgccggcgcaggtgccgccgctgctcggagcgttctactccaccgtcgggatgctccagctgttcttggacgagagggtgtcgccgccggcggcggcggcgggcggatcgaaggccaccgggagcccgcagaagacggcggcgtcgctagtgttcgtccatgtccatgctgtgtgcacatcttcgccaccactgatgattcgtttctctggtgactaatgatctccgatcgccgccgccgccggtgcaggttcctggcggtgttcatcgaggcgagcgcggagatgtacagggcgggggtgcccagcaacgtggaggcgtacgtgctgttcgccggcgccgagctcgcgtggctgctcctcgacggcacctggctgggcttcgccgtcgcgtgcctcgtcggcaccgcctgccccctcgccgagatcccactgatcaagtacacatatatagctactagccacctcccacattcttgattctctcttccccccatcaatggcgtcgcgtcgagctcgcgcctagcttgattgattgatctcaccaacgattgcccgccgcatcgtgcgcaggttgttcgactgctggagctaccccaacgccgacgtccagcttcttggcgaggtaaagaacacccgcatcttctcactccctgaagcggccgccattggtgggagctgagctgagcatggttgcgtgcaggggatcgtgagctggacgacgacgtgctacttcgtgtacacgccgttcttggcgaacctggcgagatgggtcaaggcggagctggcggtggacgacgcagctcggtgacggtgaaagcgagcaagatcacaccaccagccatggtgtccaactgatgtgttcattctctgctcggatcagccgctgcccacactggacaacacgcacctgcaggactgagacaattgcagtggaaatcacgcagatcaatgtagagagagatagttgctgaatctcttggggatctgaacatttgacctgaagctaaggtgggattaagtttcatggcccagaattgatctctctcaagtctcaagtaatcgacgttccccatccgtacttctcgatttaactctgtcctaaatcaaatacttttaactttaccatcaatttataaaaagtgatatagtttgacagcatgtggattatatatcatggttactaaaaacataaatcttacctcctccgtttcaaaatatggcaacctaagagaggattagacgcaacctagtataatgtatctatatttgggacggaaggagtctagtgttaaactatataaatttttagaaccgacgataaagttaactatgtgacttactacaaagctgaaacaataagtgatttgaacatagcaagtataatttaaataagattggggggaggggggtaattagcaactgtaatcgatgaactatccatcatcggcacctctgttaatttggaccccatttgtcatttggcaaccacacacgctactactccctctattccaaaatgtttgacgtcgttgacttttttaaacatgtttgaccgttcgtcttatcaaaaaatttaagtaattattaattattttcctatcatttgattcattgttaaatatacttttatgtatacatatagttttacatatttcacaaaagtttttgaataagacgaacggtcaaacatgtttaaaaaagtcaacggcgtcaaacatttagggaaggagggagtataattgatccgctcagtcaaagcccgctgcctccgctcccaagtctggcggtggcagatccgatcctcctgaggccaccgccgccagatctgacaatggagaaggagaggcgaagggaggtcagccgttcccgagtctggcggtggcggatctcccaaggccgtcaccgccagatggacgacagagagggagagacaagggaggccggccgatctcaagtccagtggcggtgtatccacacaacccgtggtcgccgccgctggatcaacaatgaagaggaagaagtgagggaggttggctgctccgaggccgacgaaggcgaatccacccctcccatcgctggcagtggcagatccaccgccggtggccgtccccgttgccgacatcgatgtgtgccacactatcggacctgcctccgcacaccgaactatcatcgatgctgagcttctgccgagaaagagagagggaggaggacgaggatgaggtgatggagataaggtggagaggaagtggaggagaggtggagtggagaggatgaggggagagagagagagggggaactgaaatatttaaaggatgagctcaacctgatgatgggtttgtggcatgcaggcctctcaactgacccgtctgcgaaatatgtttattttcacaaacgattcttgaaccgtcaggatggttcttatctggagaaatcaattatgtagcagtgcgatacatacaaattttgaagtcctaaaaaaatcatctatttagaacggacgtagtactttttttctacgaacttctgtacgcaagatcattgaaatgccgtctcatgagtcatgatccaacgtcatgcatgtatgtaagtacaccacatactccctccttccctaaatatttaacaccattaatttttctaaacatgcttgaccattcgtcttattaaaatttttttgtgaatattattcaaaaacttaagtagtgtatatttaacaatgaatcaaatgaagaattaaaatttacttaaattttttgaataagacgaatgatcaaacatgtgtaaaaaagtcaatggcgtcaaatatttagtgacggatagattacacacaattaaaagatgccattactttacacgctgaaaatgatcggcgtctatataagaaggtaatctaacacggacagccaacgactacgagacgcgaggttgaagacaagtaagtactcctacatgcaacacccagacagagactagggcaacgcacgctagctctcgatcgagcaccatgccgaccaatctctcctcctcctactcctcactcttcgagccactcctcgccctctcctccctcctcctccgccgcctctccgccgccgtccgccaccaccgcggccggaacacgccgccggcaagcagcgacgtccctcctcctcctcctccgtcgtcgtcgccgctcgagctcgacaggctgtacggacggacggtggtggtggacgtggacgcgtggctgctgctgccggccgtggacgcgttcaccttcttcatggtcgtcgccgtcgaggccggcgggttcctccgcggcctcctgcttctgctcgtctacccgcttctgtgcctcctcctcggcgacggcgatggcggcgg

SEQ ID NO: 8492 - DNA, 56238 bp, Oryza sativa
  unsure (1)..(56238): unsure at all n locations
aagtcctgtttgggtctcctggcgcagtttacaaatgaggaaactgtggttatggggtgccaacattttaactgtggtgttacgagatgctcttaatatgatttctataccattggcatcttgctgtcagagaaacaaagatatggggaaaatcgaatgttggcagtgcagtcatggactagtgagaatgggctggggaaccttcattttaagcctttatgtcccccatgaataatttactggaacacattttgtctacaattgctccaaatgtttggaatgcatcttttcaagccaatgtctgtatgactgacgtggtttcaaccattctgccctgcaataggccagaaggaagttgcaccatcaagctgaccaccaattctgtggggaaaaggaaatcctaattcgatgactacatgttctcaatcgcgagatgcaaaatgcttcttgttttgcgaaattcacatttggcctgtagtggagtagactcgattcttcatattttgtaactcgaggagtcattacttgttagactatccacctggaatttggtgacttaactttctgtattggctgtttttaattcctgttttgtttggtaggtcgatgctgttgtttacttggtggatgccgctgacaaggaacggtttgcggagtcgaagaaggaactcgatgccctccttgcagacgattccctagcaaccgtgcctttcctgatactgggaaacaagatcgacatcccatacgccgcgtcggaggaggaactccgctactaccttggtctgagcaacttcaccaccggtaagggcaacgtgaacctagccgactccaacgtgcggcctctggagatcttcatgtgcagcgtcgtccgcaagatgggctacggcgaaggcttcaaatggatgtcccagtacatcaaatgagaggggcttctgctcctcaattgtcaatagcagctgctgctcctgctgtccacagtgggagtgggtaattcaggcctctggttctgtttatcaactctcctgatgctttggagaaacctactgcacctgtaaggaaaaaagtttgtcgtagtggtggatagtgaatgcctgtaagttggtgttaatactagaaatatgacggggtttatttgtttgattgtttatgggtggtgtgaccttattagctagaaaatgtgggttgctggaatcgtttcttgacaacaggaaatgtttcagccaatgtattcacgctatctatctagccagtgatatgtgtatgagcaacttcggtctcttggctgctaacgtctcccctgtgatacttgatcaaaactctttttttttttaagataatggattaaaacacgacctctatattcaaattcttgatactaaccatcaacaaaagagaagaatttcgattcgctaattctatcatataccaagttcttctacctattgtagacgttggtgttatactgaattacaactaatagaaaactatgaaatgaatatagcactatgaaatgaacatagtttaattgattgaattcatttggatttcttacaatggaaacttagctgattgaattccttttgatttcttatgatggaaacttggcatggatgctcccaaatattactaattaattattttgttagtggtagctgttatactcgtagatagtgagacgttcacgatgattttctcaatcttaagttatactaactcaatttcttgaagatgctagggtaggtgagggtaggtgtgcatgtgtatttaggggtgataactgtgtttacctaattttttagaagtgttagggtagtatacgtaatttataagggtgagtgtaagtattatgagtgcttatgtttgtacgtgttttaaaaaaaaaagtaggatagaaaaaaaaaagacatgcactttgcatgcggagaaaaggaaaggcacaaaaacggataacaagcaatgatcttgttatttggcgaccaagatttgatctggagttcctatccgcatctctgggctgtcgacactccaaacagagagcgactcttgtggccagagaacaacgctcagttcatccgttgccttgcctctaccaattgccgaacaaagcaaatcttcattcatctgtggcctgaagaccataaacagataatggaaatgtgcatacctttgtgtgcctcatctacagaacttgttattgcaaaccaaaataaaatagacgtggaaacgttatggattcaatattaactagatgggtaccctgcgcattggtgcgtgagaattacgtgataatttttttgcggggagaattgtgtgataaattaggtgttatttgctctgtgttcccaactcctctccttcgtattccatgcgcacgcttttcaaactactaaacggtgtgttttttacaaaatatttatatacgaaagttacttaaaaaatcatattgatctaattttgaaaaaaaataaccaatacttaatcacgtgctaatggaccactccgttttccgtgcggaggagatgggttcctaacccgaacgaacgcatccttagtatatattagttgtaattttttcttactatatgattttctttcatgtgcttatactttgataaattattcaaacgttataaatacttaagttgtatggtgtgtctttcagggagaagagatacaatttgcactcttgatgaatcatctaaagactagaaataattgagacgatgtgacttaagggagaattagtattaactacaattagtggtaatgacgtttttctttaaaatgtggacttttttcatatggacttgggtgggtatgctagctgtgatgtccattatgaaattgtgttgaacagtagaattttatgatattatgggagtacgactttgaaagagcgtagaagcattactaagggcctgtttagttcgagaaaagaaaaatttagagtgtcacattggatgtttgaccggatgtcggaagggcttttcggacacgaatgaaaaaaaaatattttcataactcgtctggaaaccgcgagacggatcttttgagcctaattaatccgtcattagcacatgtgggttactatagcactttatggctaatcatggactaattatgctcaaaagatttgtctcgcgatttcatccctaactgtgcaattagttttttcatttatctatatttaatgttttgtgcatgtgtccaaagattcgatgtgatgtttttgagaaaaaattttggggaactaaacggggcctaacaaacatcgacgtaactttctggtggaacacagtgctttagtacatatatattgtactttcttacccaacaacactattacctattgtcattttctttttcttgacttttacaaaacatttgattgcacatgttacaacacgtttgattgcacatgggaagaactgttctatcatgctggttggaagattgttctatcatgctagtataaaccgtgctacagtttaaacttaagatgcatcgagtttatgacttcattcttcccaccgatgctagcccgatcgaagccaaacagtaggctcgaagttacaagtacattaccctctccatcccaacaaaaatactaacctaagactcctactattatgaatctggatagattagaaggggtcctactagattggcttttttggaaggagggagtacaccttcaattccaaatacaaggatcttttttttccttctttgtttgaaaagaacctgacatcaaatgcacaccaaaaaccaaatcttgggattttgactccacacacgtagggtttgaaagcttgaagtgccaaaaaggaggagcagatcgatcgattgatctatctacaggccagttgtggccacccattcctcgtcgatcgatcggtcgccggccggcatcctccggtcgccaccgccggctgtgcgccacacgtttcgccccctcctctctctctctctctctctctctctctctctctctctctgatcgccgcggcggcagccggccagcagcgagagagaaaacacgacgccgcttggattggatcggatcggattgccgtgtatatctgccgtcgcgtcgagtcgcgtcagccccagggtggccggattggcgcgacgccgacgcggcgcttgtcgccactcgcgggcgagctcgtggtcgtgggttgccgacgaccgcaagctggaggaggaggaggaaaagaagactttggaattttatgccggcacgaatgatctttcgctcctgtttccgacctggcagggtgctgcgtgtcgccgtgtcggatttctgccgtttgatgccagctggatttcggtgaaaagtctgaagaaaacctaactcaccgtcgattttcttttttttttccctattacgaagggcttgtttagtttggaagaaattttaaccaataaaaatagaaacgcatgcacatatcgattcgtggaaacttttcaagaggtttgggtttgttttgatagtgaaataaataaaagaagcgggattgggatagagaaatgagtgaagattaaatctgccatgttctaaactgattaagatatagattttttttctcggtttccattagcacgcttttcaaactgctaaacggtgtatttcgtacgaaaactttctacataaaagttgctataaaaactctaataaatccatttttttaagattttcacaattaaaactcaattaatcatgtgctaatgacttatctcgttttacgtgcgcacttaatcttcatccttgcagtagattcgaacgggagagggataatggatggttaggattggtgggtgggaaattatttcactaacccattagccaagcaaatcccatgagtggatggaaaattttctatgttttctctccacaacttgtaggaacgagaaattccttttattttgaatatggataagatttgcatattttatattacgcttggggagttactttaccagagcaaaacaatcggaacaatgaaagggaaaaaaaacaaaatagcttagtgctaattctcacgatctagcttggcgacttgtcgaccatagcactcattgcccctacagctgcatgctcgttaagtgccatagcgcatcttcgtctacctcggtagcttcgcgcatggttattgaatactcgttgttccgttccttttaaattgtccaaactatgaggcattttttttagaaaatggattaaaatccggtctctacagccacaatggatgtacacagtccaaactatgaggctaaagatcgtgtcgtaaccatgtcgttgtgctttggtgatctgcttcgctaccacaccaccaccaaaggaaggaagtggagtttgcagggaagcaatgcgcctgtcgatcgcgcttaggatcgcccaccatagctaacgtgactctggacgctggatcaagatatgatcaatggattcatcagcttgatcgtagaagacatagttgtcgggatgtagcagctctcatcggatcaagcggttagccatccagcacctccaatatatacgctccctatattactacaaaccaaatggtgtttatagaaattaatcttttggaatccaaatctcttgttttttcctctaaactgaacaagctctaaaaatcggtaattatagagctttccattcgtagaactacagaagaacatgttgacttttttgtcacatcaccaacacattttgtggtattgattggagtcaccaaccacctcaaccttgaaaaactcctaaggctatgttcggttaatccctgtcagcgattgtggtgtggaattattccccctcaatcccctccaattcctttcaacccccttcaaaccgaacaagacctaattgagatgagttcatagattaaaaccagctagcaaaaccaatttagaaaaattgggataaacatgtctcatggattagatggaagtttttttagacaaatctacaaacaagatttacactcggggcgaagagtgaaggcttacaacgcaaaccgatgaagatgaatgaaccaagataaaaactagacaagaaagtagatgtaatatcgaaagaacgatttaattgagtaattgtgttggttatagattgtttccccaattaacctgtcctaagacggtaaatctaattggagaggcccgaaggggtctccacaagatcctctccacaaatttcttcggtgctctaaatggtagtatatttgatttgggtaacgaagactacccccatgtataaccggagaaactttttttttggaccaaaaccggagaaactttagcgagaaactttagttagaaggtttggcgagttttgaacgtctgatcaaacggcaatctgtctattagacggctcgcatgtggagaaggctactttcagtttcagaacggtgcaagtgtgcaagatgcagacggaaacgggatgggcaacggcaattgaggatgcattacttccaattccatttccagctctggcaatgctccagtccagccagccaacaaaagaaaagaggcgatgtgtaccgtacgcgtataaacgtctccacgtaatacgtacaaaatacggtatggtttctcggcaagcaacgcgtacttgatacgtacagtacaatgcatcggatgcctgtcacttgcttgttacacaggagactgacgaggagtcgacgacgcaagctatgtacagtacgtttgaatgttcattacgtgttccgatacggttgcctaccctgccaaccagttgacatatatgtcttgcttcatgacgcagcttagagacacaaatgggcaatatagacagacaccagtgccaagtcctgagtccaattaataaatttctaatatagtttagagtctaattaattgacatttgatcttcatctatctgaggtccttctttttttagtgtcaaaacagaaaatcagcatctgggtgtgacacttgtatggcattccactctgggaagaaagaatcattgctgcagtagcatacagcagcactgcagcagtgtggtgtgtaaaccaacaaaatgaatgaacggatggatgggatctaaccacgtccgcgaatcacatcaatctgacgaccaggaaggctccgatcacgagcagcttcgccggcaccagcaggacgacgagcagccgggcgtgcgcccgcgcctgcctcgccgtctccctcccgccctccacggcggcgtccaggagcacgccggcgccggccagcgcgccgtgcgcgccgagcggccaccacaggaggagccgccgccaccgcccccgccgcgtctcccggtgccgccgcacctccttgcgcaccacggcccggacggagcggaggtaggagttcacgtcgtggtcgcggtacacggcgcccttggggccgtaggcgctcttgtccttgaggatctcgagcgggtgcggcgagttgaagaaggtggacatggcggaccggagccgccgcagggaggtgcccgacgacgacgacgagtcgctcaggtggtagatgccgctgtccggcgggaggaggtcgtggtgcggggatagcctcttgtcaggttgcaggatgaacatctcgcccattggggcgtacaagagcttctgcagtgaaatccacagagagggttacaaccattgttggtcaattttggtaacatgcaaacaaagtgaacattttacaaacaagaaaactaagtggtgatgggtgatgactataagagctgcatattgcagtactcagtaaagatccaagtgttctttgccaatattttttttaactacttttacttttgttttaaaaagaagtgttgtttttcagtccctgaaaatgtgacagccaggacatcatgctagatcttcaacctgcagggcacagttcgctgtataattcaaccaactgatgggtttattatttgttctccatgtcaaagcatcagataaattttctttgtagtcttaagtcattaaattcaggaacatatactgttattaccacataaatgagctaatttatcaactgaagtggattcatgaatctacctgatttgtgaggcatgggtgactgcggaaattcccattggctagtttcagaatattagcaacatggtcagggtagttgcacgaaaagactcgaggaacaatatctcgatgcatcgtgactgactgaacatgattccttggcaatccaagtttacgaagcaagtggtcaccgccacacatgatgcatggtgcaccaaatgttattacaggcaacaacgacgaagcaggtgctgctcctctcatcagtagcattagattcacaagcaaagccagactaccaccaagagaatgaccagtgaagcgtaacgttgcagatttaccagaacttctcaagtgagatttgacatatggcaacatttggtgatacattcccttggctgcttcatatattcccctatgaacgagcacatcgagtccctgcaaaacatcacaaatgtcttagcttacataaatttgtcaagcccttcctacgtctaatatgtcaaattaaatgtttgtgtgtcaatttaatacacttgatcaatccatgatgcacatctaaataatgaagctgctggtgcacaatgaatgaatattggcaagattgattctatccatcattcatgagaaactgagaaatgtaggatggcagactagtaggatacctcaaatttaactggttcaaataggaggttggcctgccaagaagcgattgactccgagccctgccaattaacaataaaaaattgatgaagatgaaccagggaaagtgaaaattacacgaatcatgatatattgggcagaagacatacctgaaccacaaagtatcttgtgctgccttgatcatcatcacaaatgaaccattcgcaaggacaagatcttgaagagttcagatcatctgcaacagcttgtcttgtttcttccttggcagcaaccatggaggtaactgaatttgtagtggccacaaatgaagcttcatccatggttaaaccttcaccactctcaccgtttacaatggccatgatggttggatcgttcttgccatcattcctggaaccaaagggaacgacgcccatagcccgtgaatgtaaataagaggcagcagacgacatgacatggtatgcgccgaaggggtttacccccaacccactttctttcttcttattgctccctggctcagggttctctacaacttcagattcttgatctgaagattcaccttcctcagtcttcagctcctgcttctgatcaacaccagttttggctttctcttgtactgatgaagtcacaaaccgcaaattgtacctccgcagcaattttggctgagaaagcaaacagttgctaagtcaggcaatgaaatactaatatcacacagaatgtcagaaaggaaacttgcaaattgcaatcataatctagttatgaggtactagaaaggtaattgtgtaattaacaacatcacgattaccacaccaaataagtatccatatgccagaagcagcagctcaagtgaagcaaccaattgaaagacaacaatagacaaatacaactcaggcacagatagctccaagagtataattgcattaagcagacctggcactaatccatcaaatccttcaggaagaccccactataaggtccaaaagcacataggggaccaggacgaataatcgataatggcataatgcataattttgcagaacagtaaaggaaattcttcactatctctgtaaaggaaatgcatagacaatacgtagtagaagccaaaacagactaaataagaattcttagtaacaccacaacctgcatttctcttgaatttacagcatggacaaggactcaaccatgaacagttcatcaccagcaatcgaattggcgtgtagacaatccaccaattattggctgtgattaccgcatcggtgaattgtagaatagcagtcactcgcattgatgctttcgatcttaccgtgatcttggggatcatgtaggcgatgttgcagaggtaggacatcttggagaactccttggcctccccgagcgacactttcctgaggagcctcgagaaggtcgcgcggtcgaacaccttgccgtcgctctcgtcgtcctcctcgacgccgcagcatccttcgtcgtcacctccaccgcacgaggcgcagcactcgtcgccgtcgcggcccgccgtgagcgcttcctggccgccttctcgagcggctccggtgactcccgcggcttcggcgtccgccgcctccgcccactgtggctgcacccgcagcatctgcagcacccagttcccctgcttccgctcgtccgcctctgcctccgccgcgcgctggctcctcgcctcctcgccgcgaaccgcaccaccgaccgcaccgaccctctcccctcctcctcctcctcctcctcctcctccgccgccgccgccgccaccgagcggccatagccggagcagcggcgcgtgcagaacgccccgcgacggctgctgctggtggtgccgctgcgccaccggaggcggtggcggctgcggagccgcggaggcggcggggctgatgccgcggacgaacctcagggcctccatggccgcctcctcctcctcctcctctcgcgaccgcgaggttgccgttaacaatagcggggttaagtttagccaaatcggcgatgatccccgtgtgctccaccactcgagatcaaccaaccaaccaaccaagttcactctcgactccggcgatcgacggcggcgggtggtggtgcgaggagaggagcagcaatggaggagagaaagaggatgggagggaggaggaggcctcctatatatgcggagacggcaacgccatgggagggaggtaggagagaggaaagagaggggtgggattgtttgtgggggaggagagagaaaccgtgaagaaaaatccgtccgtccccgggttgcttgctccgctctaatatctttggtaggctcgttttggcatcttgttgggttcctttcaccctctgatttgacgcattcacagtagttttactgtctgaatttggaattattgtaattttaggagtactctgtattctcacgcctatttcaaaagtcaatatatatactatgttaaggtgagtgaaattttattacgtataacaatcattattaacactacacgtaagcataaggtgtggtgatactgtactatttttaaacaaatactttcatacttttatatgtttttcttgccgtgttataattagtattttattttttaagaaaaactatgtggagtgtagaacgaacattttggtcagaggaaggtatgccatgttagtacgtttaccacgtgccaggacaacgttgtatgcgtacgagcgtatcggatacgagcgacacggcggaggctccatccgttttttgccacctaggccgagccgcagaagatcaggaggaggagtcacttccgtggacgcgtcgtccagcgacacatgccccgggacacgtcagcggatgagaacttctccgaggtatacgtggaggccttgcgtgccccatgcaggcgtgggcctcggttttatccacccacagccaccacaaatccacattgcgagatccggcccatcactggagtatgggccgagttaacttttgctgctgcgtaccatgtgcaagtgcgaatgggcttgagatccatctaccgttggatggtcggacacacacatttgaggaccttgaatagcccatctcccaccatcagcttaaatttttagattaagctgatcgatacatgtaacttaacatggtatcaaagctataggccttgagttcgtatgctgcctggcgagcctcgtgtaaggggagtgttggaatataaaatgaattgctcatcttttcccatcaatttaggtttttggattgaacttttcgatacatggttgaataactaattttgtgataactattcgaggctacaaacgaaagaattaaccattctaagctattcgagagtacaaacaaacgaattaattattacaaagttaaaaatacattaagatatttttctaagaaattcgtaataaatagttttctaaaaaaatattaccatttaggacacagggaagcgtaatagctgaataaaatggttccatctgaagaacacgacctgtgtgctcaactgtcaatagagacacaataacttcttgcaattatcctctgtgctgtttgacattttcttggttagtgaagaacagatgggtaaccgtgtacttagattggtgattacttgcacgaatcagtaaaaaagaaacattttctcggggaataaataccgtagttttcatcacgtcaggtacgtggtaggtttctcaacccaccagatttttcaaaacttgcccataaattcagtagcaagtaatcaacatgtcatttctgaaaatgataacataaataaaaatgattaattttgtgtagcaaacaggggtgaacgacgtacggaaacacggagcattagatcatcgccatgaaaattgagatcaggagatcggtagattatggtcaagattagttggccagcttttgggaaaaaatagatttatgctcaaatcagagcagaattaaggagattgatgcttagtggctactgtgttctgtactaccacccagtcacacacgttacacatgaaaaacagagaagcgtgcagcatgttttctgaatgcgaaatcgatccccgctattatatattcagagtttcagacaatcaggctggtgctatctatctacgcttgcatttcttcctcctgtcctatggcacataagaacgagcatgagaagttgtgaaaagtaattgacaagaacgataatggcttgggtctccatgacctggtgttggcacaggagcttcttgctcatgatggcgtgcgtctgcagctggtcgatcacttgctgcaaatcaggtttacactatgctgttgctgctcttttggtgtcatatctgaaactgaaatcgatttttgtttgcgtttttctgaattctgatgcatgcagacgaagcagcagcaggagccttccatggtcagaagaggagcactgaagacatcgtcgccagagctatcatctgcttcagcgatcgatatgtaagcacatcctcttagcaaacattgactgctcgtaatcaagcttgaacagtaattaacacagtttcagaccaaaagaaaaggagagaaagaattcgagaagaaaattaatgcacgctgtttctgattatgtgctgcgagaaatgtgttttcttgcagatcttcagcgggtgccaggggcagtacaggctggggccggagggcgcgctgcgcgtgccggcggcggcggcggaggcgttctgcggcgggccgtgcctggcggagacgaggctggtgctcggctgcgtcgacggcatcatggacagcttccgcttctacaacggcgcctccgtccgcgacgtccgcctcgcgctcgaccgcggctgcggcctccggggcgacttcgacgtgctgcggcgcctcgggggcgacggctacgactacggcggcgggccacgcggcctcgtgaccacgccggcgcctctgctgctgggcgccgtcgtcgcggtgcttctgtggggatgatcaatggtgattaaggaaattagaactagtttctggtgattatacatgtatgtagacagtacagtatagtatgtactctaccagagttaattaactgcagcactacggtaccagggcgtgtacgtacttcgagttagtcaaccgtatgtgagccttttttgtccattttgtagaatgtccaaggaccactgtgaatttgtttaagtgaaaaataaacaaatatttgctctttgattcaaaggatttaagtttttcaaatcttgtgaaattttaattgaatgacttattacatgtagattttagagaaaacttagcaaaagatccaacctcttagaaaaattcctttaagtttatatctctcattcgattcatatgtttttcctgcgatccaatagaacgatgtgtgtttctccgtgttttcaattcactattttacacttttcatttctatcataattttatgtatttttatttctctgtttttccattcctacgattgaaagagtagtgtccaatgtccttttaacaaaagaagttatttattttgtttattttattatctaagagttaaagtatttaaattagtacttcaacgttgagttgagccattggtacataattaattaaatataaattagtttaaatttaaaattttgattaatactatcttcatccaaaatataacaatttttagttataaatctggacacatactttcatagctaaaaatgtttatatttggaacgtagtgagtataattatcaggcgacaactatgagcgatatgcttgtcactccataccagctaacacgcgcggctatctatcttgctcgccgccacctgcgaagctgcggtgcatggttggtcgatttctgattgatgtcaggagtggcgtactagtgctgctcgttgtcgtcgttgcttgaacgcatcttcgtcgttctccccagcggcggcgacggcggcaccgcctcgtccaagggcggatgcagaaaatagcatgagcgggtgctaaggatctaccacttagatagactaaggatctaccgcttaggtagactgaggaaacaaaaaagtgtcaaaggggcatttggccccactcgctccagttatgtatgcacggagtgagaataaaccttagactattagccacgcgcaaaacaaaaaacatgattagtatgattaattgagaaattaatttgatttaatcttgcaattttaaaaatctaaaaataaatttatttgatttttcaatcaattattatatataaagtttagtactttaaaaagcataaatgaaaacccgatccctacgtttgaacaatccctaagtttttcgtggttacgtggaattactatgaaaatgagtctaaagataacattcctgtagttattcgaaaattcattaagcgcataagaaactgacagtttcgatatgttacgttatccacgcacattttttttaattaactatataataattctctctattattcctttttttcatgaattttagatctatctataccatgcttgattaccaaaaatatataaagcttttgttgtttgatttatattataaaatatatctgtagcgttagcacatgcatattactagtaatacaaaatgaaattgttgaaaagctttcatcactttcttaggtacattacagtaccatatattatcccaggctttacacattcgatcaggcgacaactactagcgatatgcttgtcactccacaccagctaacaaacgcagctatccgtctttctcgccgccgccgtcggtggcggcgaagctgcggtgcgtagttagccaacttctgattgatgtcaggagtggcgtaccagtgttgcccgtcatcgtcgtcgctcgaacgcatcttcgtcgttctcccccgcggcggtgacggcggtggccaccgccgtcggtggcggcgaagatgcggtgcatagttggtcgacttctgattgatgtcaggagtggcgtaccagtgctgttcgtcgtcgtcgtcgcttgaacgcatctttgtcgttctcccccacggtggtgacagcggccgccgctgtcggtggcggcgaagctgcggttcgtagttggtcgacttctgattgatgtcaggagtggcgtgcgtaccagtgctgttcgtcgtcgtcatcgctcgaacgcatcttcgtcgttctcccccacggtggtgacggcggccgccgctgtcggtggcggcgaagctgcggttcgtagttggtcgacttctgattgatgtcagtaatggtgtaccagtgctgcacattgtcgtcgctcgaacacatctccatcgttctcccctgcgccggtgacggcgccgccgcctcgtctaggtaacatttaaatataatttttttttgaaaaaacgcgtgcattcggaaaaaagggaaacaaattgaaaatataccgtttattttttttctctcaaaatattcggatgtaattttagtcgcacaaacataccgttgatactgtcgtctcgcacggtgagagcgggacctaattagcgagaccgacagcctcgccgttaatcactgattaattagtgattaattatcttgattagcaattaattaattattaattggataattaatcactaattattattaattaatcgctgatcagtctatttccaaaacgctgtcgcaccctcacgatgcgagaccgctcccacatcagtttgccaaaaaaaaaatacatcaataatattactgaggaaaaaaatatatgaacggtatattttcaaatttaattcaaaacgagagtccgctgctctcaaacgcaggaggttggttagtggcaggaaagagtattggtgttttggcgcgaaaagagtcgagagggcgcggagccttggcgccactaattcagggagtgggtggcagtttcgtaataaaacttgtttattttccgcgagctcccagaattccgtagaccctctcctgctgcgtgcgtccccaaatcaggagtcctcccaaccctcgccaccggcgccgtccgccccatctccgacgccgcctccccccgaagcgaagcaggtacacgccacctccaactcttccctcttcctcctgtttattcgatggcctcacgcttaggtccatctctgcagtagatctgatcgctaggtcctcctgtttaggactagggtatcagtatcaggtatggctggagagaacggcaaatttccttggctggattttcttaggaggggaactagtggtgatcaaggagggaaccacatcgattttcctgtcgcaaactgaaaacccgagtccgagtggttgtgcccttcttggattaaatgaatcaaggagttaaatgaacttgtgggctggatttaccatgtgcttgctaggcatgatcccgtgatagaactaccaggagtaggagatttgtgggatcccaatttgattgcttgcctgtgtcatcagattggtaattctgaattgtgttgatgaatatgaaaagccatgcgttttgcagagatggatacatcaggacctgcagcattcgtcaatggagagattctgaagatgttcgtcggccgaagagtgcgcacggtggtccaagcccagcgcgaggaaggcgggttgcttatcgggcagtccaccgatggtcatcagctaaccatcaaaggggcctccggtgcccctatgtcgcactatgtggagattattgggatcgctgaacccaatcaggccatccgggctgaagtttgcacagattttggtgaaaacttcggtgagaattgttgcgcctcgcattcttttcctccagtaaatagtactatgaattgttagtctgtacagtttgttatcttttacataaatccagacagtgcctgtatcttgcctattctgatgctcccccaccaatggttttttaacatgttacatagtgattggggttcgttattcttgtgttctatattttcttgagcaaaaaaatgtacagttcgcataaaaatcatactttcataagtacgttttgttacatttttcatcgtattcatgcttacaagagcaaatttctgcctttgtaaatgtgtagctgtttgtgttctatacgaattcccaaatccagaagcattcaaaaactaatattgattgtttaattgttggactttttttacctacagccaaatttgactttagttgtatgggaacttcaatctcacccctatttgtgtcaaatttgtgtctgattgatcatagagtagattttaggatgacatgcactcttgtctggttggtaaaatgtagcttttgaagctcatgggcttaacttctgggaatgagcgatttgcgattgatcatctagagtagatttcaggtggaaaaacattcttcaactaagttgaaaatgtagctcttgaagttcatgagtatacttctgggaatgaaaagctattttagcttatatgcccaatgttacagcgtttctttgtatcaattaataaaataatctcaatcaacgtttcttttgttctcgtctgacacaggacaactagtatgtggtgctaaatctttacatttgctgcaagaattttatcttagacaccctcattacaccattgatctctctatcatgtttgtctgcagatcctgcaccattcaatggactgtgcaagcttgcgaatggccagatgaaggatttgttcctgtagaggtcggcatcacatacaagacattctgccaacaaagcatgtctcatgttcatgatttctctagctttaagatccgtccaactgtttttgtcagtcatctcagtataatcaagctacttagggtcagtattggtgcttattaagacatattaaccttaagctatgtgaggacaagcgtgtgcttttgttgctgaagagcttgtggtgtttgctccttctaagcaaagcaaaccaaagcgttgtgctgcattgttactgtcgcttgcatttggatccttgaaagctgtgtttcttgttatgctctccggtgcatcttgatgaagtgagctagtatgatgctttctgatgaatttcaacatatcaacatagtaacccaaagtttcaaattaactgcatgctcattgtcctgatgcaagcatattactttgattcatttgttttctgtttataaggcgctttggtggttgtttccgactaattttgcacgcatccacccaaacttgggtcgtttgcagcatatatatgctcacttctaaaaaaacaattaaaatgaaggtcgtgactgataagtctgaacattaatcattcatcctcttcttggaacaaaaatcttttcaagcattcaagatcaaaatgcttcttccttgataggagtggattggtattgtgtcactctcgtacctatcacagcgattacgaggcctcatctttttttcacttaaccatagaaacatggtatcttggttatgctatgaacaaatcaaagagacaaaaggaaaaggtttcgtttgggctcctcattcgtgtctcactgcgtttgttaactactaccgacttcagtgtcttcgccgacagactacttgcatcaacaactacttgaaaacacaatggtgatgatgatgatgatgacaattgtcaggctaatctgtttttgaaagcaaaaggcatgacaatttcactgtattaattgaggaggaatatcacctataagagttttttttaatgaatgatatatttcaccacacgcacactaaaaataagcactttattagatcatgcagaaaataacaagaattagtggtattaagttcccatcaaagtaccaaaccaaaggccaaaagatcaatgtagccagtcaaatgcatcacagtgatttgtacagttgtactaatgcacatctgaagtgatggatcaatgtagcattgccacaaaaagatagaaacaaacagagcaaaattttaatttacatcctttgttttccttttcttttttcatgcaagccctcgcaagattacgtaaagtgctatttgaacttcaaaatgtggcgatttggtagttttccctttgaaggcgggttttcgcgtttacgcttttacccagaggaaagcggatgcattgacttggcaagcccgtagctccgggccccgaacccgaggcatccgaggacgaggccctgccggtacggcagcgacgtcgcgcgccgccgcggcggcggcgccgacgacctctccgacgaggtggaccgccgcgccggctgcagcgacggcgggcacgggcacgggcagggcaacgctagcgttgctgtcttcttggaccgcgacgacggccagatggacgggggccaaaagcccgatgacctctcggcggcggcggcggcggtggcggagatcgctgttcgccgtgctgccgaggaggaggtcacgcagcgatatccgccggcgagtgctcttggcggaggacgaggaggaggaggaggaggaggtggaggtggaggaagacgacgacgacgcgaaggagtccgagggctcggcgatctaggctagatcgaggtccgcggcggcgacgccgatctggccgcgggagcagcagcgcggtggcggccgctctccccctcgtcgacgcaaccttcctcctgctccccgaagcccgcctcctcctggcgtatgggcgagaggcacccgacgcggatgcgccccgcgacgaacagctcctcggccgagctcatcgccgcggcgccattccctgcaccatgctggcgcgcggcgaactcgaagtccccgccgccgccgccgccgcatccgtggtcaccgtccacgcccggagcatagtgcgccgccgccgccgtcgtcgtcgtcgtggaggacggcggcgagcggaggatgtagtgcacggggctggccggggcgctgaagaagaagaactgctcgctgccgccgccgtcatcgtcagcgtcgtcgacgtcgtccttcccggcgcagcggcggcgcgtggggcttgacggcgccgtggcggcggggctcccggcggcggcgtgggcgtggctcagcatcggcggcggcggcggagtgaagggaagggaaggcgaggcgagattttgaaggagacgtgggtaagcggagtggttagcggccgggggggaggtatttgtaactgtgcgcgcgcgagtctcgatcgtgggcccagactcgcgctactacgtggggcccgtggcatttaggtaaataaatgatcatttctatttcgtatttatttcgaaatttctaaagtatagaccgaaagaaatttctaaagtttagaccgaaagaaaaaacaaatcataatttaggccgaacgaaagaaaggtgaagatatagggtgtgattggttactggccacaatttactataactaacattagataaattgtgacagtcacaaaagtgtggtgaataaattgctaaccacaaagtgtagcaaagttgacaagaaaatctagtttacgacatgtgggatatgctattgaaaaaatatggcaagtcacaatcaaatggctggctaacaaactgtggtagctaaaactgtggtatggcaaagtgtattccttagtatcaagattgttcttgaattgttgtgagaggagttgcgagaaatgatgagatcgagtgtgaatagttatatttggattaattggtaaatttaggttgtatcatcgaaaccttcgtatgccttttgtacactaaatgagctaatactaaagcacacgtcgccatgcatcatacttgatctattccaaaatgttaagcaacaaactaatgtttgatcagttccaatatttcaaaacgagtgcaatctagcattcgagctgtgtagtgacagtgtgacacacacataagagcttagtgctgagcctttctcaacggcttaattgcgcgtgtagtttataactaattaattactactaatcaatctttatatactaccttaaattcggcggggtcaacaattctttatatgcaggcttcgatgaacgtggcgagcacctgcatgcacatatgcaggctggcacgcacaaacgagaattttttttttttgagggaaacacaaacgagaataattatttacttaattagtgcgaaaaatacaaacacgaacacggtcgagacagtggagaaaagtgagaggaattaaacaaccaacgtcaacagcaacaacacgtagcgcccatgtatagatgtatagtacaggtggtgacgagcaatataatacggagtatatctagctctctcacagagaaaaaaagaaaaggagaagtgtatttgcgagtaatctacgggcacatttaattttatgggagaagcggctataatatatctagatcgagtgtatatcagtactatataggagtgaatcgtagattaatttgtagtggtggaacgtacgtgggtgccaaagttttggcaaaccgctccttcgcaaaagctacatgttagttattaaaataaaaagcacaaaatacaccagtgatatgatggtaaaatcgtagattcatgacttcaactatcacggtttaaattaatcccaatactcacaaatattacacgtacatgtaaattgattttcaatgaggatgtgtcactgatgtccgtctatttgaacgtgtgtacatgcatgtagtggtagtttcaaattactttttattttatttttttcctaagtaaaatttattggctttcaccatcaattaataaattaatgtaaataatatttatggttttagattcatcataagaaatattttcatatcatattatttacatgttaaattatatattttttaggaattaatggataaagttagaaatatttgacttaattatattaggatacatgataagtaatcagaaatgaagggagtatataaatttatgttgtagtttacgtgaaccagcgtgtacattacgaatattaggtacggtgtgcagtgccgttttgatcttgatttcacacataacacaagttcattttgatacatcaacaactttattaaagcatgtgtaagtatagttgtgtgtgtcttttatgtaaatgagaaaaaaaaaactagaagcaaattgagatggaactgttaggatttcttctagccctgatccacatgtatgtcctggaacgatgacagacgcgcgtggcgtgagttcaggtcacatttttctctacaagcataaataaagttgtaggcctcctttcgctttttctccgagagatatcgagacaccctaactaaactatcaaagtaatccttggattgcaagtccaaaaaaggccacatatttggattgagcgagacgatcggtcgatgatttcgaagcctgtcggcttaatggcaattaggacagcatgtttagtggtcggctgttgaacatcagatacaattatctgctaatctgcaagcgacaagggaacaaatgtaaacccctttagatgatcggtttgtcctcaatcgatatataaatcactcagcttaacatttttccctctgcaatatttcttctcaaatataagagatagtactatctactactactagttgttgttggcttcttcttgctgcatttttttttctgcgagattaattcgttttattttgcaatgttgtttatgtgtattaattttgggaggtttaataaattgtgaatgagatgctggttgttggtgatgatgaggattagaaatggttgcgacctactgctgaagcagatgtgcacgtcctctccaagctaatcaaacatcaatcgacttggaacgagtagtagcatgggtctgggtcagaggcaggatgatcacttgcagctagcaactcgccttcacgtagcaaattgcaaaaggaatggaagaaagtgatgggcgataaggatttttcgacttgttcaaagtctttctcgaacgatgtgttaattatagttcagtcctcgtcgatctgggtactctcttgtttaaggtaatacgttttatttatgtttttttgcaaaaaaaaaatccctttttttttatcgggaacatgagcttgtgtagcaagatgatgttgtacgtgagtattggaacaaaatggcccaatcatctcctctcagcccaagtagttgttttgggtttggattagggccgttagcctgacgaggccttttcagtttgtacggtctaggtaaccattgaataagccaaatgacatatttgcaaacgagaagtaacttttaaataaaataagccaaatgatatatttgcaaatgataagtaatttttaaataaaacttttatatgtgtgtccttagcgacctaaaagtaaatggtgaaaaataaacttcgatgataaaaacttagaaatcagcttcaaatttaagtttgaaaatttaaattttggccgataagtataagtataaccgaaaaagtggggcctgtaaattatctgcgagatttatgctggcagtccactcgtcagcgaaaaccgccgacagctgttgctgctggattttgaagcgtgattcctatagcggtccattttgaatggacaccattgatacgaacagatcatttcgattttgtatgggatacaaccgtatccgacgaatcgccgatctcatttttgtttcttttttcttttactctaggcggcggttttagtaggcgttggatgaaagagcaacattacaaagggtacaaccagagttcataaaaaccgtgcggttatcaaaacttttcaacttttgaaaccatggtaaatctcacgaaaatcacatagttaccacgataactgatccacggttacctcaaccaaaatagtttggtgaaccctgagtacaactacaccaatatcgttatgtttcttgtttgatgcaaaggccattctctctggtactataaaagcagagtcgccattctctctagtactataaaagcagagtcgccatctgccattccgttcgtgcgcatgtttgcacactccacgtgagtaacaatacaatgctttatcatcaatcatcatcctagactatccctaattatatgagcatggtccattacattgtataagtacttctactacatatacttaaaaaatatctttataggattcttacgaataataaacataattgttttgatttaactagatgaaaattacggaaaatctaaaatttagacatacttacaagttagcacgataattggtgctagtgagagtttagtaaaaagaaaaaagaaagtactacatatacaacagaactcacactaccaaggcttctgcagctaaattgttgctaagcgcttgctcacatatattctccttaatggatataaatcctcttcgaagacagatctaaaccctcgtatcctctctccgttgccttgccgccgcccgagtaggtcactggccagtcgagcggctgctaggaaggcggtggcggggttgttactcggcaaggaccttgcatcctatgttgcgacgaagtggggctgtcgagtctggggttcccgtccacagatttggcagtagcacaggagacggcagggaggtgggcagcggaggcatagcgacgatgggcgggcccacgcctagccacgtgggttggtgtcgggaacggaagtggtcaggagggcggcgggtagcggtgaggctacagtagcggcgtccctttgggcaacggcgggtgtggcgaaggatggtggcagcctaagcgttgatggtcagtcctcggcagggaaaaggtggatccggtggacgtggtccctaggcagtggtggcgggctgggagtccaggaggcggaggaggattccgtcaacggttacggccctatggatgacagaggcataggaatccagcaaagtggaagcgaatcctatcaacttgcgtttggtcggctaattctaactagatgatgatgaatgaaggtgggctaagcggtggtgtatggcgtcagctcacttcaagcggatgaagatggcatcagcgaaggttcgcaactatggcacaattgggcagcggcgactagtcgactaccacttgccaaatctagccgtttcaagagaggatgtcgagaggcagggttgtaccgaggtcgtaggtttttcttgcttcttcttcttcttctttttcttcttctttgttgttgttgttgttgtgtgttcttctctttgttgaggtgtgagctatacttttggttatatatatccttcgtggatgtaaagattggattaatgaaaatccattaacttaaaaaaaatctgcaaatgactactggggaaaagtaattcagcattatcaaagcaagataaaagaaaaaagaacaactttgtataacatggctacatcacatgtccacactcttctgttgaagaattgaggtgcaggatcagttgggagtgtgagctgattcatcagcaactcgtagccaaacccaacctttacaagccctctcgattcgctgcctcgttggcaccggaaggcgctctcgcctctccaaagcgaatcaaatcgatcgatcgctttccccgccaaaaagcaaggcatgcacagcctcgctgaaagcaaaccgaatccgaatgtcgccctccacctccaccgcacggaaaccctcgcccggcgtggattccttcccttcccaccgctgcaacccaccattattctcctccgggcaccacgtcgaacaccttatatacgccggcaaaagcgaagcgatccgcaggcgaaatccttttgattatattcgttggtgtggttgagctcgtcggggtgagtaactagcatcgatgcaggcggcgatgccggcggcggtgacgcacgacgacctgtcgctgcggaaggcgcaggagaggcgggcggcgcggtcgagcgggcgggcggcggtggcgctggtgtcgctctcggtgctctgcggcatcgtcggcttcatcctctgcctcgccgccgaggggtcgcgctccgaggcgtcgcactacctcatgaccgtcggcggcggcggcgccaacgcggcggcgaacaacgggcaggtggacgtctgcttctacaactccagcggccgggcgccgctggcgttcgccatcggggcgttcctgatgctcgccgtcgccatgttcgccgagcacgcctacatgctgctcgccgtcgccgcgccggactcgtccgcggcggggctcgccgtcgccgagggacacccgcgcgtcccctccgaccccgccaggctcacctggcagacctgctgcctcttcttcgtcacctggtacgtcaatgactagtctaccgccattgatgacgccatgattggggtttcgaactaacgctcgatcgtcgctgctgcggcgcaggatctgcttcgggctcgcggaggtgatgctcatggtcggcatcgcggtggagtccggccacgtcagcgactggaggaagccgcgggcggtgtgccaccgggtgcgcccgggggtgttcgcggcggcgggaatcctgggactcatcaccgtcgtcgtcggcttcgtcgtctacgtcacggccctgcagacgaacaagctgcgggcgcagcaccccgtcggcggctactacgtcggccacggcgccccacacccgggcatgccgccgccgccgatgccgtacggcccgcacccgcacccacaccagccgccgccgccggcagcggcggcgacagcgccaagcgcgccggagatcacgccggccgcttgccaggtccagccaagccgagcggcgtgcgtcaccaagcagtgcgctgatgcagtttgaaacgagtagaagaatttggagattaagcagagacggtgatgtttaaaaggcatctactcttttccgcgtaacatgttctttcgtgatttgctatattagagcatttgatttgagttatttgcttgtatgtcacaccatttgtttttagcacaaacatgatttgaattgtaaagcacttgattcgtgattacatctcaacaagtttcaatttaatttacttggtctattagcctccgctgtatcatctattcggaaatacgtgcagcatccatcacaaacaggtagaccggagttacagctccttggtggtaagcacggttatcacgcagtaaccgcagtaaaccgtacgaccatgtaaaatttatcaaaatttcaaattatttttaaattttatttgaatttaaggaggttaccgtgaaatttatcaaaatttcaaattatttttaaaatttatttgaatttaaggagattaccatggttttcctttcaccgtacccctgcagtaagagtggttcggttttgcaaaccctactcagtggtattaactaaaaacgcagatgcaaagagatcactagaatagtagaaccgaacaaaccctagcaatatataatttaaaaggcataatggtttacatgtccggacaaactgcaactcagcacactcctgacgaaactcaaaaccagacgggttcaggaatgtgttgtgacggctttgcagaagcttcgactcaggctatacaagtagcaaaatgttgcacaccatactaaaagatgcaaacactacatagtagtagcctgatgaaaaacgcagacttcaaagctttaatccctgttacagacgtagtgatatgatatccgtgaccagtagggaaataatgtaacactggcccccttgaaacctttagcttattgaaccaccagaacaattcagtaccccgcacagtggccacaatttaccacctctggtcaaatctgtcgaggaaatttgaaatcattacttgttgcctcaagtgaatgataccagaacagaaaggatttatggtaagagtggaaacaacccacaataaacacaaaccatgttgaggattgagagtacctgtatttatttgaattgagcagcaccaccgccttggccaaagtcaaaagtagcaccttggggagcagctaccgtggtagctcccattgtatcatcctcctcatccatccagtaggcctcaagaatcttcacagctttttcatagatctcattgttatcatggctctgcaagttctcaatcttttccaaaccttccgcttcatcaatcatctgggaaaagacattcacatcacctgcagccaaggtcttgtcggtttctcctactttaagaatgttctcgagaccctccaaacaaactgtaacgattcttatatctgggcaaataagaagatcacacaatggcttgatgcagccctcgctcaccagatacctattttaacaaaccatacaatatcaaatccaaatgaagcttaacatgaaactatgaaagcggttatatttgcatttcataaagctgaatagaactggtgcaaggtgagtaaacatacttgatttgatcatggctaccgcctgaagtagcatttgagatggcccatgcagcttccttcttgatatcgaactctgccgtttggagcagattcaccagaggaccaataatgccagcatttatgacagcctatggtagtcaatgcagcaaattgttgaacatttcagaacatgcacaatcaacaagatctatagctataggctattataggttaaggacgaaagattgcagctaagtgcacaagttcccaaccgtgtaaatgaatcaatcatccatatgctcccatcccctccccttctaggaccccaggtcccagcagcaacatttggactagtgattaggctgccattgatactttgcgagcaaatcatacataagggtttctttaagttactaccatgttctcagtctttgtacaacaaggatgagtctgctaacaagtgtaatcatcatgaaaggaaaagttgacctgaaagcttgcatggaatatgaacattgtgtggtgtttatggtttggagagggaacacaattaaaactactaagtatgcactacacaaatccttcatgacttagtagaatgatgagcatgtcagtattttttaagtctgtacacatacctgtatctgatctttgttaccagcagtaatatttgaaatagtccagcaagcctctttcttgatgcttttcttgagattttgtgtcaacagacttaggaggcaagggagggcttgatgatcaatgatgcactgtacaaaaaaagggggtggggggagatgatgagatggcaatatggatgtcaaaaaagcaattaactttcatgctgtgatctacagtagatatttcatattatatgaacaccagctttagcatagcagaaaaattctcagctctcctaaaactcaaacaataataagaatacaataagaaaagccaagtttggctgaaacaagtacagcagctatgacttgctgcaaagcaggcaatgaatttttaggcaaactagcaaattgcctatgcgttgcaatgaaaaaaaaatcatgctgtgcacactgcatgctcatcatttgaagaatatgtagactggctcttttcaacccctttatggattccttccctgtagatcttaccaaacaatatggacattatcttttggaggacgtttaaatttattgagcatgtgggtttcacccaacatggagggcccatacattagtgatagaggtagtgctggcagattcactgccaccaccactactaccttttaaagtagtatagagtatagatctaagtgatactgtgagaggacaaatctcaagtatttaagtgacacaaactagacaaatctttaattgatgggcgtaaagagtaggtcaaattgccaaacatgtgcatctacatatgacaaatatgtgcatttatttttcaatagtttttacaaaacattttccacattagatgcaacctctagatttaatatcaactatgatattaaacattttccacaagcctaaaatttaatatcaactgtgatgaacacaacctctaaatattaagctcaagattcatgagtcttagtagttgatatcaattgatacaaaatctgtcagatatagagatgcaaaaaatcaacacaatacctgagtttgcgcgtcatctccagttacaatatttccaacagttcgtagtgcgggtataagcactgaaggtgatggatggcttcatgttgtaaacagtataaaatattaaaaagggtataatgagagtagcaaataagaatctaaaggaaaatggcagaaaattgtaatgcaatgttgtcacttacaggagaagctccacaagacgggggcaaacaccagcttcaatcacggcttggatcttgtcattagtgccatcagataaatatgaaagagcccagcacgcatcagtgagaacttcctcatcattggagtgaataagccgtgccagtgctggaagagcaggcctagtctattgacacccaataaacatcatgttaaggaactgtctttccctactaactacagtagagtacaaagaaactttgtccaaacctgttcaaatgatggctgtggttttcctctgcagaagttcgataaagtccaagttgcattccttagcatagagagtttagtgtgctcattcaactgtgctagcagaggcagcaatgcaccattggcaagaacaaggtcacggcacttaggggaatcaccagcaacattgcccaatgcccatacagccttcaattttttttcaagaggtaaaaacattaataactccaacaatgcactcaatcaaaataatatcaaggaagtacagaaagcacaaagacaagtcaggagatgatcggatacctgctcacgaacatcatcactagaagaaccaagaagcttcacaaatattggtacagccccatgatcaatgacaacctttgtattctccgaagtgccagatgcaatgtttgtaagtgcccacgcagcttcgaactacaaaatttaattcaaaagcaccacagtaataaatccatttttatttgaacctaccagataatgaaaataatattgtgttggcacacacctgtagctgggggaaatcctctctggtaagaaactgcacgaatctaggaacaacgcctgattgaataacctcttcaattggagggctcctctctaattaaaaattgtaatgggtgtaattagtaattaacttttgttcaactattattttcacaaggtaacagcccaaaacatttaagaggtttgtacctatagaaagcaacttgcggaactgtgttgtggcctcaagctgaaggttgttatcgtccgaataaactccaccaatcatagcaggaaggctttcgagctacaacattcaacagagatatcaaatactcaacttcccgtattaaaccccaaaaagggtttaaaagcagtttccttctcttttaggggtggtgcaaagaacagaaaccagaggtagtttaacagtaacataaatgtatgcgttatcaatgtaggacgtctctagaaacatgaccagaaacactactatatgatttatgtgcttccatgtactaaagacaaggttcagtcataaggaaagttgcactggaccctcaatttcaagatagcacaaaaaatagctataaagatataatatggcatcagctcatttgtatgcttctatcaaaacataagatgaaacaacagcaagatgtacactaaaaattatcaggaagatcaatcattattacagttcctggtcacctaactaattatccgcagtgaatccgtggaagatttgatcctaagaccacaatctacatgtcctaaaactaaaactagatcactggagctagcaggcatgtacctggaaacatttcaaacgctaggagttcgcaaccgtgccaactaacagtacttgtaatattgtcaacagaaggagaatcagaaatcaagtgactaatcgaggcatcgaaacgtggtgctaagtgttgcctacatctagcaggaacctaccctcacccgcacgctagtagacatgcgggtataataacaaacttaaacaaatatgccgcagacgaatcaaaaaccctctcaaaaagtgcaatccaatccaacacctacctaaaatatgggatccaggacacgatgggatagcgtcatcggaggcaggggaggggaggggaggggagcgggggggaatcgaggagtatactactcaccttcttatcgacgccggttgcggcggaggcggggacgggggcctgggcctggagcccctcgcggcgcttcttgaggaggctctcctcgcggcggctcttgcggatctccaccatgttgtcctcgcgccgccgcctcccctcctcggcgtccaccgccaccttgtagcggttccgccgcacctccacccgctcgctcgggcgcagcgacatggctggctcgccggctgggtgctctccccccctcctctcctcgcggcagcggcggcggcggagggagaggcaaaaaccctagcgaggcgtcggggcggaggaggagaggaaagaggaggagaaaccctagtggccgcggggaaagggggggagttaaagctcacacaccacgatccaaatattctctgcgatttattttctttttctttttttttaatctgcagagtctgccacaatgacctcttccgcgggccgcggcttcgtcgtgttgagtttcgagaaggaaacgcgtgttgggcccaccgatgattgagcccggcccatctgtacatagtctcggtcaattttcattttttaaaaaaaaaaactcgtttcttacatccttcaaatttagctgtacagatctgttgaagtattagagcaggtacaatagcaggctataagctagctgcaaatatattttaaagagataaataaggagagataagggtagcgggctaaagatttgtagccagctgtagcacggactctaagacgcagtttatatatgacaggtgggaccatgtattaatagtgtagtatgtaactattgtatgaatgagctattagattggctatagatgaattggagctagtagttggctacactattaaacttgctcttaggaattattcaatggtgtgttaggtagtaatattttaggacggtggtagtagtgttgtttgctactctctccctcttagaatataagaatttttaggtttgagcacgggtattaagaaaatatgtagaattaaatgtgtgaaggttgtgattggttgtgaagtggaggtaagtgaaaaaattgaatggtgaagggttgtgattggttgagaagacagtgttggtgaataagttgttatattttgagacaaatcttgagagttataagttgttatattttgggacgaagggagtagtagaaaaatttttagtgaggggcaaataaacttatttctattgcacaaatccttcaaagtcagccagaaattcaatgctttgaaaataaaatgttagcaagaaattattgcattttcaaggtcttatgagctgaagctaatttcaaattttcgaagaaatacacctttctacgaagggggggggggggcaagggggataaactgtttcatgtgcgcatcctccaaattcaaccggaattcagttctggggggaattagctagaaatgcatgcattttcaatgtctcctaagctgcagttgattttaaaatcgaaattaaatttaggctctggaattgcaaatatacaaaaatctttatttatatataatggtgctacaaaagtatacatttaatttagtcgctgttacacttcaatatactgctcatgcacattttgacatcaaggataaattacaacaaaaaagaatcaacaacatttccattcaaaattagaagaccctcttgaatgtgccttctctttcccgagaccaacaattacaagttaacacatttttcactaagaaaacaagatcgttaaaaaaaaagaagcgaaagaaaacaaattaaaaagagaagcttcaatcaccagcgctgctggagcgcgcttgctcgctctcacgcaaagggtcgccggccggcggcacgcgtgcgcggtgcgcgcgccggcacggtggcgggcggcgagagcgatcgatcagatcatgttggagagggagcggcagatctcggacatctcgaggagggaccggttgaagtggtccatggggttcttctcgccgaccttcctgaactgctcgtcgcagccctgcatgtcctgcgccgccatgcccatcatggcgcggatggtgacggcgtccttgaacccgatggcgcgccgcgccgcgccgaggttgtcctcgacgtccaggtacaggctgtcgcacaggtccagcgccttcgccgccttcggcgtcgccgtcttcaccgcctccgtcaggtgcttccgcgccgcctccgtgcgcagcgcgaacgcgtccacctgcatgttgagcaccgccagcgggtccacggcggcgccgtacttggacgcctgcttccccgctgtggcaatgcacacctccgggtacgacgtcttcttgcatatctccgccacctcctcgttctcgccggccgccgtggtccagcaggccgccgccgccacgacggcaacgacgaggagcagcgtcgcgtgcgccagtgatctcgccatgtctgcctctggtcttcactagctagtctccactcggttcccaacgccaacgttgtcgttgcgggatcgattgaggttggccggagacaggggcgagagggagataaatactcgcgaggctgatccgccgtggggcggtgtggtgagggaagcggcaaaaatggcgggtggcctccggctggccagctgcttcgagccgctcgtttggtgtttgctaaaatgccaagctttctatttttgcatggaacccgcggagccgttggaacacaaagattgcagtaaaacttcttttttggaaacattttgcatttcttgccaaattaacacatgcatggttttaacttggtagcaaaagtaaataactaaatactgggaatatattttatctgcaattttgcagaaaatctgtacatacaagtacaacaatgcctagattgcaccatgcatctgcaagccaagggattaaagtgtacatttgtgatcacgccagctgtccatggatgatggggatcacggtcctttgctgtggtcaaacagacctaaccgaaaagtctgaattcctaccgcgccacaaaaattgttgtctaattaatcaagctatagtatacatgtttttttatactcgatcaggtcataaatatttgatgtttacaatcaaatttagacaaactttttaaaattttgataattaattttgtatcaagatgaatatgtaaaatcctacaagtttttaaggcaaatcaattgaaggacttaagaaattaatggttggaatttcaaaagcttaaccaacgtatgacgtattattctaaatgccaaatatttattgccaatctagccatcaaagggtcagtttggtatttgaggtttccgtttattcacatcagtcttctagtaggtatagtgttggcttaaaaacatcgtgggactcactggatgtgtcacatggttaatcctaatcaatatttctgttagaaaacgtttttgcccttaatctgcatacactaaataagagaaaaaaaatagagttgtacacgtacttcctattgttttagcacgtgcacacgagggttgagttttaaatgattgtagtatgcacatggaagtacataaatatttcctttttagataaaaccaataagaaagtattgtacgcaaaattcaataaaaaacatcatataatgatgggttaattggatccatgctattacaaatataccttttagataaatgacactattattcacatatcagctacatgccactggaatttgggaaaattgaaatcgtgtcactctgtcaagtttcccgtcatatccctagacgtgaaacccacatgtcggttccatcttcatccatcctccctcttctttcttcctcacgtatagttgattctaatagagatttttaatagaaaacgtgatggagtggggcacggttccaatttccccaaattttagtggcacgtagccgatatcataaacaatagtaacatttatctagaatgacatatttatagtagcatggatccaattaactctataattattgttggatacttggatgtaccgctgacatgaacttagttatatgggtgtctcatcatacattttcaccacatgaattgcaatgtgtgtgtgtgtgtgtatatatatatatatataaggggtataagggtcgttgatcaaccatccatgtagctttgtaagaacatgttcagttaatatctaagagagaggggttagagggaaagcgattatacagcagtagttggttaggtttacccagctatgtagcttttctaagaacatgttcagttaatatctaagagagatggattagagggaattgagggaagtaatttcacactataaaataggtgtgaactaatctttttcaaaccaaacaaggactaagtaagttcaaaagaaagagtttgaactaaaatataaaaacttaaaagagtagtaggatagacatatcggaattttaaggaccaaactgagacatgagtgaaacttggagaaccaatctggctattcacctaaagtaatgcaaagtatgtcttagtatgggcggtacatgccgactaaaattaaaaccacacttgagctagaagaagacaacccttattacacctttacgtgccaatggcatatacgatccatctaataataaataaatattttctataagtatggcagaaactaaacatatatataacttaatcagacctgctcatcttaaattatgacatggtgaggtaatttgtggttgcgacccataaaacgcctaggtcgttctcttgatctctaacacatgaataaacatacacggaaagtgaaatggttcggcacgacgaaggtcgcataactcttttacccacccggatttaagtcataagttaatatcactgtcatatccttcaccaaaactttttttattttcttaaagacgaccaagtgagtagtccctccgttccaaaatataagtaacaatcacccttaacccaaagttcaagaaacaaatattttcactttctaatctggatcaccctaataatatagtgcatgcactcaatagaccaatagaattaaagatcttgagagtggaggatttagaaaaataataatttagtgaagaagatgtgctaattaattatatgcatgcacaccttatattatgaaacatctagaaaaaaagttgtattatattatggaatggagggagtaacaactaacaagcaagttgttatgatttccaactagtagcttttattcatttaatcgagcaaaaaaaactgcataaaagaaacaacttaattccaatgttttttatcaactgcagtttaattaggctggtcaaatccgccataattaacttcgattgtttcgcagttaagcatctgcctaagttagttatttcaccacaccaactttatgatccattcgttaggtccatggtttgtcctcctactgaaaacctcacttgtaaaggattttgacctctacctgtatacgggccagcaaaagtcaagcaaaccaatacaaggtcatggcttcctcccgccaggtcaaagctggcaaccgaaatcaaccacgggaaagcgccgtcctggacgagattaacgtctctgtctcattcttcagaggaagaaaatgacataacccaaagaattagtaattaattaaatacgatcatggataaaaatgagccttacacatcagttagtaattaattaattacggtcatcagtttactactccctgaaacggtcatcagtttactactccctccgtttcaggttataagacgttttgaccttggtcaaagtcaaactatttcaagtttgactaaatttatatataaatatagtaatgtttataatactaaattagtttcatcaaatcaataattgaatatatttttataataaatttgtattgggttaaaaacgttactacttttttctacaaacttgttcaaacttaaagcagtttgactttgacaaaatttaaaacgttttgtaacctgaaacaaagggagtaattaattagccaaggaattaaactgatgtgttaggctcttgatgatgattcgtttgctgtcgtcgattgattatggaagaggtaaagtgtcattatcagtttggtaggggggagggggggggggggggagggtncattgggcacagggcaggcaaagaatacgcatgatggcacacacatgtggtctacgtctaccgggatatgatacgcatctatggctctcactactgtaccaccctacatggcatcgtcctttgagtgattaaaataattagtagtactattagaaatttgattagtttacgctaacctagtagtagattagtttagtgtgagctatcactgtttttttcttcttccatttcagtaggaagcctaaccggagtagaatatcctttgattacaagcacgactgattcaaagtttgaaattcaagatagaaataatttcaacattaggctacgatcagttgagccactgttggcaacatgtagaaaaaccaacaaaatattaaaaaaatatttatggctaaaatttttacatatctaatatgagtagtttaaatgccaaggttgtgctcgggaggagaggttagcaacctctccccatacacggaaaacgtggttacttattaacatatggttaattaagtattatattaaaaacttaaaaatatattaatatgattttgtacaacaactttcccatatatcttttttattaaaaaacaatgtttaacacttcaggaagcatgcacgtagaaaacaaaagaatagaagttggtactccctcgatcttaaaatataagcaatatggattgattaggacacaccttattactacgaatctggatgtaggaagtaacttatagacattagtaactgaagaatagattatgagaacaaatataaaaaaactcataagttctctttttatttaaattttaaagttttttttagttcatacttgtaccatgtgtctgctcgtggtgaatttcgtggtgttttttttttactggttggtttcacctgtcagtggcagtgccagcttcgagcagtgcaacggaaaagggcaaaaaagtcagcaggcggaaaaaagcagcagcgagaggagagaggagaggggggcgcaggcgcaaaaagcaagctaccaccgcagcccagctcgaggccaccaccaccaccaccaccacggcacggcgaaaggggaagaagaagaggaaaggaaaaaaaaaaaattccgcagctgctacctctcgccgccttcgccgccgccgccgcgagaaacccagcggcgtcccgggaaaccctagccccatcccccaccccgccgcgcgccctcatggggcgtccgcgtcggcgccagtagtagacaggagcggggggcccgccccgtcgccgacgaggggcatccaacgatggcgcggatacggcgcgcgagctccggacgaggttagtgtggcccgatctgagctgagctctccctcccgcgcttgctttgctgctggctttagctaggtggtgtcgtgtggtctcggtgttcgcgctatagctaagcgtagagagcaatccgagggtttagctttcgcggcacggcggcggcggctcgtgcctgtgcggcgaggtgatgcggcgaggggttgggcttgaggggagaaggtgcgtgatgtcggctaatcaactactgtggtggcggtgggggggttggcgggtttgttccaggatcttagtcgtcgccgcttgttcggtagctcaactctcaggccgtgagaatttgggtttggtgtcgcgggaatggtggtcatactactatgtaggattcagtgctctctgctgccgtggcgatactggatatctggaatctgatcgaagaagtggggcttagcttaggttatcaattatacaaatccatgccttggatagctcttggttctcttgtattgagcttttctatgttgattacttaaagctgtaaggcggttttctaccacagaagcactatacattttctggaccttccatgtcaaattgcaccagttcggagataacaaccattgctatacagaacaagtactttttagtctagttcatctaggatttgtatcgaccaaaaatatacgatgagcagctggatgtccctagttcagcatacattgggttttaaaatagtcaaaattgacattagtctgtatttgttgtagcctctgatctaagtttgagtcactacaaatggatttgtgatattgattatcaaattcaggccaatggatcctcctttacaagaaaatggtcattactgaactcttgttactggaatgatgagaattcctgcattgctgggtttgcggaaagtatctactttatgcagagaaaataggcaacatcatgtttaccatgtttggccttttctgggaaagttattataagttttaatttgtgtttatggcttcttatggaaggaagctctttcgttttcttgcaataacttgtctttctagaactaattagctcaagtcaaaaaaatgtttaatccaccaccatagccatgttaattagattatgctttcatgcagggtaataaacatcattataggttgaacatataccatcactgtctctgctgagtttatcaactggagataaacactttgaaaatagctgtcatactatttctggttctttatagctaaataatggtggtttatcgaaatatttacatggtctgtaaaatctttaactacacatgccatgaggtcttatgaaatcctctttgctattgatttacactatctttacttatacttggaaacatctgtgaatgcatataaatatatgcttgtgaacttttgttcaactactccctttgattccaattataagtcgctttagacttgtggacacaaagtaagaaaacagctcaaatgacttagttgacttcattggaaaagatgagccatttatttgtgagaggggtatcatttatttagcaagggcaaattgggaagaataactgcagaaagtgcctagaagttccataacttcttacatttaggaaagagttgagaatgctaaagcgacttatatttggaattggagggaatatttgatttatgtgttagagtgactatcttgaaaggtgattctgtacatcttttgagtgttcatattcattagttgcacctgaccagtgtcaatgtacatacatattctttaaggcgttgacttgttgattcttcattgtactgtttcttggcagggcttttggaagatgctcgaaggaaaaccttcttaaattttttggctgtggtatttactctggaattgattaccagaatcaatttgattgcccaaacatcagctctaaatgtggttgcccctgctatatctccatctcaaagttggagaccagttcgctccatgttgtcaaaagctaaagttgacattagtatttcagtcagcgaacaaagacgaaagaagctatattcatcaccagctactctatctgtgcaccctccaatgtcagcgccaagctatagctccatttctggtgattctgatctctccttttattcttcagacatgtcagataatttggtgcagcataacagacgctcagaagcagaaatttctactcatgtagatgctgcgcctcctgatgcagcctcaaatactagtgcagctccttctggattagtacaacctccagtatctcctcacaatggtatgtttgattgttagagccttggaatcatctaatttatatgattttcattattcaagcatgacttgaaattatatggtgtaaatacaatgcgtaaagggccatctggttattcgagtagatacacaaaatgatgcctgtgtggttatttctgatttgcctttccaagaatttgttctttgattgcacctcaaccgtaggcatttgagtaaattgtgcaattcttttaccaatcaaccaagtgatatcaacataaattattcaattgcaatttgcttattaatagttaattagaaatgttaactctattgtgcatatccacattcacattggaatgtacaaagcttttacttagatctgtgtggtatcatggtgcaccttgatgattcggatcaacattttggagatcaatgctttggatgtttctatgatcgcaaacgccggcaacagaaaacgcgcaaagaaccagaattaagctgaggggataaagctccatcattatcttgcttaagttttgttggtcattatcttttaagttagtcgtcatctttagttcactatctcaagattgttagccatttatctccaagtttgttaggcgtgtcaaatcccttgatctagaaaagggtatccgggtgtaaggaataattaagtaagattaatctaatcaagtttaggcatgtttagagcctctcgctctcgggggaagagccctgcctcccgccagaggatgatcgcgagtttcgcccctaccccctccaaaatcatccactcgagcattcactgctctgacagccgctgcaacaccatcaccatcgtgcgcgtatcactgcatacttgaagcatactgaaatgctcagtgcctgcgatccttttggccaaatccaattctctgaatactggtgtcagatgtgaaactggctggttgttttgtaacctgtttggttggcattgtaccagctttcaataaaggcttgcagcgagcacatggaactttgcaaagtccatgtatgcggtctaagccaatttataagctaggtctcgcttgtgctatttgtcactctgctttttcctgtcatgtgagctattgctattgacttgaacaactggcttctgtgattaagcttactctcattgatcttaacttttactgctcctaattttggcttatctgcctgatcacttgagaactctatagtatgtccagcttatgtggcctaaccacaacccttttttatgctcacattaaacaataagatacaaaatacatgtggtaagtaaacattggtatttttgttgttatcttgtgtaaaataattaatgaattatgtgaagagtgttatatgaaattatagtatggataatatcttctacaataatctgttttatttgaaacatgatagtattctgttgttatcctatttgcagtttattctgacttgcttattgaacatggcccccaaatattgtgggacttcagcttagttttcttcatcccttagtaatactgaagtacacattattgttgtgctgtctgcctaagaaacgtttatgctacaatatggcatcttttctctctcagttatttccagctctctaagatagctcagtgagatttaaccttactgttttccccatttattttgcatttggaattttctcatgtccttggttttggcctatttgatccaaatattttagtcacagatttgttgttaaccattatttgatttgtagtattctctaacagctatagatatgctgttactcacattataatttaccttctgttttaccagcatgttgttcacataacatggtacaaaagagagggagccaagattgccattgtgtttacccagtaagagttgagctttttctccgaaatgtttcactgacgtcaaattggagcgatgaatttctgggggaacttgcttctcaactcagtctgagggttactcagtttgagattgtaaatttctatgttgttggggcttctgggctaaacatcacaatgtatatagctccccatacaggaattagtttctcagccgaccaagttaccgcaatgaattattcacttagtcagcatacagttcagatcaaccctgtactagttggtgactacaatcttcttaatttaacctggttcaggccactggttctagctcctggtaatgctaactgatcttgactttgctctatatattacaatgccgcagtttattttagtgttaaggtagagaacactgtaagactacttcagtttttttttgcttctttaatctctattgtctactgtactagagaaactgaagaatatatatagtatgtggtaatactgctcatatgtttgtgattatcaaataagcagatgattataaaaaaatcactgtgggttggcatattccattctatagaatcaattagcaactatatgccaaagaaaaaacagaaaagaaaagtaagataaaattacaatattcagttccttacatttcttattctgtttttgttctgctcctctatacccttcatgcatacatagagtgcatcttttaatttgcatccagttctactgagatacatatatcttatactacatatgctttgagtttagcactggttgatctagtactctagtgcaaactttgtacacactacacagtttcttatacatattccggtcattaattcttggtgtatcaacttggttatacagttaatgtgctattttctttggtgaacttggctgtgcttcctttgttgatgatgtgacagaaaaggatgtttggtgatatcaatatgatacttcctatgaatgatataaacattatttctttatatttacagccctgtatgctgtccagctatggtttttcttttaacaaatctcctttcctaatattgtgatctttcatttctatttcagctccaacattcacaatatcacctaaaccctctccatctcaagcatctacagtaccaagacacagtgcggataccagcaatgaaaaacacatgagcttgattactatcatttgcatatttattggtgctctaattgctgtcttggtgattgccatgtttatttgcttctgcaaattaaggaaagggaaaaggaaggttcctccagttgagacacgtacgtgcagagttatctattctcagctacattccttgaaaactatagatttgttatacttcatgagatctctaataattgatagtgaagttagatataccatgtccatagctccccataatatttttggtttcttaaccaaatttaaatgaattatgcttattttctggttcattatgcatgttggagcattcttttaggagcattaataatatcagttctcctgtgcagccaagcaaagaacaccagatgcggtttctgcagtggactcacttcctcgcccaacaagtacaaggttccttgcatatgatgaactgaaagaagcaaccaacaactttgatccgtcaagtatgcttggagaaggaggttttggccgtgtctttaaaggggtactaactgatggcactgccgttgctataaagaagcttactagtggagggcaccaaggagataaggaatttctagttgaagtggagatgctgagcaggttgcaccaccgaaaccttgtgaaactcattggttactatagtaaccgtgagtcatcacagaacctactgtgctatgagcttgttcctaatggaagcctagaggcttggcttcatggtatggccaattgagtcaactatttctccttctgaaattgctgcataagttccactcagttgcagttgaatgtggtccttcattgtttaattaattagtggtgatcatgtaatcatgatacaccttgactcttgagtctctgactacttacatttttttcaggtacattgggagctagccgccccttggactgggacactagaatgaggatagcactagatgctgccaggggattggcataccttcatgaggattctcagccttgcgtaatccacagggatttcaaggcttctaatatattgcttgaggatgactttcatgctaaagtgtctgattttggtttggccaaacaggcaccggaaggttgcacaaattatctctcaacacgtgttatgggaacattcgggtaagcaggttgaccaccttgaagtactccccagatgtttctgctctgcttttgcttcatatagctgtcgtgctttcaggtatgtagcaccagagtatgcaatgacaggacacttgcttgtaaaaagcgatgtatatagctatggagttgttctacttgaactacttactgggaggaggcctgtggatatgtcacaaccttctggccaggaaaatctagtgacatgggttagatttctttctgctcttatcttcagctgttattgtattacctttttatatctgaacatggatcctttagtatgataattgtcatctgaagttcactagccatgcatgttagatatttatcgatatatctcgacaaggcaaacaaacaaatggacttagagcaatattactactaatctgtttcctttttcgaaaaaagagagacattttttatgttcctctctattcatatgcattgtgtacatccttgggtggaaagcagatttatgtgtgagtaaatttacacttcaacatttttttatgcctgttgtgccaaagcgccatctatctgtttgtttctttttgtgcctatgtttatgagcttacacaaatgtttcctgatctttccactaaaagccttgtgtcacatcaacctttgctggccaatttgtcaggtttgttcattaggtttttgaaagccaactctcaaacgtcaacgtatttcttgtagacagtaccaaattcttatccctgcataggtgtagagatacttatttgctcaattttgactacgcaggcacgaccaattttacgagataaagatacgctagaagaactagctgatcccaagcttggtggccagtatccaaaagatgattttgtgcgagtatgcacaattgcagccgcctgtgtttcaccggaggcaagccaaaggccaacaatgggcgaggtggtgcagtcactgaagatggtccaacgctctgagttccaggaatccataccaacacctccagcacgacccaatgttaggcagtcctcaaccacctatgaatctgatggcacttcatccatgttctcttctggacccttttcaggcctcagcccctttgagactgagaacatatcgagaacggctttctctgaagatcttcacgaagggcggtaacagtggtggtttgtgaagctgttttgggtagagcctcagagtctctgaccacccatttgaaggctggtggtgcaagtgacctaaccagttttattgggaggtaaatcctgtaaattccatttttattcaccacctgcgaaagaccaaattgttacaagaacattcggtggctttgtatgatggaaatgattttgttccaagttcttttttgctcctatagctcctgtctcatttactgtatggatcatagacatttaattaggtgatgtggttgtattcttcagtgacaaattgtggtactgtagctcgtgtcctgattgaacagcagagagctgcgctggtgaccctacacgtgtcatgcccatggcgagtgcccctctcctctcgtggacccggcaagcgctcccagtcgctgacacgtgtcaccccgctaatactgtttccctcagcctcctcgttttgctcctctcccctcgtcatctcgattgctgtgtgcgcctcacactgtcttctccctaccctctgtttgtctcctccctctccctctgctcatggctggtagggttcggtgctcgccggcggtggcgctggcgctcgtcgtggcggcggcggccgcggccgcggcgacggcgaagctgtacagcccggcggacaggatcctggtgaactgcgggtcgacgacggacgggctggacgcggaggggcgcaggtgggtggcggacgcgacgaacgacacgtggctgacggactccggcaagtcttcgatcatggcggccgccgacgagctggagacgatgctgccgtcgtccatcccctacatgacggcgcgggtgtttaccatggacacggtgtacaacttcacggtgaacccgcgcgaccgccactggatccggctccacttctacccgtcgtcgtacaacgggctggagccccaggacttccggttctccgtcttcaccaccacgggatacacgctgctccacaacttcagcgtctacttcaccaccaaggcgctcacccaggcgtacctcatcagggagtactcgctgccgcgtgtcccggagggccacttcggcgtcaccttctcgccgtcgcccatgatgaacgtcacctacgccttcgtcaacggcatcgaggtgatctccatgccggacatgttcaacaacccggccaccatggtcggcttcgccgaccagaccgccgacgtctccgccgccgcgttccagaccatgtaccgcctcaacgtcggcggcgcctacatcccgccgtccaacgactccggcctcacgcggccgtggtacgacgacacgccgttcgtccagggccccctgcgcggcctcgtctacaacgccggcccgcacttccacatcaagtaccccagcgacgccgccgagtacgccgcgccgccggaggtgtacctcggcggccgctccatgggcagggaccagcgcctcaaccagaactccaacctcacctggagcctccacgtggagtgcaacttcacctacgtcgtgcgcctccatttctgcgagctccagctcatccacggcaaccagcgggtgttcgacatctacatcaacaaccggacggcgcagacggacgtggacgtgctggagatggcgacggagcgcggcgtgccggtgtacaaggactacgcggtgaggctgagcaacgacaccgccgacgagcatctgtgggtggcggtgcacccctcggtgatgctccgcccgcagttctacgacgccatcctcaacggcctcgaggtgttcaaggtgaacaacaccggcggcagcctggcgtcgccggaccccgtcccgtacaagctgctcgcggagaaggagctcggctggggcgggccgccggagttctccaccgacaacccggccaacatggcgtcggtgatgggcggcacggcgggcggcgcggcggcggccgggatcgtggcggccatctgcgtggtggtgtacagcaacaagaggagcaagaagctgggcggcggcggcgccgactcgcacacctccgcgtggctgccgctgtaccactcccacaccagcggcaagtcgtcggggcacatcacggcgaacatcgccggcatgtgccgccacttctcgttcgcggagatcaaggcggcgaccaagaacttctccaacgacctggccatcggcgtgggcgggttcggcgtggtgtaccgcggcgtggtggacggcgacgtgaaggtggcggtgaagcggtccaacccgtcgtcggagcaaggcataaccgagttccagacggaggtggagatgctctccaagctccgccaccgccacctcgtctccctcatcggcttctgcgaggaggacggcgagatggtgctcgtctacgactacatggagcacggcaccctgcgcgagcacctctaccacaacggcggcaagcccacgctgtcgtggcgccaccgcctcgacatctgcatcggcgccgcccgcggcctccactacctccacaccggcgccaagtacaccatcatccaccgcgacgtcaagaccaccaacatcctcgtcgacgacaactgggtcgccaaggtctccgacttcggcctctccaagtccggccccaccacgctcaaccagtcgcacgtcagcaccgtcgtcaagggcagcttcggctacctcgacccggagtactaccgccggcagcagctcaccgacaagtccgacgtctactccttcggcgtcgtgctgttcgaggtgctcatggcgcgcccggcgctcgacccggcgctgccgcgcgaccaggtcagcctcgccgactacgcgctcgcctgcaagcgcggcggcgcgctgccggacgtcgtcgacccggcgatcagggaccagatcgcgcccgagtgcctcgccaagttcgccgacacggcggagaagtgcctctccgagaacggcaccgagcgccccaccatgggcgacgtgctctggaacctcgagagcgcgatgcacttccaggacgcgttcgacgccgccgccggccgccccgtccccgcgctcgacgccgccgccggcagcagcagccacctcgacgacgggagcacggccagcatcaacacgctggccacgtcgtccacgtcgcacccgcacgagccgtgcgtcgacgttgtcttggagcccgacgacgtcgtcgcggagcgcgccaccttctcgcagctcgtccagcccaccggccggtgacagtgacaccactacggcactaccacaagtgaaccatgcacatagatccaaagtttaattagttccgactttttttttatttctttcgaggaaattagttctaattaatgccaaagtttgattagttccgagtttttcttttgtgttaattaatgctaaatctcggtttttggtttatatccctattccggaccagattcattcgtttccgagacctaaatcgagttcatcccaagtccaattccgaaacctctccgaattttcttcctctatcttaagcaacatttggaaaaaaactctccgaattataccattataaatttccagtcacccatgtaacgtgtgttcaacttgcaacgaagctaacccaaacgattaactccgcctcgaccgggagcggatttcaactccgcctcgaccgggagcggattttaaaaacatcccctcattatttgcatgccatctaaatgattataaaaaattttaaaaaaaatgactagatagattaatctaaattaatatatttcacaaacatgctggttaaaattcaacttatacaaactataatgaaaaaacaaatttcattgcaacttgttgaagttaaattttggataaatgtgacatatcctacattcaaaatcctttatattttgaaatggagggagtatatatgttaactcaaatataagtttatagctagttaactctactattaaacatcttctataagtttatatctccctagtagcaaaacacatatttttgatggttggcttttggggtggacaagaaagagagcaagcataacacatattcttgtaggagcttctgctatacgttgggctttgtagttgtgcaggaataatgcggtttttgacaaatcaccatctattacatatatgcaggtaatttttagggtaacatattggcttcagctctgagctcaactacaaagatctgaagaagatggtgagttcatacaagtagcatgtcggaagcttgagacggcggttatgcaactctttaccaattatagatggagattaacaaatagacttcgataaatgtgttctccttatcttttgttttggttggtttctctttaatctttggtggatgtttttgttgttttgttgaactacaaacatcttctaaattaggatggagggagtagcaggatcagggtttaccaaaccgtatggttatcatggttatcatgtgcggtagcctttttagtttttgaaccacggtatatctcgcgaggttaccgcaataacaatcaaaccgcgggttaatggtaaccccaccctaaacggtttggtaaaccttgacagaacccaaccacaagtattctattgctctgtaacgaataaataatggtttcaattctccagaaaaaaaagatgatgggttgatcagggggagtatccttaatgtatgttcattaagagcatgttagtttttcaaactattaaacggagtgaaaactttctgtatacaaattgctttataattttatctttttaataattaattagttatatgctaatcacgtttctcattttagttgtagaagagagggaaaaaaatatgagcatgttttaataatgtactccctccgtttcacaatgtaagtcattataacattttccatattaatattgatgttaacgaatctagacatatatatctttctagattcattaacatccatatgaatatgggaaatggtagaatgattcacattgtaaaatggaggaagtaactattatttattattttatgtattttacacgataaaaatatattagatttatttatatatttttattaagagaagaagtatgtttcatttgtcccggccccacgtatcaatgaaaccagaggatcccaatcctctactcctagcccaccccaaccaaaccatcgtgattcccgagccggacggacccgaaccacagttcacccgtttaggtcgccgcctcgccgcttcccactcccgaaccctcccctcccccctcccgcccgccgcgtacggcgccggcggccacggcgagggccctcgtcgtcggaggccccctaccactggcctggcggggctcacccgccgccccctcctcctctcccgaaggccgaagaggcgcgcctccatcatcagcaggtcagtttgggggtggtggtggtggtggtggtggtgggcgtcgtgtacctgcgtatctgtggacgcgtggggtggccgcacccggtgggaaccaatgccggcctagagccgtcggtcgcgcgcggcgcggatgcggctcttaggggtagagagggggtagggcgaggcggattggctcgatttgttcgcgcatctgttcttttgttttttttccctcgctcatagaaatagcggggatggatagtgttccgcgcccttctgagttggggggcactgcgtatatttgtccaaggttaaactgatagacgcgaggatttatgagatggctagggattgcttatgcggacgctggtagtggtagggttcggaatcgatttgctgctttttcgctctctgtgaaattttagaattttctacattagaaatgccatgaagcatgaaagaaaagaaaatctttagtcgtatatgccacttgtaattcagaactgtatatatatattattgaaatgcgcatgagttcaatatcatcgtgaaagagatattcattggctgcttttatgaacttcatgagaagcatgtttcagtttgtggcttttagggaaatgtaggtctggagccaatttttttgatcgaattgaacatgtcctgtatgatatcgactagtacgtgcatcctagtagcttatatgaactaagggagaaagcaattatgggcctgcttgggagcgattgctgtggcttttggggctgcagcggcacagcgcagccgcttggctgcatctccaaaaggccacagccattgcatcaatcagctgttgcgggagaagctggctagctgctgcagcacagcgacaggcagctgaaatgaacaagccctatggttcaaccaatgacaaaaaatgccctctaggaactatgtttacttttatgtgcaacagcttctatttatttacattgataagcaaacatcactgcagacttgaaatatttcttttgccttcactaaacaacttcttccttctatttcctcagcttttcatagcaaagactagcttgaatagattattatctgccaatggcaagggaaccaagtcctgaaattgatgatgaactattcaatgaagtttatgggaaggcatacagtggtccagttgcaacaactactaacaatgtgacgcctagagtgaatgatgagaagaggcccctcgaacgtgaaaagtcagatgaggaagatggccccccagatcccaatgctgtccctactgacttcactagcagagaagccaaagtctgggaggctaaagctaaagctacagaaaggaactggaagaagagaaaggaggaagaaatgatttgtaaaatatgtggagaatcaggtcattttactcaggtagtcttttctctgaataaattacaactggcatgcttgttgattgagatagacacataatgcattactagactttgtttatccacttgcagtattttcaactctgcagtaagtcagtaacgagttacactcaatattgatactgaatttaacagttagcatattcaaaatggagattgctctgtaaaaagattagtctgctgtagtgttgtatcaacctttattttttatcttgaatctaaaaagtatattataacaaaaataaattctgtgactactattatttgtcattttcttttcctttttcctttcatctttatttatcatttttcagacctttctcctttttcattactctcaatggtgaatttggacttaaaaactttaatacaaaagaaacatgttcagtagtacatccacaagttcattcattctcctatctttcataatttatatgctaatctgattgctcaaccaaacattcgtgcactggataccttaaattcattgagtctctttaaagcacctcagggagttgcctctatacatcttgacattgattacagtttagagacactgtagtgttttatgtgcattgtttgtgcatacttataggccctgtttctttcagcttgggattattataatccagattattgggagtaagctgagagaaacagacaacttattgaaataacttattataatctagagcccagcctattataatctgataagctcatttaggtgagctttttccagattattgggtgaaaaattacccaccataccaccccactccctctttagacttgcaaaccaaataatctaggctctaataatctaggaaagaaacaactaaccgcttattctactacagattataacaatctatcttatagtaatctgactcaataatctagattataataatcccaagctgaaagaaatagggcctcaaaatttgtatttcagcttacaattttttccctttggaacagggttgtccatccacgctgggagcaaataggagaaatgcagatttttttgaaagagttccagcaagagataaacaagtcagggatctattcactgagaggacaataagtcagattgagaaggatgtggggtgtaaaataaaaatggatgagaagttcctgtttgtcagtggtaaagataggttaatactagcgaaaggtgtcgatgctgttcataaaatcattcaggagggtaaaggtaaaaatacttcaagcagtccaaaacgggatcgtttgagatcccctgtgcgaactaccagtgatattcgcccaaggcacactgattctagatggtcacatagtccaagaagtgctccgcgctctcaaagtaaaggatattataacgaaaggcctctagatggccgttcacatgatgatatgcctaagttttcgaaagaatctccacaaggtagggcgctcaagcacactcgtcttatcattgttgtatcggcaaatattaggagccaggcattttagacgatttgagataaagaaaatgcctctgatccctttttgttggttaccaccatctatggtaatttgtttggttccttttgcagctagaggtaagttcaagatttatgtgctcaaatgactcaatgtatgtctggttatgatcagacaaatttacttgaatacaacaagttccatatcgaaaggttttccagacatctgacttggatggcctgcaatttgtgtattgcatctggcattattcctcctttcagtgta

SEQ ID NO: 8493 - DNA, 26832 bp, Oryza sativa
gtggttttgtgaaactacaacaccaaaatatatgtacttaaacgccaagtgtcaaagtgtgggtggttttctgcaacttggactataaaatgtgtaattttgtgaaatttactctaatttctaagcccgtttggtacggctacaactccctaatttaactctagaagttagatctcaagtaaagttagggagctgcttaagcccagtttccaactctctaattttagtcctcagatcgatatcgatcttctctcgcttatctggtgacattagctgctttgctctccagtaaaaaatagccacaaggcattctctccattaattagcatagcagccagtgctctccctccatttacagtttttaaatttcttctacaagaatacgggctcaaacacgcgtaaacatcaccagcagatcacaaactcaagtctccaggcggcagatgcagcactgaagcagcaacatcaacacctgctcaaattatggcagcagggaagggccattgaccacacgcacaaaccagacaagattgatgatatccccttcctagatttcactgttagttagattccaaaaaaaaaaaaaacccaacctagaatgggatgggacatgttctaggacaacgtatttggactgtctagatacgttgtactagaatatgtccaatcacatcctagattaggttttttttttttggacggagagagtagatcatgcttcacaaaaatccaaggtgggccatccaacactccatccaacctaccctagccccaatccccaattgtgaatcacaatcattactgtcatcatgccagtatcaacatcttctggaaaatttatataacgcagcagctaccggaactgaagtaccctgcctagacatccttcaccaaatgcaaagctacggctgccccaccttgtagcctacggtacatccggagcataacctcatccccatttatcctcgtttcatttgaaagctcaacgtacgcttcattgatcctactgaaaacaactcgaagcgggatgcatgcaatgcccagagatttaacctattactgacttcttgtttccggcacctctgtgatttatgtcgaaagatgaaaggctccgcatctttcttgaggaaggcacatgatttttttgtgtgcggtcgccatgatttctctgtttcgagttcggacatcttcctgtggcttttgggctctgttccacctgtgtgtgattccagacatcccaggcttgaagcttaatccttcttcactggtccatcaacagtgcttgtggcagggcggtgatcacttacacctgatgtaggaagaaaacatacaccatccgagactggataacccacaacgggtcttcggttccatatactcattagggaaacaagaggaccagttggcttgtttaatgaactcttgcccaccttttcttccaaaaggataaccttattgattgatatccaaccctgtctttgtgatatctaggctccaatgcatttcgttccatgttgttggccccatgatcagcggagctcatgatttgcttagtaaaatttccgcgttcgcatcgggaagatatgctagctttgctgcagttggtaggtcgccttttgcgtttgcagataggatcctttttttttaaaaaaaaaaaaactaaaatcgacaagagaattgtcgggttggcactgccataaccaaattattttttgaaaaaacactatgatgtagtatgcaatcaaaggacataaaaacagaatcctctcagaaaatagaatataacaatgatcacggtttgtcttgatcttgtaatcgtcaagaaatcgaatcaggggaagagaaaaggactagatgaagagaaacagtgtgtggggggggggggagaagaacaactaaatagattaggtcatggaattgattgttctgaatttgatagatcttcatgaattatggatcacatttggatagtattttgaaaaatctgatcaaaatctgccaaaattcttccataagaattgggtgttttctttaaaaaaatatatatggtgaagtgatcactagaataggcacacccagtataatttttctgggtccgccactgccgagagaaagaaaagattacggcggtttgaaagcaaactctctatcgttgatgtcctctaggatgacagctacattgtgggcaatatttgggagttctcctttaaagacttttgcatttctcatgaaccaaatatgccaccatgtcgttattaaagctccaatatttattcttgcttgcaccctatttccagaggaggaaatatttagaatctagtcttatatgttatcctacatatgatggtttgggattccttttatcgttgagattgattgccagatctgatttgtgagatcacatcctctgaatagatgatcagagtcttcaaaagcgcccctgcaaagtggacaaatccaatcacaaggccaatgcctaattagtaaattctctactgttaaggtcttctggtgaaggattagtcagcccaggaatctttgcttagattgagcttctgctgtccatatcatcttgaaggctgggtttgtctctgatccaatgaattgggcttggtaagaactctttgctttgtagatacctgcagcatttcttgtccacacaatattatcttccccagtttcaatgagagtgatttgtgtgagtaaacttccaagttgtactagctcatgaagagtttcaacatctgttatctgtctaaaggatgacagccaggtgttgtcgttaagctctgttttgactcttctatttttcctgattgccatgttgaataggttgggtgaaatatcttggagcatagaccatggagccagttatctttccaaaacatagttttctgtccatttccaagagtgatctttgtgcaagcttgaaaaagttgatgatctgaatcattacatgggagatacatcagttcccatggtttcgaagagtctttccatttcagccagagccacctttattaccaaggcagaaggttcacactctttcaaatgatctgggggaaattcaggtgataagcaggagtcaatcaaaaatataggaagataagctctttttccttgccgaagcgttaccgtgatatatatattcattttttgctgctcgtcatatcgctgctatgcatatggttagttgcgtgttcttcagttaggttcctctgctgtttggtgttgataaatgtacggttatatatacttgaatgatcccgataataactcgttcttgctggtgatggtaaatatatatacataaaatctgtttgtgtatcagtatcagcagccaaagcaaacattgatgaatcatttgaacaaaagccatattatttttcctcgcctatattatgtaacttgttcttacagccataggagcgtactatgcgtaagaaacagcaataagcttctgttccgtcctctattagctactccatatagcagtaagtaagttgtaagtagtactccagttactagtactataaatttaacaagggcgatggatggatggtgtgttacagtagtataattgagatggaagaggtaggatggatggtcaggcgaagagcttctcggcgaagatgtcaagaagggatagggcctcggcgacggtgagctcgaggcggaacttggggccgtcgtagtggtgcagcacgggcctgaaggcgtcctcctccagcggctcacagatcttgcgcgtggccacccgaacctgcgctgggaacctggactcgccgccggggcacttgctgtcctcccaagcgccgggatcgatgttggatccgccgaagctggtggcctcgaagatgccgtgaagctggtgggtggagtagttgtagaggaagagcgggaggccgggcctgatggccctcaccgagtccctgtacctggatggcaggccgaacagctgcctcttgagattctcctccatcgtctcgttgttgcacacgaatatgtatcccccgatcgcctcctcctttggcaccgactccgacgccggcagctggctcttcttcaacctgctgctcatcttgttgtcgttgctgctgctgttcttcttgttgttgttcctgcctcctcctcctcctccagcaggagcgtcgacagcggccttcttcttcccgttgaacgcatctacgacgacgctgttgctgttgtagttgaagttgaagttgttgttggccggcctgccgacggacttgttgaagtaggtcttggcggtggcgttgttgttgctgttgttggcgagggcgagcttgttgctgctatgatcgacggcggcaggcgagggggaggaccagatggagtcggcgatggagaggctggagaagttgtggaggcggagctggtcgctgaactgccagaactcacgctcgtcgtacccctccatcttctgaattaacagaaagatcgggtctgctgccaccgccgatgggagatgatcgattgatcggaggaggaagaagcagcaacaccaatttactcaattaacagaaagagagaggaaattaaggtggagaggagggagttaatttggcggtgcacgcgggtggatggcacttcctagatatgcttgggttggatggggagatggaatcaaagtgaacacttgctttgcagctaagcaactaggcggacgactgaggactaattatatgaatcggacgcgtagaaacaaagaaataaatggacgaaaagaaattatggttggacgtgcaatcagtcaataatctgatttttaaatttcattgcatccatagacacgatgacacgtacacatagagtggtgaagcaaagtctgcctttttgaacgcgtcaacggcccggacttcttcttctagatggacctgctactatacattcatccatccaccacctgaccgcctaaaatttccttttaccaaacaccgtagagacatcttcaaagatgttactttgcccaataatatctactccctatgtccggatttctagtttttcttacaacgtttgaccattcgtcttatttaatttttttttgcaaatataaaaaacaaaaagttgtgcttaaaatactgtagataataaagtaagttacaaataaaatacttaataattttaaatttttttaataagatgagtggtcaaacgttgcaagcaaaaactcaaaatcctttatattatagcatggagggagtataaaactaagatgttttaaataaaaaaagttgcatattatgatagtatgtttaatgataaatctagtaacttcaattttacacgattgattctttttttttctattagtggttaaaattaaaaatgtttgacttgttactgtactaaaagtgcttatattttgggacagaggaaatacatttttttcacctgttttacgtataggaatatacatgtttcgaaagtacacaagtggggatggaaacttgcaccgaatctgcacagtgagtgtgcgaactaatgatatcgcgcaggccaatagcagagtcggacccgcctcgagttcgtgcagaacggcaccaagtcgcggcttcgcgcaaagaaaatgtgactcgtttcattagctagttaggaattaggattccacaggaagtcgtcgcgacttcttgatgttccggtgagtatactcgaggatggggtccgagttcgcgcacccactatgcgagctcgttgtgagttcgtgtataattctaccaattctttcgaaacatgtataaacctcgaaaactggttaaaatagtttttttaaagtcatctttaactttatcccaaaagactatatttttacttgccacgaattaagaaaatttatctctttaaaattcaaaatatacctcttacatgccgcttcagaatactacttaaggataccttttgatcgaaatgaaggatatttaatttgatttttatcctcatcactattttattaactttgttaaagaaaatgcgaaaataatacaatctttgtgcggcgagagagatcgagtaaatattgtactatgcagattactagtttttgtttataatatgtatgctatgaataactacagtatcagcatgatatgaaagtatttttaagtatacgactctaatgtatggcatgcatgacactaagtatatatattagtactagtttcgaggcgcctacaaatcggacgtccgatttttttagcaaaaatcggctgctgttttaccacatagattagaattgtttcactaaatatatcgaaaatgtttcaatattaaaaaaactgaaacacaaccaaatcatgaataaaacattttgctacaacgtatgaaaacaatgattttcaaaaaatcaggcgttgtttcaccctatataaaaacaatgctttagcaaatagcaaaagaatgtttcaattcactgcactatttgattcatatataatgaaacatcatgagtacacttattgaaatattgttggtggaaaaaaaagaaacatattcccttaatagaacattttcgtaatatacggatgatttgttgcaacggcgcatgtggtgggatagcgcggaggcgcgggagacgacgggcgcctgatttttctactgctgatggggcgctcgatcgtggtcattttcctactagtttaattacatgtgtgcgaagagatgaacaaatatatactggattggagtttctagtagtaggctactagctaatactacctccgttttttaacagatgacgccgttgattttttctgacatgtttgaccattcgtcttatttaaaaattttatgcaaatgtataagatataaatcacacttaaagtactatgagtgataaaagaactcataacaaaataaattataattacgtaaattttttgaataagacgaatggtcaaatatgtgagaaaaagtcaatggcgttatctattaaaaaatagagggagtatatataagatggtggtaacatacatacatacatagaagaaattaaagtggtgtgcatgcttttggttaattagtggcgtaatgagtggtgtgcgtacgtcgagcaagcgcgatgatggcgactcatcacctatctttgaatcttgctgaccgtgacgccgtaccgcgtttaacatttcctccctcaatttaattttcttcggtcagtatcaaagttatgtcatactatatatctttattttaaaatgtaataatcttaagatggatgtatattctagtagttcgataaacctaaacaaactcctttgaaaaagataaatataaacaaaccattccaaaacgacctaaactaaagcaacccattaaaacccaattgtgattccctatttgaatgaccaaaccagccaattgcagggacggatggttgggtcgtggtatcatcctctatcgtccgtcagtctaaacaaactggatccatgcatcgatctccgcccagtccggcttcgatcggctgcctcctcaagcaagcagatcgtctcgtctccgccgcctgtgctagctacggtactcgatcctcttctcttgtgcaagcagtagtacagtagtgtacaggagtactccgtagctagcacgtactgtacggactccatatatatgttaggcgcatgtacgtacgtttctgcttctgcggtctgcctgttagtaatttgctacacaatcacatccagatggtgaacaccgtccgtccctcctacacacacacacacacgcacacgtatatatatgatcagtcggccggcgatcgaccacactatcaaatgccaaattactactctactctactgtctagtagtgcttcctacatactgtagtagaaagtacataacataacatatacctgcagaacgccgtcttataacgaaaaagcacacgctgatgacagcgtagcacaggacaagaatcaatcccttcagataatgtgattctccctcctgaaacatatatatacttctaataaaataccgacaatcttaagagttttactgtactactgtatttcactttgattctgaacaagatcgaaccaataatttcagcttttactagctagtacttacctggagggtgaaggctgtcactaatattgctagaaacagagagccagtctccagcaggttgaaatcaagatccattgggattcccatagtccaggctacaatcacactcactggaacctgccgcacagttcatcacttccatcacaacaacatactaacacgcatgtctacatacatactccactaataactattccctccattccaaaatataagacacaaccacccttaacccaaagaccaagaaatagttattatcaccttgtagtttggatcatcctaataaatgtaatgcatgtatccaatagagttagagaatgtgagagtgaaggattttaaaaaaaatagtaatttaatggagaattgtcatagttaatggcatgcatgtgtatgtatgtcttacattatggaacatgtaaaaaaaagtggttgtgtcttatattatggaatggagagagtatcaatgtatagagcgaggttagtaaattactagtactacgtactagctactcctacataccacaaacatggagatctgtgtggcagagcccaaagacactccgagagtaatatcctgtcgtcacaagtcacaacaaattaatgataagaaagaccaatactctgctgcatatatatatatatatactgtatgtgtgtgctgcttaattatatggagtaccatcttgttcttgagagcaaatatgacggcaccggcatgctctgctgcgttcccaacgatgggaagcaagatgatgctaatgaagctcactgatagttcccatgattctgaggccgcctgtacattcacaagatacgtacaaaaggtggtttagctagcttcattatgcatgcatcttgccaattcactgaagattaatacagtacagtacagcagcatatatgtaaatggtactaggatgatatatatatatactgtacctcaattgtgctcacaacataccctgacaagagcgcagtcaggagagtcatgagagccagccaaatcatggcactcgagaatcccagtactggctcatcatcttgagcgatcactaaatcatcgtcgtcatcatcctcaacctaattagaaaaatataataattaccatttggtgttggtgggatcgaacgtagtacaggacatgcatcgatcaatcacagacgggacgtacctgttggggctcaaacagctggcgatgcgtgttgagttggaagaagaggtaggccaggtaggcgatgagcatgaggatgctgcaggcacgcgacaggtggagggcggcgtcgccggagacgatggcgtggtcgccggaggtgacggcgtacctgagcatgagcggcagggagtggcagaggacggcgagcatgaggagggcggtgttgacgtgagcttgcttggtgtcgtacggctggtgggcgcggaggttggcgatgccggcgaggaagagggaggtgccgaggacaagcagcaggttggagaggatggatcccagcagggagcatttcaccacctcaatctttccttctcgcagcgccaacagcgcgattatcacctccgtcacgttcccaaatgtcgcgttcagtagtcctcccactgcaaccatgcatgcacttcacttgatgcatttccacttgatcctgatcgaaacgaatagctagcatgcatggaattcacttaccagtaggaccggtgtaaaatgcaatctgcctgcatgcatacacgcaaccaattaattgtcacaaaattcaagatcactattataattactctcccccatttatacttataagtcactttgacttttctaaaagttcgatcaagtttataaaaaaatatattaatatttacagcattaaattaattttattaaaactaacattcaatatattttatattttttcttgttttatgttaaaaatattattataaagttaattaaaactaaagaagattaatttagaaaaaaatcagaacgacttatgatcagaagagtatatggttgcatgcatgcatgatgtacattatctgagcatggtaggaattagttaagggagcttactcggtgaggaagctgagtcgctcagcaagaggaacgaggccgattaagctaagcacaaacacccacacctgcaattaatactgtaagaaagctggttgatcatttagttttttttttgaatggttgattatttagtttgtacttaggttgtgtttagatctagaggtgaaaagttttggcgtatcggatatacgaacacatatttgaagtattaaacgtagactaataacaaaacaacaaatgacagattccgcatgtaaactgtgagataaatttattagcctaattaatctatcattagtaaatgtttactgtagcatcacattgtcaaatcatgaaataattaggcttaaaagatttgtctcgtaatttacacacaatctgtgtaattagttattttttttatattaatacttcatgtatatgtccaaacatttgatgtgacagggtgaaaaatttcacagggatctaaacaggcctttagcttagggatgttacagtagtttttggttagtacagtactagtggagtgtatctaggacgcaccgttgccatatggctgagatgcgacgacgaaaaatccgtgaccgtgaggagggggattaatattagcctggccatgcatgtgatgggtgtgtcaagtgtcaacttgcttaattgttgcaattccatgattccatctgtttgtattttaatagggtttcacaggctgcaggcaacttcaccacatgcgcgagcacatgcactcagctagtacaaattaatctaatcgccatcatccggctcgatcttgtattcgtcatgtgttgttggtggagtgttttttttttttggaaaattataaaaaaaaacctgttatgctaagtttaaaataccctcctaatttactttggtttgacgtaatttagtgcatctcttgatgaacatggccccaaacatatttctcagcgacacagtacgcactactcacatctttcttatctcgaatctaacgaacaaaccaaacatcgttgaaacccatgagacaaatgcagtttatcttgcggtaacataaatgttcaagagctaagactcacgaccttcactgcctaacgatacgatgggcgccatgggtagggattatagggcttggccaacaattggagtttttttgtgtttagccccgtagtttttttaagctttagctttttattttgttttttctctcttactctagtataagccggtctggctgattgtgttgtgtaattatacttttttcttctaatatattgacgtgtaattcttttgcgcatccgtaaaaaaaaaaaagggctgggattatcgaccacagttccttgcctagtactagtattgatatgagcatgcttgtggcttgtcataagaatggacgagcaacgtaaattggagagagatggatgaggagggtacctgtccgaagtggaggtaagtggcggcgatggcgaggaggacggcggggaagaggaggaagagcctggtggtgaggaggacgtcgttgagattggcgaggagggagcggagggcggcgcagggaaccttgtggaggagggaggcgtcggagcttttgcggagggaggaagatgagaggttgtgtgcggtgcggcggcgaggagaccccggaaggaggtggtgccgcacggccatctccttggccatcgtattcgactccatcatcatccgcgacactggcatcaagctctagttgttcctcgctcgctgagtcgctgtgcgtggttggttggatgagagagagagagagacgatctatcgatttcatacaaatgcggccgccgtcgtggtgctaggattttgctgtatgtatgtagtgaatgactaattgaggaggaatagtatattaatggagcagctcagctcatcggggtggatgcaaatgtcaaatgctccatgaccagagtactccagcatgcagtagtagaatatggagtacagatattaataatgaggaggcacaagcacaacacaagaagaagcagagagagagagagagtggactgatggtctggtcgaatcccgggttctctaaacttaaacgtacaaaatatcacgcgaataattagtatgcattcttggtagtactcctcctgttaattatgcagttactagtaactaggcaaatgcaaaacctccgtccaaaaggtacctaccatagacaacggagctgcaacagagcagaaagaaaccaatccaatccaaatccagtgaggactgaagaggaggtgagagactgacaaaaatggaggaagctccggtggtctattccgctccttccaggggcgtcgccgtcgatcgctgcttctcttgtcttctattgtgctcccctccctaatccaatccgtacccacccaagggatgacaatcccaatcatattaaacccttttcttcttttggattttttgtctccggtgcaacgcagccaaggcccacacgcttacaaataaagtccatacaaatcacggcccaacccaccacaccaacctatccttttaggcccatttgatggataatagtttggaggaaaacgttcacattatgtcctccaatttatgggttgagtttcatttgcatccctcaaccgtaaaatcaggtatatagcgcccttcaattatcaaaactagatcaaattgggtcccctctcagtggggcatgcatgtcagtggggcccatctctcttccttccttctctctctctctcaccatcctctcctgctgtagggcggtgatgacatgtgcacacatgatggaggcttgcaacatcgggtagaccagcagaggcccactgggcaggggagctcgatgtcagctgctgctctgctcgtccttccattgaggctcggcttcttcccaatcaacatcaacgtgcagaggggatccccattcccccgtcgaaagcagagcgcctcccaccttgatggaagaggcagtcaacggcaacgaccttgcatggctgttccaggaggccgtcctcaacctcaagcgcaacgccaatgaggtcctagctaggcttctccttgccattcatcatcgacacctctgcgcccatcgctattctgcagcgctcgccgtctttggccacatagggaattgtcgtcaaggcgatagtggcggcttggtgtcctcttcatcctcaagggcttgatggtggtcatgggacaacaagcaaacccctttccttggacacgacagcgacagtagtgctggctacaccaggtacttcgaggcctgctaccccgtcatcagtagcaaagccggtgaaggaagggacctgttgagcgtgcatatgttgtgaccacggcgatgattggaggagatattgaactatatgccacttttagatgtggcaattaactgtttgccactagactcacatgtcatagacacatgtggacccacatgtcattgagatatgtgtggcaaatagttaattgccaaatcgaaaagtggtaaatagttaaatgccccttattggagatagagaaaaatggaatcgtaaggggaaagagtgaaaggtcccacatatattttttgtttctattttttcaactataattccacatgaaccccagagcatattagagaccatgacacattatgaaaccaccaaccaaaccgtgagggatgtaaatttaccccgctttaatagttgggggtatccttcatatctagttttaccgttctagtacatgaatcaaactggggctatcgttgagggatttaaagtgaactttttcctagtgtggaccagcgttattgggctggggtacagttaaaaaatgaattgctcctactatagttgaactaacatttttcactctgcattatactccatatgttttgcatatattttgcattatactcccctgtttcttgtctgaggctgagcagattcgagcagggaggccatgcatagggcagaatagatgaaggtgaagttgtgcactctggttgctctgtagtggacagggaagaagagggacatcaccagcttcatcgctggattgatcgtcttgcatacattgaatgattgattgctatactagtacatatacatacacgaagaacatagtatatattgtagctgctgccgtacccatctgctacctgttggagaagatggcctcaagatccttgtagagtcccttggacttggagctccactgcgaatgcgagttctcgggtcccttcgccttggagtccgacgacgacgccaccgacgacatgctccggctcccaccctttgctctgctccccgacgcctccgcctcccctccctgtccctccttgctgaagctcgccttggccatctccctcagctgccccagccacgacctctccgtgccaccaccaccaccacccagtgccactgcctccggctgctcctgctgcttcttcatcttctccagctgctctccaagcgccgacgacggcagcaccagcagcagcagccccacccacgccgccttcgcgccctccacgaacgacctcctgtccgagctcagcagccgcacctgccggtacagcgcgttccactcgttgcacacctgcgccgccaacgccaccgcgaacaccgtcagcatggccagccctaccccgctcccctccgccacggcgctgcccccgctgtccaccagccgaaggcatgcggcgaacaccaacacctcgcttgccaccgccacgatctccaccagctgcacccgcttcttgatgaagggcttcttgagcaccatgaagaagagctggaaggaggcgatggcgagcaccaccacggcgtgcgcccgcgacgagtggtccgacgacgcgtgcgcgcccgccacgatccccagcgccacccgcttcaccgactccaggaacgtgtagtagatccgcagtatgccgaacagcttctgcaggaacggcgcctcggcgtcctcgttctcgtcgtcggacacgatgatccgctccgccgcgcgcttgccgccgctgccgccggcgatctgcgagagcatgtacttgggcgggccgcgcaggtcctcgaagagcgggccgagcttgacgaggcaggcggtgcgggcggggtccttccacgtccactgtccacgcttgccgggtcccagcgtccggcgaacaatctcctggtaccagtggtactcccgcccctcctggtgcacctccttgtactgcagcagcctccccgtggtgacgcccagcgacaggaacagcagcagcgctaccaggaacgccgttagcacccccgtcagcacgatcccgacggccagccccgccgttgtgccgcctcggatcagcgccgccgacgcctgggacacgcagggcatggcgaggatgacgagcatcagctccagcctggggaacacgagcgcaccgacgtgtgtgtggctgtgcctgtggcgcagcttgaggtagaggaggagggtggcgtgcagcagcaggaaggcggcagcgatgacggccagccagaagatgttcctgaagaagtacttccatccgtccagatcctgcagcttcatgatgatctgcgcctcgggcttcatgtcctggttctcgaacagataccggtactccatggcggtgagaggcttgccgtccaatggcgacgtcgacggcatggccattgcaactcctggagctgcaggagggcggcggaggacgtcggcggcgagagcggtgcggtcgagcatctcggagtaggcgatggcgggcatggtggagtagccgacgaaaggatcggcagaggggccttcccatgggaggcgcatgtaagggatgctccactccagccccttgctcagctcgtagtactccaccggcagatttatcgacagccatcgcgacagcgcgaatacctgaatgtggcacgccattctctgaaaccaacatcgccatcgattactgctctacctgctagttactccatatgattctatggaattcgattgtagtgtaccaaccaagagatttcgtgatggctcggatacgaggtaagaaggcggcctctggatgacacctgatgccagtagcgacgatgttgaaacagtcagcagcgtggcgaatgctgcggttgctgtaaaaattaccgtcgtcacgatcgcgatcgatgatgatgatgcaggaacagaatctgcactcaacacagtaaaaatgcacacaattagttcgtgcgtgcatctgtctgctattgctacctaataattcaggttttgacgagcatgcatatatggactctgcttatgctagctgacaattactactacattacgtatccagactcatgttactaagatttactccctccgtcacaaaaaaagacaaaccctggtttccgtgcccaatgtttaaccatccgtcttattcaaaaaaattatgaaaaaaattaaaaagacaagtcacgcacaaagtattaatcatgttttatcatctaacaataataaaaatacgaattataaaaaaaattcatataagacggacagtcaaagttggacacgtaaacctagggtttgcctttttttgggacaaagggagtatgtattttggaacgaagagagcaagtagtaatgatgcccttacaatgcctcacttccagacgatctgacggtaagttggtatttcctgcaacgtcctgagcagagttctcggcgacgtggaccgaaaccagattatcaaccgcctgtatctgcgctgtgtatatgctcttactagcttcatggaagctgaaaaccacgacgaattcgtttaattattaggaagctgcatgcatgcatatggatggatggatagatgggtttgttcttgcctgaggagattgcccccggaaacctgcaccgcagaggaagtgaagttgaagacaggctttgcaaactttatcaaaaccgggatgttgcgtgaacttgttctgacagtggatgtcgccagcttaacagaaggcctttgattatctgaacaaacattctcttgtacacgtgttatcgtattgaaaactgaaagtaacgtatggattgagtggaagtggagcagagtagtactgtatatatgattggcttactaaccgtaaagaaaagtgtatggctctgaagaagaaacaggagttccttgtctgctgattatggaattcccgtcacaggaaacagtgacaacggcggtgttggatgtcctcttaacctggaaatggtatggaatgaaggttgttaacccagcaagcaattaagcagtgggattagctaggacatgacagtgagagtggattagagtaacgtacgaggtatccaaagcggcgattcccgagcgtgcttcggttggttggcgtgagaatggcatcggtggcggtgagagcggcgaggatttgggaggaagaattcatgacgggttcagcgaaggagaggtataccctgaggtccttgtcgtcgttggtggcttccaccaccctggtggcgccctcgatctgaagcagcttctcagggatgctgctgccgatgttcatcgagtcgctccgtctgtctgcagtacatccaatctcgatcgatcatgaataatactagtactagcaagcaagcaaagcaaatgaaagtgtatctagtgtaggtatacgtaccgaagcgcagggtgaaggtagagttggcggttctgatgaagtggtggccggcagcatcggtgcagaagcccttggccatgacgagaatgaggcggccatagagcaactccggcgggatggtgacgtggacggagtattgcagggcagggcggaggacctgaagactcgacggatccacgcgcccgggaccgtacacgctcagctgcaaatgcaaaattccaattaataccgtattacattccattccattcagtaacaaaatgatactactccatgtggtagtgtactagtggctcgtagtacatggcagtaggtggcgttgcaggtgaatccgcctccgccggggcagggctcggagaaggagacgagcaccgacacgttggatccgctcgtgaaccccgcctccgccttcacggacgccgtcggagcaaccgtgtctgcatccaaaccattttcatttctactactataaggttcccgcctgttaaccacattactggagttgtacgtacgagtactgtactagtaacggcaacaatcaaatcaaatactagtacaagtaaaaaggatgggaattaattaaaatgctactactgtactgtctagcaatagtaatagggtgttgttactgaaccaaccaacatcccaggcgtaggtggcgcaggttgttgttgttgttgttgttggtggtcgtcccgcacccgcgcacacagccaaggtgtggttgccgtctttcagccgcgagtacctcaccaccgctgtcccgttgctgctgctgctgtttcttccgcactcccacgccctctccccgtccacctgcattcacgcatgcacccaaataccaacttacattcgcatcttcttcaatactcctaccttttttctcacttaattaacctccttcctacaaaaaaaaaaaccttgatactactactacaatgctgtaccacaacttgttggcttgttgcaaatcaaatggtctaatccgccaagacatttccacctacctatatagtaatctgaccaacatctatgatctatccttgtcatggtagtactatactagtagtatcaccggagaaattgatgcatcgatgaatgcatctactatgaggctattattaactgactaattgctctttcaggggaccaggcacccaaatccacaaaaaggcacggcatatgctaactgaaaccacatttttacacttgattctctctatgcattccactggagtaggagtactccactaccactacctagggagataactcgaggcaacacatgacattagcaactgtaaaaaaaaaagagatttcatttcagacagaagctactcctaggtagcaccgcacgcacacatttggaaaataaaaatgatggatgtcgaaattaatgccgagacatggaatatatgcaatgcgagtgcgtgatgaagcagatgagctagaaaagcatggaatggaagcaggcaggtggaaagtgaggagtgaccttgcaggtgatgaggcaatcctggcacgggcctgatccattggtgtgcaggacctggaaggtgaagacggccgacgccgacctggagacgcggggaggggtcttggagaagctgacggagaccacgtcatcggcagcatcggaggagcacaggagcgccgccgccgccgccgcaaccgcaaacacgacgccgccccagctcttccacaccatcctacgcgcgcctactattatctactcctactccctagctactcagcagcagcagcttgctatgctactccagtactgttgcaagagaaaagctcaagaagttacacctggtgtgtgtcgacctactgagctactcctactgaattcattcatgcaggcacccagccaacagtgttatggactggagtactggacagggagggaagtgaatgcacgccacgctgctgcctctgcctttgggaaaggaaagctagagctccctcttgacaatggcagtattactgacttgagttcagtgtggtgaggtcgcagtgcagtaagtatggtggtagattggaacagacaaaaaatgaagggagggagggagggaataatggtgggggacagacaggaggggagagggggccaaatgcacactggcaggcatcgcatcgcccgccatgtgaaggacgagacggaccatggttgaaatgcatggttggctgcaatgcaagcagaggactgaagaagaggaaatggattggatgatgcacatgaggactagagcgcccaaactgtcttttgtgcatttctaccttttatcctattttccctaatcctttcaataatcaatcaatcctccttcctactcactagctcggatgtaatccatgtcattcgatcggcctagcttgcttccatccatagacaggaagaaaacaacaaccagcgcgagatgcacagattgctacagtacgcgacgatccaaatttgcgagcaatactgatcaactgtggcagcaaggacaaacatgcagctatcaccgatcgaggcactgaaatttcagtcatacggtggcgacatgacgatgttacgtaatcaaaattaaggatgggcctcgctcgcgaaccactgaatcaggatatgatgcctggggattagctcaccatgggtggctgctgtccgtcatttagaccatgcatcaacaacaacacctagtaactcttcactagttacatcgatcaaagatggagtactacatacatgtaagagtagttaatactagtttatttatctcagcgcgctcagttatcatcgaaaaataagggttttctgacagcaaggcatactgctagttgccaaaatgcaatcggtgacatgcaggtcccaaaatatgatggtaggagtatatattggaccagcaagccacaaaccctcttaaacttcttctttcaccctcaccctcaacaacaacatgcatggtcctcatcacagacagattcacggtgctgtgtgaaacatacgagtaactagtacataatctcaaataagcatatgattgtagcacaaaaataggggaatcctctctgaatcttggaggagactccagatctgtacgtgcacatgcagcagctgcctgccccccgcaataaccaccatgcacattgtaggtcagctaacttcatatatactccagtttctagtattcttctattgtgttgtgtcaccttttctacactggtctccaagattcatatcgtacttcgtacataccacagtgatttagtaaagaaattcttaccacaacttgtgttttttccaaaaaaaaaatgcaagtcggaagaacaagaacatgtccattctatttcgtggtgagcgttagtagtagtagacgacaaacaagctaggtgtggtaaggcctgattcatagtgcgcagcggttataaaagaaattgtcatgcatccatgggcagctctgaattaacgtcgtgtcgccagggagaagggggcactatttcagagggtcggtctgtaacatgtagtattgccaatataattcatctgagcatttacacatgtgtacaactgtattgactgcagatcgacgacgagggaatccagtcagagacgtcgttggacggatcaaaccttttctccattgtaaatcaggcagatcactgcagctgtagtactactagtgctggagtcatgtgattatcactgaagattactgcagtccatccggttgcctccgactgatgaatgaagaatcaatcagtagcaagagcatcccaggttagttgatttttcaaattatttatattttaaaagatttaaaaaataaacattccaaagttcttaaaaaaacatactccttctgcccaactgtagggcgaggcatataaatcccctacagtacggcaatctatataacgtggcacctggcgagagaggcgtgccatggcaatttttgcaagcagccccttctcagcaataaatcgcattcccctatagcgatttatcgccaggagggaatggtatggaaaattatcacagcgcaaagttgggtgatggatggagtgtgccatgtcaattttgcaggcggcctcctcctggcgataaatcgcccttccctaaagcggtttatgaccgggagggggtcgtctgtaaaatttggcaggcattgaggaatatatttatgtaaaactttaaaattgtaatttatttttttaatattttaaaaaataaataaaaaatcaggttagttcccggctaatatatgatgaagtcaaattggaccttttccacttgtatcatcattgttgggttctcgaagccaacccatcctgctctaaatagtactccgtagggctgggcctgtttagttcgtgaaaagaaaaattttgggtgtcacattggacgtttgaccggatgttggaaggggttttttggtatgaatgaaaaaactaatttcataactcgcctggaaaccgcgagacgaatcttttgagcctaattaagccgttactagcacatatgggttagtgtagcacttatggctaatcattggactaattaggctaaaagatccgtttcgcgatttacatgtaaattgtgcaattagttttttatctatatttaatgctccatacatatgtcaaaaattagatgtgatgtttttttaactaaacaaccccgtagtattaggaaaaagtacaccgaaggtctctcaacttgttatcgagttagaaaattgtctcccaaccgcaaaactagatatatgacatctctcaactcacaaaacctttgactttaggtccttcgatggttttgatctgatgtgacggttgagtcagcgtgggacccatatgtcaggatgccacgtcatccctttcccattcctcctatttctctcgcttctttgcgcagggccggcgggtggggaggatgccgtcatcgttgaagaagccgcacgcgtccggcgagtcgcgtggccccgacaacccccacagcgggtcaccagcctccgccgcgtgccgcctcagctgctgcagcatgtacttgtgtcgtagcactggaactcgcccacctcccgtcgctcccgacgggtatcggagctcgccgttcggtcccaaccccactgtcacatcctgcgagaggaagaagagatcctggaatgataatgcacacatgcgtccatggtagatggtcggccggcacaggactgcggcgacaacggtgaacggcggcgcgacggtgaaaacggatcggagggcaccggaaggaagagcatgacgcggggaactcaccgaggggcagctcgacgacgacggacggcaaagggagcttcaaacagcgacgaggtcgggtccaaggcgacggcggcgttcgacgctctttggcggcaacgaacgggtggacggtcttcaccttggtcctgcgaatccaacggaggcgacatctaatcttggcgtcgatgggaatgccggtgaggcttggccggaggcggagtagatcgatcgagttcacacttgacagtgacagcggtgttccggtggcttgtggcttcgaggagatggttgccggcggtcttcgtttggcgagatgcggctggagcagcagccggcggcgttatgtaaatcagtgattcagtaaatttaatttgggtatatatgtgcgccatgtccgtcccgctcctccgtctcgctcgccgtagcacttgtgatttccaccgccgtcctcccactcgtcggagcggaggtgcgtccgccgccggattgtcaaacgacccccacctgcaagaccgcgggtttgtcagcgaggtcaattgcatacatgcccatgcgtgcaagctaaaactcacaggatttattttcatggcgggttgctgccaccagaggtaggactaggagttgaagacgaggatacgtcggcgtgggcggcgtgcttgttgatggaggcggcgcggacgatccggtcagcgatgcggtggcgcagcgggtgataggagttggattccaccagcaccttgccgcgcgcgttaacaacaccttcatggcgcaccaccactccaacagaggagagggaaggaggaagggagagagttagaggaaaaaggaaaggtgctaacgtggacaccttgacatgtgggatccacgtgggtcctatgctgactaagccgtcacgtcggataaaattgggtcaaaaccacccaaggacctaaagtgaacagttttgtaagttgagggatgacaatatctatttttacgattggaggatgattttgtaactcgatgacaagttgagggaccttcggtgtactttctccgtagtattatgggcttatggccacatccccgcgtataggtcgagaaatctaggcgcatacatatacgaggcctgggatttgggccccctcaacctcaagggccgaatgtgatctcgctcgctcaacttcttttcggtcccccatccccatccccatgtaagataccatagagttttaatctttgaatgaattcttggcacagcaaacaaggaatgaaatgtctaaaatcatcggataagtggctgaattaggcttggttcgatagtagtacttctagctgtagctttgcgatggtataatgtataacgatatgagttactagggtacgagttgtaattaactattcactgttaataaactcaaaaggtaagtttactttttaaaaaaaacttacataaagtttccttttagaaaaaccacaccgtataacagtttaaaatttgctcacagtaaatgagctagttgaaaaagcaaaacgtggaaacataacccttagggctcctttgaatcaaaggatttatataagtatttcatacgattcaaatcatataggaaattttcctatttggccctttgattcaaaggattgaagctttccaaatcctatgaaatttttatggaatggcacattgcatgtggattttggagaaaatttagcaagagctccaacctcttggaaaatttcctttgagtctatctctctcatccgattcctgtgtttttcatgcgctccagtcaaacgacaattcctgtgtttttcttgtgttttgtaatcctctgttttacacttcaattcctgtcagaatcctgtgttttttctattcttttgttttttctaccctgcgattcaaagggacctttagagtgtgttttttgcatggctgtagaggaaaatttgtagcgcacgtgaaacgagaaaacccattaaattaaaaaataaatacatttgatttttttaaaaaaacaaaatttatataaaaatttattgtaaaatacgtatcatttaaccgtttaaaaaatatattaagaaattgaaatgtggagttaaaagaaaagagctgagcttagtcccactaggccactactacagtcaaaataattgaaaatttgcagctacactattagttttcaaaataattgaaaagtgagtagtttagtggtttcgtgcagtgtgcggagcattgttgtacgcaagcatgcatgtgtgcacgtgggcagccacgtggcaatataaaaaccaactcgtctacatctttgagatgcagacaagagtcaatgccgttctaagaaaaccatgagatatcgtacgagtagaaaatagaattgagtaaattacataaattttctaaatattgactaagaaacagcacactaggagtaggggatatgcttcccagcggtctaaacatgtataaactgttcgttccttacttttttatgtgcccgtgatttagatcccgcgtacctcctaagaggccaaatctaaaaaagcggtttgttctgctccccgctgaaagagctcgggctccgatagatatataatcgtagttactttcttcgggttaatagtatttatcatcttgatcaaagctgatgttaaactttaaaatatttgattatatcatagaaatatgaacgatatgtatagagtagtattagaaaatactacaacaaaattgttgatatttctagttacattataataaaaaataatagttaatgctatttatttgaaacgataaatactgtcaaacctgaagggaatatggtactagtgctacacaaaagcacacagttttgataaattctacttataaatcagacctgacattttagatggtaattttatataatctgacagaaactctaaagtggataaaagaacttgtggatcttacatgtttgttttgggtttttatgattttagttttgtgaagcacggatactgtaatacctaggattatgtatcacgtgtaaagataaacttgtgattttatataacttgaacaacaacgctataagattagtgcaatttactgaataaaataaaatgcaggacaaaacatatagtagcacaagtagtggtagggggaggagcagcgtacgtgtggtttgcgacgtggtgtgcgtgggcggtgcggtgggcatgtatctgcatctgcatgatactagtgtccaccacatattacgggactattttcatctgctttttatttattcattgattgattggtactactactgctagaagaaaaggcggtttaggctgtgtttagttctttttttaattttttttaacatatacgaacatacatttaaaatattaaacgtagattaataacaaaataaattatagattccgtccataaactgcgagacgaatctattaaacataattaattcgttattagcaaatgtttactgtagcaccatattggcaaatcatgacgcaattaagtttaaaagatttgtctcataatttacatataaactgtgcaattgatttatttttatctacatttaatgctttatatatctaaatatttcgcaaccttagtttaggctggtggcagcaaggtgaccgttgcgcgtccccatccaaacccaaccccccgtaccataccatagatatccccaatctccccctctcttagctttctctctctcgagacttccttccttccttcccttggtggtggtggtggagactggagagtggaggcgaaaaaagaaacgaatagaatctctcgtccctcctcctcctcgatctc

SEQ ID NO: 8494 - DNA, 10395 bp, Oryza sativa
tacagtaactcatcaattgaggtcatcttattctagtgcaaaatctacacatcatgcaagtgaaacacatgcttatgaggcaagggttgaggatggtcaattggataaaggttttacctctatccatgtagatgaactagataacagtggcatcagtccagtgtgtgctgtagaatctggaacagtgtgcacaaatttggtggatccacattgtgaagaatccatagatatgactcataatcatgcagatggaaaaagtaatcaagttgatatgaaaaatgttgacgagcctcaagatctggacactagtagactttctaacaagggtatcaaggaaagtgttcagttggaaggtttcatcggttctacttctgttaaggaaaattccaatcatgtacaacctgaagtaagcaccactgttcctgttaaagatgaatcagaagcttttgacagtgcaatagttgcacagaaagatattgtctgttcgtctcctgtccacagtatgaataaagaggaaagtccaggttcaaagggaagaaacagttgtcttgggaattctaactctatccatccaattgttgtacgccctgtcttgcctaaaaattctctacctgaaaaatacagctctgatatggaaactgaaattaaaacatctggagagaaatctggaccaaatggcacaaaaggaacatgaagattctatccttaaaaaggctcatcttatagaggtatgctggtttatgtatttttctactatgatgttaatcttgttctgaaaagaaaggaaattgtgtttaataggtgaatcttaagagggctggtgaacgatctctctataatatgtctctagagaagaggacaaggggtcactgggattttgtccttgaggagatggcttgcatggcaaatgatttcatgcaggtattttctgaattggtctctgattttgtttttccttgtgctattcttagctaaagttcatccttgccaaaattcttgcgccattcttttaagagttgcttacataaactgtatactgtttgtttgtttgtatttaataggagcgcttgtggaaaaatatggctgcagctcgggtatgccattgggttgtgtctaaaggaagggcaaaatttgaggaagcaatcattcagagaaagcagaaagctgttacaagaagccttgtaaaaggtatcatgagtttttggcgttcagcagaggctttgcgaactattggtaggacagctgttattcaagaacacaactcagatatgctggatacgacaaatcatactggtttgaaagctgaaaaatctgaggtaaacaaattgtttcacataaccttttctgaagggtgatagtgtatttgtgctcatgacatcacatgtgttcacattttagtgccatatattgaaggatgttgggtacttagatgttacaaaaaaaaaatcaggagttgagtacactagtcttatctttgccattttacctgctaaaatcatgttttggcagtttaattggtatatactttgttatagcaagggcagatgattatgctgttgtctgtgaggttgacacaatcttggatttgaacagggtaacaaatcctcggaagcagaagagcctaactatcctcgccaatctcgaattcaggattatgcagttaaatttcttgaatataacagtcagacatctggttctcttgtgttggctgaagcaccaccaactcctgacaggctaaatgactttggtaccttgaaagtgtctgatctttcagaagtaaactactgtaactttgtgcagtctttttatgattgattttttttcatcacttttacttcaagatatctcgtactaacgccctgataaacactcaatagacacacttacctttgttttgacaactagaaacatgcatgaatagtgttcaacagcggttgtttctgatccttttgttgaatttcagggaagtctcttttatacagtagcacctagtgcaatgaaggtatacagggagtctgtggaatctctttctgtgcatcataaggtgaagagagttttttctaatgaacatattatgcatattatatttctggtatgcagatagtgtgttaaaatgctggatcacaagatagactggcattatatgtgtaaacaaacagaaatgataaggtcgcctgtattttcacataggactcataagaatattgttggcaatagaagtttgaaatgttcccactgctgtattaaaatatttctgggctgctggcatatgctgcatttaattatcctgttgcttttgttctgtttggatgtactgtactgcatgaacgccaaaaggaacatatgccattttatttgctttttttgccatttctttcatcattactggcgcactttgctttttccatgttcacagtgttggcactttctgttgtcaaatactatattgatagtgttggtaattgcaaaagactggttacattggtctcaaggatgactatgaggcatctgggtgtgactttgctgcaggtgatacttacctgtgccctatgttattaattcctattattatgtctttactcctcctaatgctttacattttgttctcagatttgcctcaggagaatgcttatgaggatgaaggggagacatgcacttatttaccggaagcatatgatggtggtttgttatcacagatgggccataggaaacaactagggcagcagaggattaacggtgcaagatcatatggaataagtactcatgtgccttttgaaccatatttggaaagcaaattatggaatggaaaaaggccttcatctttccttgcagttcctacgaaacgcatccgtacagctgctagacaacgaatcgtaagcccataccctgctggcattggtggaaccacccaagtcacaagtaaaactgatgtttcaagtggggacacaagctcctaccaagatgatcaaagttcgttgcatggggggtccttgccatggaaaaatacagacttcgaatcaacagttgattttgacagacaattgccatatgatggtagggaagtggtcactaaagctaacaagaagaaaaagcttaagaacccaggatataagacttctcaaaatgcagccaattcctgtgccttggcttctgcaaaggttaattctttaagcatgctttcaattattgttgttttcaatgtttgtccaagtaaatttattctcctattgcttcagggccgtatatgtgatcaacgatcccaagctgatttctttactcagtatgaccaggtttttttttctctttgttttcattttcaggttcatttaatgatgctatttagattattttgcaattttaatttgattttaataccatttatgaacattctattcagaaggactttctgaagaagaaatcagactctgaacaatttgattcaaaatggaacattggtaccttcaccccctctaattattgtgcttgtaccctgtgtcatacagcaatcgaactatttgctctatattttatttgagagaaaacattaagtagctcttaacatctcatgtattgatttttattcgtagcttcccatggtggtcaacatgctttgaagaagcttaaattgatgaggcaagggatagatatttcacaggaagcttctcctgttgcatcacagatgagtaacatggcaaattctgctaaaattataaagataatcaccaatagggatcgtgggagaaaaggcaaagcactgaaggtactatgatttctctaactactaccatgcacctttctctttatttgcataagcatcatagttttgtcagtggtcgaagatgggacctttgatctgctgtgttgcacatttttctgctctgtatacctataatcaagttagaaattaagatgattcttttgtcatgtcatgttcctctttccgtgagcaatagaccagtaagctaatttcacctagggcctgtgttgctggttggtcaagatagagagacagactcagctcaggtcaagcaagcaggtggaagtagtaaggttatagttatttcagttgtatggctggaatacagtgaataatgttgaaaagggttgctgatatccaaggaaaagctgtccataagtccagaaccttctcatttctcatccatgatctaaaagactactatctgtagtcacaaatgcatgtcgttttggacattggttcactattcagaatacaaactgtccccaccaatatggcaatattttctgcagaatatttataaccactgatctaattaaagtttggctgcacatatgttgttcttatggtcttgctttgttcctttccatttggtccttttcagtcagttgttttgctactgaatcttaacatgataaacatttcccttttaagttgagctgtcataaatcataatcatgaacatacaagcataatgttgtggacaacacatgctgtacaaacaggatatctttcctacaatttgcttattgaagttctatgcttttggtagatggcttccagcggtggatggtcaaacttcgaggatcaggtttgcatgtgcacatattttttatgcttttggtagatggctttgattgattatgtgttctttaatacgatttgtggtaatgacttaaatatcataaatttcaggctcttgttgtccttgtccacgacttgggtcaaaactgggaattagtaagcgacgcaattaatagcattgagcaattcaaggtaatttaaaatctgggatagcaactttttctatgtttgtatattcttcaaacatgtcctgcaagctctgattttatttccgttcttggttctaggcattttattttagtggtagatgccattaggagtaagttttgggttctgttgtaaactctagttgcagtgaaaaaaaatacattttatcataatctcatgggctgctgttagtgatctttccctgattaacttgagttttgcataccttgtcatgcagtctgtatataggcaacctaaagggtgcaaggagcgttataaggttctcgtggataaaaattctggtgatggtgccgatagtgcagaggactctggttcatctcaacactatcattttacgttgccaggcattccaaaggcatgttataactactcttttgatttatatatttaattgcttgccacatatgcgggtacatctcacaaaaatgtgatgttggacctatttactgtctgatactttctttctgaattcaggtgttgctttcatcagcaatattgctataagtgaagacatgttgagcatttcactgagttcctaacatgttttattcatatgaacatcagggaagtgctaggcagttattccaacgacttcaaggaccaatagaggaagaaaatctcaaggcacattttgaaaaaatgattctactcatgcggcaactgcacgccagacgtagaaaggttcatgtctctccttatgattattctggtcgctttaatttgttggtggtttataatgtataatcatgcaacttattttgttacatttataacagaggttaggtaactcttgcttttttttttgtcttgcaagaattttaggttgtaatggtgaaaccaagtattcattttctagtcttgaacttgtattagttctatacctgtgcttgtctatgtacctctttatttcaatttatgcatgtacctatgctatatttgataatatgatgtggtagcaaactcttccgttgaactatctcacttccatctgtctcaatcatctttctgaactagtaatgctgaactgataatgtattattcacattatgccagagtgctttttttactacccttcttgttgttactgggaagtatttcttatggtatgttttttcttgtgtcttgtctatagggtaatagccaggaactcaagtcgatcatacagccacatagttctcatgttgccgctctaacacaagcatgcccaaataacttatccggaggcgctttgacgtatgtaatgcttttgaatgttctttttgatatttagtttaatatttttttggtgaaaatactaagatatttcatcttcctatatgttctctagttattattattattttatggccctaacagcatccagtggtcaccttcatgttgatgtgtaatgtgtaacaggccacttgatctttgcgacgctgtaagttcaaacctagatgcaagtacgcctggtagtggttaccagagttcttatacaattgggttaacaccaccaaaccatcatggttccaatggccctacaactcccaattcaactctgaattccaggttatcagggtcacctggtacggttctgagcaacaattttttgccgccttcaacatttagtgcctcttcaaggtaaattcttaattcttcgtagcaggtattaagaagaacgcatgacaaaattcatttaaaaagttctcgtctgtgcaatttcttctatagggatgctcagaaatatggtgttcctagatgtacctctttacaaagtgatgagcaacagaagattcactataaccagattcttagtggtagaaatcttcagcagactggaggttctgttccaggagcatttcctcctggggttgatcgtggtgcacgtgtgatgcctggtacccatggtatgggcatggtgtcaggactaaatcgaggtatgcctgctgcaactgtaggctttcctaggcatagttcccctggaaagccaaatgtggtttcacctggaaatgtattagccaacagtgggcaaggagcgccaaacgcagtaaatgtccatcctggagccatgtctgcccctggaaatccaaccttacggccacataatcctatgcaggcgcttcatgtgagttaaccttttatttattatctagttaaatcttggtgctcacacagagtcagacttgagttaactgcatgttttaacttttaagctcttctccattggttatcatctctcctataaagaaaagaatgggagatttttactggtgtctttgcttgtctttccagttgcaccctccaagcaatccatgcattatttgttattgcataagtgatgccagcatacttatgtcttatataaacaaattcatgagtactgctcccacttagttgctttctatattttttattgaaccaatgttgccagcaaacttatgtaaatgagaagttgcctttatcgaaggatatcagaggcttgtgtaggatgctatgcagcttctctagtgatttgctgctcgaattttttgctgtgtcacattttctttgttttctatggacggattttatatgcttagatgtcatttgccagttaactgattacgcaaatttcaatgttccttcaggacagttaactgattggacatccacatgtttgttccttgggaaattagaaaaatatgaaatttatttttatctgaccaatctaaatagttctgtgtaactgaagcttaaaaagtttgactcaacacattctaaagcttagttgctttagactcggagggattacatttacatctgttatttatgtgacttgaattttatgaaggttaaagtacctcactgaatttataaactgttaaaaactagggatagctaatttatatttcctttcctttagcctggtcaaaatatggaagagcataggcagattgtgatgccagagttctgcatgcaggtttcacagggaaatactcaagccatcagcagcatgaatcattcactctccaatgcggcatcttcttcacctgttcagtcttttcctattcagcaacatcaacagaaacatcaaatttcaccgccatcacacatgtttggaaatccgcagcatcctcagatccaagggatgagccattcgaatccacagcagcaaacatatgctatgcgcttggctaaagaaaggaacatccaacaacgtatggtgcctcagcaacagaatgatcttcctggagcaagtgcagtacccagtgtacagaatggttcgcatggtcagcagcagaagcaatcacctgcagccttgtcagccccatcttcacaaccacagcatcagcggcagcaagctgcacaaaatccaccagatagctgtgcacatcccaatcaaccaaccaatgctacacaacataagccaaagaagagtcaacagcagcctagacagaatcagcaacaaaggaatcaaggtagtcaacaggctaagcttatgaagagcttaggacgagggaacatgctgatacctcagactacagttgacaccactccaaccaatgctgtttctgcgtcttccaaaaagcaaattactgagaacaaactgattcaacatggccaaggaactttacccggaaataaagcatcaaatccgtcaatccctcatcctggaaatcaacataaactatacagttctccattgcctcaatcaccaaaacagttgccagatattggtaaccaaggcgtattgcagggttctcctagtcaggccctcttaacttcacaacagcttccactccatcctaaatcttcactgaccacacaacagcaacaacagcatgtccattcatcgcagaatagcatccaaagaatgatgatgcaccaaaacctccaaagtaattctgattgtaggccagactcacaggtcgttcaagtccaaaacaatcagatagttccaacaccacctattcctcagagtacagagaaaggcagcgctggactttcatccataagccagcagaagcacgaggtgtcgaatgattcaaatgcagttaattcaacatctatgatgcttagctctcctcaagatacatttgctgggggtgagagactattgccatcatctagccatgatgtgctggaaaggcagatgccaggtggtttgcctatgtatggtggccagtggcaccaggagcaatctaagcagcaactgcagtccccaaaccagcagagaccagttgttcaaggcagtgtatatgctccattaaatcctgggcctggctgatgataaattaatctgggttggtcacttttacagagcaacccttttttgaaatctaaagttattgtacaggtatgcacttttaacttccttactttttgacttggtaacggatactgtctttgaattttgttatgtcaatgcagagattaagtaaacttatggaaccatttgcttttccttctgattattctaggacatcaagttgctcgtattcatcatttcttgaagtagaggtagggtgatagaattgatattcgagtcgagcagtttaaatgatccatgtctaaaagcagatgggcttttgcagtaatttaaagcttgtgctactatattctttgtagggagtatttttctgatatttttttaccttatctcacttgctaggtgtcagtgactccgtaacatggaagctgcggatgatagtgatgttaattcaacttggagctaatcgtaatcaccttagtgtcaggtagatagttgtttccgtgccattttaagtccacctttagaaggtgaaatatgttttatgcagtctagataactggatggaggtggctgttgcagcggcaaacttcgtttctttttggtggattctgacccaaatcctgggcccggctgtatattttcgatgcgaggtccatgctttctagaatcaggaggataaagtgtaaccctgtaattgcttcaactacaacttggtgaatgcaaaagtgcttatttgcattttgtaatgcgcagtttgtttgtcatttgaaacacctcgctagtgctgttttgcagcatcagtgtggaaggaggcagaggcaaaggtggattgcttcatttgggttttggtttatgtgggatgttatgattaatttgggtttgggtttgaatcatttttgtgggattttgtggtctgcactgcaagttcagctacgccagcgaaagatgtggagtacttgcattttccatatgaattgttgtgatcttgcaacagagaatgacgggcgttccctgtgttgtactagttacccagatgtaggagtatgtgccgatgtgcgtagtgctcggaaacttgcaagattgaacctgatcatcacagtcacagcagaaagaaaggagtactgtattttattgtcctaaccacccaaaggaaagaagtcaaattagtaggatttctcaacaataaagaaaaaaatcaaagtatgatactctttaacttcattcataatagttactacttaattcgtttacactctcgaataattattacaaaatcattaggttatttagctgttcactgttcaaggggaaaaaagccactcaagccattgttgtagtttttcccccattgcttgcattttattccttgtgcttg

SEQ ID NO: 8495 - DNA, 9617 bp, Oryza sativa
gaggaggaagcttagcggcggcggcgctagcggaggaggcagcggcggcggacaggcccctcatggcagcggtgttggcaaaggaggcgtagcggcaccggacaccggacgggcccctcgcagtggcgtcgccggcggaatagtggcgccggaggaggcgtagcggtggcagcgggcgtggcaccggatcggagggagagaaggagagagaggagaggctgactagtgggtcccacactggtttcacccctccattgctatgttgacctgccacgtgggcaaaagtggcaaatagttaagatggcatctcataagaggagaaaaatatgtgcaatcctaaaaggggtatttggataattgcccaatctaaaagtagcaaatagttaaatttcccgatgatttcgtcacatcatgtagttgtatattcacatgctgacatgcgttctattgatctgcccaacgatgagaaataaaaaaggaagggggagaaacttgatggacgatcagtatctgaatattcggtaaagccatgagctagtattcctaaatcaggaggaatgtctgagagagaatccatccaggttttgacatgacatgtattttcttttcttttcttctactaccacaaagaacagacaaacctggaatatcatttgcacgtgcagggcaagtcagacacacgttctatttccttctttttctttatagagcagagcagaacagaccatatgcgttcgtagtatcatttgcaagcatcagtcgagtcctattgccggctggcaactgttactgctctcacaaggaccaggccacaacagttattaaaccttcacttgtacattgacattcatccatgaagattattagcaacagaatcagtttaaaatccacccaagctatgctctactttctgctacgaacagaggaacatcatcaccagtaactaacatactcacgtctgtgacaaacagcatacataacccttcttctcatagcagttttccttgtccataagttacaagaggctggacacctctccctaatattcaaactttaaaaaagcatcccccaacttcccccaccggtcatccaattccagtttccaaagaagcacatggcatgagagccctgcatgcagaaatctctccaaatacaacaagattcaaggggcacatgtccgcgcaatgaaaacaaatgggaacctgtacaaacagcctaagcattgccatgagtccaccaaacagttgctaagggccaaagccccttagaaccaaccaaacctcttattttccggtctttagtactccacttcagcaggcgtgacccatggagtaggggctctgatgatatgcacaccgccaagattgagacatactagtactgaatcctatcatcgccatcgaaatttaggccctggatgccccgtatggtcgactcgtagttcttagcattcgatggatgcctgccagaaggcgtgcgcctgttgtcagaggagtcaaccatctgtggactccaccgcggggcccctgatctttggaatgcccccggacttgcatctgttgtacgactacgtgactggtcagcttcagtgcttggttctcggctactagagacagcaggtcgccttgaggatccgcttgaccgtcccaaaaaagtcgaactggagaactacacgccacttaaaggtcagatattacatagcaattgtgtataaagtagcacttcaggggcacacttttttgtcatggcactagcaacacaggcatcatgagaactctaagaactcaccactgcatctttagaagttgattgctcatgtccgataggggacttctgcttggctaggctgcctgcatttatagctggaggtggaacctgacgccgcatcgcatccatatctgaccagccgcttctccttccctcttcggtggctacatcatatcagtagacagttaaccaccaaacaactagcaagctttgttaattggcaagactctacatgaatcaagcagtctcaagggttgaccaaacagtagaatattagaatggacgccatctatattttatttgattaaaatataatgatctctacaaatgcaattccttctaacggtttgacccaaccaaaggctccattcctactttactgtcttactaacagatttggtaatgatcgacccgtttgtaactcactaacactaacattacccctttttccatatcttatttggggtggtaggtgatagtaacatcattttattgaatatttccatgattatgagttgatagaaactgaaaaacacctgctgtttatctaggtgaaaataacttaggagctgcagtacaattacaatccactaaagaatagatttatacctgacagcctgttattatttgctataggagccatcgccgagctttgtcctgttgcaggggcctaaaataagatacatcagcaaaagaagagtttgaacataaacccccaacgtgcacacacagtgaggaaaagaggagtggtagttgttttcaactgacaatggcacgtggtggagcactggtcatctgtgactgttgatacttcaggattgtccagtcaaaaacataatcaaactgaaatcctacatgtagaaaaaaaaatcccatcaggtgctttcaaaaggtagcattttgcagtatatacaagtcataaacactgtttagtcactgaaataaatatcgagcatgtttaaagaaaatcaaaacaataaaccaaccctctcgaataaaaaggtctctgaacaatctcttcaaatattggtagtctggcgaatcttcaaagcgcagcgagcggcaataatggaagtaagatgcaaattcagtaggatatccacgacagagggcctatagttgagaaatcacaataagaaatagttcaggaaaggtggtggatgcaatttatagaataatatttacctcagttgaagtagcaattttcctttcgctgattttctcatatttttgtttcttgttcccagcttttagaccctgccacggaaggctggcagcaataaactataagttaatacagaggacgcagttgacgcagagatacaaaagaagaaattacttgaggttatgttgaacaaccttcctctcaagaagtacatcagtacatatccaagagattccatgtcatccctccggctttgttctatggagaagcataaaaccgtattatgatgctaggaagacatacaaaaaggtcatataagcttactaggaacaaataacatcaatgtcaatcttgacactgctactggataaaggaatacatatacagtaatcagataacttaccaattccaagatgagtgtttacacttgcatatcttgctgttcccgtcaagttcttgttctccctatgattaaaagaaaaattggtgtgtttaatttggaagtaatatacagcaactgccatttcaactttcaagtagattaaaggtatccttacctatatgggatgtgctggtgtgttgatgtatccctgtacttctttgcaagtccaaaatctatgacatagacctacacagagaatgaaagcaagggttaagtacacctataattaattcatgaatacgaacagatcaattgaacataactatacctgatttgcccttttacctaggcccatgagaaaattatctggcttaatatctctatgcaagaaagacttggagtgaacaaattcgacgcgattgatctgagagatagaagatggttttggcaaaacaaatgaactgaaatcagttgagaaatgctagctttgggtaaaacaaaaactagaaaataaccaaatgaatagcaaatgggtttaaattgactgctaatagtaccatttgatcagcaagcatcaaaacagtttttagagacagcttcctgttacaaaaactgaaaagatcttcaaggcttggtcctagtaagtccattaccaaaacattgtaatcaccctcgacaccaaaccacttaacatttggaattccagctgcagaacaaaagggtcattagttgatgtgtcagtttaaggaaaacccactggataaagtaacaagcaagcatcaagcatgcattacttcctccctggagtattctgtacagcttcgactcatacagcagttgtggatgcttggtcttcacattttcctagacaaaacattggagattaacaagggtgttatctattaagacaggaagaggactggtggaaacagcagaaacaataaattattctcacaaaatacgcgcagcattacgtcagatcaagtccatgcttgcgatggacgtcaaacaaatttaatcctaatcaaccgcaactggacaagaggcatttgtcagggtataacagtagtatacccagtggtacatctatatagctcttgaaaaaaaaatcatgttttggcagagaactattaacagaacaaaaacttaagtagtaaaagttatgtttcaatagttttcctagcaacagaacacattaaaaactttaacacatactccagacaaccttttatattagaggtgccatatactatcaccaattcaactgcattaaaatatattgttaacaacaaactacattcgcatagcaaccagttgacagatttccaactcagaattcctccaatcaagtatagaacatgtcctctgcatctgagatccccacatctgaagcaatcgaatcataaatcgagtaacacaaagcaatactaggaaactcacgagcttaatagcgacctcctcgttggtctgaacattggtacctgcgagaacacacgcaaagaaaacaaaatagaagtcaccagaggctgatgggtaaagatgagaacttttgaatcaaaacgaggactttgggtagaattgcgcacgaaccaaggtagatctccccgaaggagccactccccagcttgcggccaacacggaacttgttgccgatgcgtggctccatcactgtgtgcaccaagctccccgggacaatcccttaatcacaaggagtgggccctgccagacaaggatcgaaccaattcgatcagctgctccaggggaatttggagctaggacgcataacatagcggtgaggtaaatggggatttatttcttgctctctctcctcatccatttacgtgctgctgcaggtgttgagcacgacacacacaggtgttgttggtctcagaatagaaaaatattaagaaatcgatgcatcaacggaattgggcacggcggcgcggtcggaatggttttccctctctacctgatttttccttctccaagtgatctggatctcctccatcttccctacacagtttcgatcggatccaacttgtttggggctacaaacaaactgttactacttgcttgtattaagagaggttaaggctctggaattaaggaggagaagagcttcatccagatctactccaagagaagctagggttaacgcaagcaaattccagctcccggtgggagagagatgaatcagaaagaggatgggaggtgctcaccaggtccaggataccctgctctgctctgctctgctcgcgcagatggagatcggcagccgcgactcgtcttggcgcaaggagcggagcggaggagacgacgagacgcccccgggagatttctctttcttttacgccgcgagggaatgaagggtactccacttcttcttttttttccccttttactttaaaactgcatttgagatggacaacttctcttctatgctaatatttcgaaattttcatcccaaagctatttcggacattaggacaaaattataagtactaaccaaaactaattagcaacgatggtatattatcgaagttaagcaaaatacgatgacatattgtagaacttaacaaactcaatgacatatatagaacgggaacaaagccagtgacctacatctttttcacttgataattgatatacactttattataaattctataaataaattattggatgattttaaatatttgaaaaatcagggtgtggcactcctcaaccaatggagacgcacaaagtcgctggtttgctccccaatcgaggctgatccgttgccaccatgggagagaggttgccattgtcgaggaagcgattcctcagacggtagggaatggagacccccccccccccccgagtgtgaagatccgaccagggggtttgattgtgagaggcacgaacgaactgcaaatcagaaaggattcgcggggtccgaccaccccgcgcagcaagagacacacaagaatttatacaggttcaggccactcggaggtgtaatactctactcctatgttggtttttattgtcttccctagatcagtgaagtacaaagaagcctttttaggctacaagcgagaatattgatataaagagtccaccccccattccgtatatggtccccttccttttatagttcaagaaggggctcacattattacaaatctcctcttagtcttgtcttatcagccgtcttgtccttgctggctggttcccagacacaatcttcaagaaacccattgagatttgtgtcatgtaatgccccgagctctgtctgagatagttgggttgcgccagtgtgcccaccacgtggtgagtagtgggcctggtgagacccgagctgctcgaaacagtgccacggttgcttttctgcccatctggctaaattaggtggcgcgggacatgcacaatgcgtgtccaaggcagcatcggccctcaatgactcaacattggtgtcttgtccatgtcttttcgactccaaactggctagagatcccccataaacatgtttcatttatggcggggcacaccacatcacagttggctgtggagtgcgcctaacttcctagtaggttatgaggtcgcgtcctctcgcatttaaagtagtttagttattttagtcgagcttctcggagatgtcgttgatgaatggatatttcaagatattgtatcttgtatatttcgatgctcctcgagacaaaggtacctgaaccctacaaggaccgaggtgagcccgggtcccaggataaggccggggccgaggcagacctcggttcataatcttgttggtatagcttcttatgtctccatcctccacaccttgcgaagagagtgacttatgaagactaaggtgagcccggggcccagaacaaggccgggctcgaggcataccttagttcaatctcttaagatgtagatcttatagatctctacgatcttcccgctaaaggacgtaggacttataagaactggggtgagccaggggcccagaataaggctgggccgaaggcagacctcagcttacatccttaagatatgtgttttgtacgtctcaacactcctcttttctgagtagtgtgtgacttctgcaaactaaggtgagcccggggcctagaagaaggtcgagcccaagacagacctcagctttacatccttaagatatgtgttttgtccgtcttgacactcctcttttctgagtagtgtgcgacttgtgcagactaaggtgagcccggggcctagaagaaggccgggcccgaggcagaccttggctcaatcttcttaagatatatatcttgtagggatctacgctcctcttgctgagaaccgtagagcctacaaggactaaagtgagcccgggactcaggacaagaccgtgtccgaggcagaccttaggctatattcttaagatgtatttgggtatgtttggcaccgaagccaggtcccaagatgcccttatattcaaagctttgagtcattgtacatctcatatattgcattcctccttagccaggcagagttccatatatgagaacacatgtgggcccgggactcaccagagtgggccctagctacgccaccctagggttgcctttttatttttaaagatactctaagcatgatatttatctgataatgatcattttgccaggtaaatgggtacctcgattcccatttcaccgacagccatcgccgttagcaagaggttgccattgtcgccagcgggagagggtgaggaggaaaccaccctagctcgtcctcgtcaagttccagttgactgctccccggctcgagggagaggataaggttggtgaaaaagaagatatgggctgagggtattttcgtccatacaaaaatatggtatgcagaaaacaactagcgtaagaacgtcctagacgcatatatagtaacacgattcgaattttacaaaataccagtgacattgagtcacaccgagttttcattataacatattcttaacggcatggatttaattaattgaaccaccatcttacaacatattccaggaagaaatatatattatctgcaatgggtcatccatcgttgtactttttttttcaattaagggtaaactcgatgtgagtgatcgatatatggttatagatcgatcacaaccggtatgcgctaggtgataaattttccatggcttccccggcccactctctggctctttgtcccctggatggagtagctgatggagatagataaataaataaagtagtcttaattaaaatgaagaagtttgtttgtaattaagcgatgggatacaattaataggacatatatgtacccctaatctgtatgctcaccgtgcaggacgcttatcatgtgcagattactggtggcaacgctggaataataatctgtatttagccggccgttgacagtggcagctaggcagtagtatgatgacatatatttgatttggtgatgcacattacatcgatcattgttattgcaggctgcagctagtgatggagatcaattagagatcataagtgtaacggaggaggggatggacaggccagggaggcggccttggccatggcgtggtgggggacgccggcgttgcagatgttggcgaaggagcgcatgtgctttatcccgtactgtcccagcgacccacactgatcctcgaacgtccgcaccatcgacctgaggcactcccagtcctcaaccagcgcagcccgctcccgcacaacctgctgcttgtgcttggcgccgcccaagaggaggcccccgatcatctccacgcttctgtccacgcgcgatcgccgtcccatctcctgcacaagccgctcccgagcctccaccttctctgccgtcccctcgccggctctccggtacttgcgccacaagtagagcagatcggcgtcgcgctgattcacagacacagtgtaggagtggctgcctttggcgccagcagcagctaatttgtggtcgttcgccgtcgcaggtgatgtatccatgtagtagaggtccaggctctgcggtgcgagcgccatgtcgccgtactgcatgacgtgggagccgagcgtgtaggtgccctcgtcggacgtccggttcttcaccgtcctgtactgctgccgcagcgtctcggcgaggcgcccctcctggtgcgcctccgcgtcctccatccacgccacgctgtagaggtccccgaggcaggtgtcgaactccgccgccggggcgtcgtggtcgtcgcccgggcagtaggtgccccagctgctctcctccgcgttggaggccgtggtggcgtacacggagatgtcggaaggcaggagg

SEQ ID NO: 8496 - DNA, 23111 bp, Oryza sativa
atcatttggttatttagctgttcactgttcaaggggaaaaaagccactcaagccattgttgttgtttttcccccattgcttgcattttattccttgtgcttgggttgggtggcagccattgttgtgttgtgttggcttccctttcccctccctcccactcccagtctgtctctctgtctggctgtgctgtgtactcctactatagcgagacagagagagaatctaaatccaatctcaaggacatggccaagcccaagcagccgcctcctcatgctcctcctccgccgccgcccccgcctccggtggagggcaagcccaagcctcctcctcatgcgccgccgccgccgcctccggaggccaagaagagcttcatgcgccgcatgttccccttcctcctcgccgccaacgtcttcgtcggaggtcagctcacccctttccttctctacttagcttacccgatgccgcgtccttgtcatctaccttacctctaccgctgcgctgctactcctccttgcgggatcacctccgtacccagggctgactactgttggtcgcaccagcagttggggctatatcagtattcatctcttaggcgggttggttgttgcattcactctcggctttactcacatgtctcatcactgaaagatccatccgcttcagtaaacttatattaatataagctcatcaactacacataatcttttactcacattgggggcaacttctgtctctgccttgtttgggctagactagtgcattgttgtcttagcatctgcagtgccatttactactactgtatttacgtttattctagttgttcttgtttcttctcaagtgttatgcatgtaatggtaaaccagagctgccaatcatatttgtgcattttttgtctcctcagtatatttgagcatatctattaacaggatattaatgtagtactgaagaaatatagtacatgcataaattgagcgcatatatgtatatatattctttaagttctgaaagagatccacttctgtagctcttatgtgctgttattctgcacttctgcttttcttactcaaatgctattatagttcagttattaacatccttataacaatatgcagcttatatgcttatgaggacctaccaaaaggactcgggaaagaaagataccgagaatgatcctacttcttctacgccgacctcatctcccgcggctgctgagaagcctgcagaaccaattgttgcacccataaaggtgctcacaccaatctcccaagacgatcagcgccagctgtacaaatggatgctggaggagaagcgcaagatcaagccacgcgatgctgcggagaagaagaagattaacggggagaaggcccttctcaaagagttcatacgagcaggatcccttccaagcctataagatcgccaattaactattatttggatctgtagtgctcttgtgtttgatgattgactgggaacggtgcgagtttgattgtatttacaagtccagcactgtaatcagatttccaaatgatagttgtggaaagaccctgttgagcttgatctcctgaattgaattggcttctttcataggacatgttgggtatcaagaagccgatttctgggaggcatggaagatgatgtatgaaactattatcagtgttgatttgggcttttcagctattggtgctgtgtaagttcatcagcatatattgatgtttgtggtctcttacagccttgagcctgcttgtcacattacaaatatacttatgtatagttgccagctcaactgctctgttgacctgaaatgctgccatcatcaatctatcaattactatttcgcatactattatacaaaaggttgaaaagaagccctcacatttgctccgagggcttagaaatacccatgtaaattggagtaaacgatgaatacatgttataatagtgtagattgatcgatataattgtatatgaagtatatactagaagttaagggaatgtttgaggggagaggaaatgagaagatatgcaaaaggtgagtcgttagtaaatgattaattaaatattaattgttttgaactcttggatgaatacaattttttaaagcaacttgcttgtagaagattcttctttttttttttaaaaaaaagcacagtgtttagcagcctgaaaagtatgcgtgcaaaagaaaatcaaaacaactttttatataagattattgtaaaaacacattgtttagcacttagaaaaacatgcgcgaaaaagacgagggggacaccctaagagttgtatatgatcaaattcaacatctattgtatataaaatatatctatgtattttaggagaaacatatttatgtttatagggatagaaactagtctatcactctaatccaatacaaaatacagttgtacgcgtagaaatataaagcagattagctaggagttgtagtaatatagtagcaagtctaaatcaacattttttttttgaaaaaaaataaaagggaaaccagctactccagtttgtttgacatcagattcatagaaaaggtgggcttactgggttcggcccattaaccaacccacggacgcttccacctaggagtagtagtttgggtttgggttcctctctcgtctcgtctgttttgttttcccctccgactccgactccgatcgatctccaccccgaatccctcctcctcaccgccggcgagcttccggctgcggcggagatggccacacgttattggatcgtgtctcttcccgtgcagactcctggctccaccgccaattctctctgggcgcgcctccaggactccatctcgcgccactccttcgacacgccgctctaccgggtaagcatcctccccgccttccttccttccttccttccttccgccaccaccatcctcaccctcctcctccgcctcccgcccgcagttcaacgtccccgatctccgcgtcggcacgctcgactccctcctcgccctcagcgacgatctcgtcaaggtaacccatctcttctcttctccccgatctcgatctcccttgccccccagctctcacgcgattcctattattcctgccgctgctgcagtccaacgtcttcatcgagggggtctcgcacaagatccggaggcagatcgaggagctagagcgcgccgggggtgtcgagagtggggctctcaccgttgacggcgtccccgtcgacacctacctcaccaggtcgctcgctcgctcctgcccctgctgcctctcagcttagcgattccaactcttttgctaaagctctctacctcttccttcctttgcttcttcttcttttctaggtttgtgtgggatgagggcaaatacccaacgatgtcaccgctcaaggagattgtcggcagcatccaatcacaggtctccaagattgaagatgacatgaaggtgatgacctttttcccttgcgaccacataatcactagtcaagacccaacctacatatagtgctgttaatatgtttcgaccctaatgctgtctctagtcattaattaacgacacttggtgtattcttattcttcttgtacataagacataaagttttgccgttcagcgggaattgtttgcttgctttgcaacaagtaggcaagttttgacattatctccataacgtgcaaagttcaagctagtgagctttgttctcctgccaagtgtgtttttacagggtctagcttggtttctgttttggtatgttctgttgttctagccagctatcaacacaaccatattcttgtgattaggcatccacgtctccttttttagcattgagttatcacgcacaacactacagcgtgacctgttgaatttacaacagctgagctgaatgtgttttttaccttcaggttcgaggagcggaatacaataatgtaaggagccagcttagtgcgatcaacagaaagcaaactggaaggtagattgcatgccactgagtttttggctttaagccaattctttcttgttttatttcaaaggactcagaaatgcgagggtatggtttcatcttttgttagtcaactctaattagtttgttttccttctgtatagcttagcagttcgtgatctttccaatctggtaaaaccagaggatatggtcacatcagaacatctagtgacactccttgcagttgttcctaagtactctcaaaaggattggttgtcaagctatgagtcccttgacacatttgtggtaagtatatgctcttttatagtgacatggttagtaatagactgtcatttcaactatttatatgattttcgtcctttcagcaagttgcttattttacttttgtagtttttgttcaatccaacaatgtttagtttgttaccacttgtggcgttaatagttctactagcaggagatgttacccctgtagaaaccacttaaagtaaagatctgtttgacctgtaaattctttactcagattgttttatttagcccttataaggaccttgtttttttttccagcactacatgttgatgtgattagtattcgtaattggttgttatatttgagtgcttttttccttgaactaattattgatttataggtaccgagatcgtctaaaaaactttatgaggacaatgagtatgctctctacacggtaacattgtttgctaaggttgttgacaactttaaggtccgtgcacgtgaaaaaggtttccaggtaaatttgccgtcctaactttttcatcaaaaacctttgtttacacttcacatttagcttttatccctagagccttaggagttccaaataacttgggacagaaattcagtcttgtttttctgtccccatcaatctggcaattctctgtcacccattaacttgtattacgttgaaatacaggttcgcgattttgagtatagttctgaagcacaggaaagtaggaaggaagagctggaaaagctaatgcaagaccaggaagcaatgagggcatcacttctgcaatggtgctatgccagctacagtgaggtgcatgtctttttaggcttatttaataatcctgtcaacaatgacatttctttagagaagaacttttttattcttatgaatgtcatttttgtttcatgtaagttctattaaaattactaccaattaatgtttgatgttcatttcatcattttgcaccagaatagagataaatatgttttcatctcctttagtagcctgacggtcttaattgtccttaaaagcatccaattatgcggaatctgaaccagtaagaagatattgtctggtctcagttgccacttgccagcaatagatagatgccacgctgtgttttatgtttaaattttacataaggattttagtaagttataacttcatggcatactgcaagttcttcctactgctgttattatctcactagaaccttattattcagggataaatccttgtttctgggatgtattaataagcttgtgtttattatccataattgtctattttaatttgtgcagaataccatttatgtacgtcatgctaaagtgcaaaactttgtgcttctctatgtgcgtaaaagaaaataattctgctgttgtttatctctgcttatgcagtgaattgccgtcatgaaggatttgtttactgaactgagttagttagagcctagctctataggctatagacatacttattacatattcactatgtcccaaaaaaaaaaaccaacctagtcaaggatgggatacaacctagtcatgtccagattcgttgtactaggttgtctcatcatgtcctagtcattgacggagggagtagcacatatgtttcttgattgttgggttttgtggtttgctttttctttgattcattcctcgtgaacttgtgttttcatggtgctcagttgtaattgcttacataaaactattctgcaggtattcagttcctggatgcacttctgtgctgtgcgtgtctttgtagagagcattcttagatatggtcttcccccatcattcctggtaatctattctactgttacgtagtatatgatagtcaaatttgtactttgatgcctgatctaatatcatatgctgtttatgttttcatcagtctgctgttctagcaccttctcaaaagggtgaaaagaaagtaaggagcatcctggaggaactctgtggcaatgtccataggtaattcagcgtttgagtttgtgttcattgcattgttagtcacaacatgcacctgcttttgtcattaattgagcctctgaattgcagtatttactggaaatctgaagacgatgttggtgtagctggtctgggaggtgaaaccgaggctcacccctatgtttccttcacaataaattttatctgagcacagtatgttccttgctacctgtggccaggcaaggcagtgttttggagtaattactactttggcaaacaaaaaaccagcgaatggttcggtgtatattataattgtgatacgtcaattctttcttgatttatttacccagcttatatgatcctgtagtttgaaccgatcaataatgtagctttttgggggaacctggactattttcctggcacaatagggtatctgtttggactattttatccccggcaactacaatattccaactgtttcctttagtatatctattgtgctttgagagcaccgtgtaagatgttgtggatattatgtttttgtaactttgagcagccaggttcgtaataaaagatcaatataaataattcaggtcgccgagcctgattgtaaacagtttgttgttgaattcgagctgtctccttttttctttgacgattacgactgttgcactcatatataaatagaaaggtggttgtgttttcacattcagtagggtggtgcaccgtaccccgtacatgataatactgatggtgttgtgacagaaggacaagttgggggttatgtatagaacgtcaatccttggtgacccagttcccactgatgatagtggagtagacaagacacaagaggagatgatggtcaaggtgagaggtgagggtgggtgaaattggatcagcatcaaagtctcatgatgttatcattaacatatgtgagtctgatgaattattgattcactgaagaggatcccaatggaggtgatcgcctcattttgatttgagtaggaccgcgttatgagagcggggtgaggtcggcaaggagaaggatggatcagaatagtcatagatggaaaaaaaaatgcaaggagtaattaagattaataggagtaatgtggatgaagaagaaacagctaggctaggcacataagaagatgattaatgggcaaaatcaatccaatccccctcatcgcgtcgcgtgagaagagaggaggaaatggcatcctcgagattgcattttgtcgtcgatgatccggtccattccggcgccggcgttcacattacacacccaaccaatatcctcaccagtactactattccattctgctactagtatactccttcagtagtgcagtatttttcttgtataaataatactctaggagtgtactaatactcctagagtagtcttgtttcacctacccccgttccgttccttgtatgaatccattgccttgcttctgcttgcccatttgatgatttgatttgatttgattcaatctccaaatcgatcgatttctcctcctccataggagaaggagatacacgtgatgtccaaccggcgtcgcaagcgcggcgaatccaagccccaagcccacgacgccggcgacaccacgcccatcgacaacatactcacctccctcgacgacgccccgccaccgccacctccaccgcgccacgagctccccctcctccagctcaacgaccaccaagaggcagatgacgctgacgcctcgtcgtcgtcgtcgccgcaccagcagcggcggctgtgggtgaaggaccggtcgcgcgcgtggtgggagctgtgcagcagcgccgactacccggaggccgacttccgccgcgccttccgcatgtcccgccccaccttccacttcctctgcgacgcgctcgccgccgccgtcgccaaggaggacaccgccctccgcgccgccatccccgtccgccagcgcgtcgccgtctgcgtctggcgcctcgccacgggggagccactccgcgtcgtctccaagcgcttcggcctcggcatctccacctgccacaagctcatcctcgaggtctgcgccgccatccgcaacctcctcatgccgcgcttcctccactggcccgaccaccccacctccaccgcctacaagacgcgcttcgaggccacctcgggtgtcccgggggtggtgggcgccatgtacaccacgcacatccccatcatcgcccccaaggtctccgtcgccgcctacttgaaccgccgccacacggagcgcaaccacaagacctcctactccatcaccttccagggcgtcgtcggccccgacggcaccttcaccgacgtctgcatcgggtggccggggtccatgagcgacgagcaggtgctccgcaagtcggcgctgcaccagcgggcgtcggcggcggctgggtcgatgtcgtgggtggtgggcggcgcgagctacccgctgacggagtggatgctggtcccctacgcgcagcgcaacctgacgtggacgcagcacgccttcaacgagaaggtgggcgaggtccggcgcgtggccacggaggcgttcgtccgcctcaaggggcggtgggcgtgcctgcagaagcgcacggaggtgaagctgcaggacctccccgcggtgctcgccgcctgctgcgtcctccacaacatctgcgagaccaggggggaggacatggaccccgacctccgctgcgacctcccccccgacgaggaggaggacgacaccgtgcttgtgcagtcggagtccgccaacaaggtgagggacgacatcgcgcacaacctcctccaccgcggattggccggcaccgccttcttctgatcatttcgatttccgtcccaatctgcactacaaacactgtattgaggtttccctcctcccctcctgtttgttcttgttattgctatagattagtttaggtgctccactcaacaacaacaataacacaagattgaaatgtgatgctttgccctcctcgttaataaatcactggaatacatcgcttcgtttcaaaatttgctttgctttttggactattctttatcctggtactggtaaattacacatacaagctgaatatttactcctataagtaagcacgacctacagtatttgggtaggatactagaattctgcgctttgttctattgtctgacctgaaaattttacccctcgtacaaatctcctctacatgtcaacttatcagccacatccagaattcaaactttgaatttagtggcttttattttcagcattagctttgctttaaatgaataagaataaaagttctaacgacaaattgtttttttaatttgtttcgtttatttttctatagcttatccttcattgcacgaacgattagtgtggccttgaaactttaattgtaggggatgacattgaatccaatcctaggttgagagatgccactgtaggaccatgaggcttgccgaaatttttgttctggatcttttgatatgcttgttggccaaatgtgcattgctcccccaacggtgtgctgtcaatgctaaagtagcaaaacatatacagtagcattacaacagtatacgtgctgagctttagttcctctggtgaccaaccactctgggaatactattgcttaataaatcattctgtagtctgtacctttggttagtgtttttgttacagtggggttgtgtgtcttgacttttgacatttcaaaggaaacatgttacttcttctgtcccataatataaaggattttgacattttgcttacactgtttgactattcgtctcattcaaaactttttttgaaattattattattatttttactttattatccaaattactttagtcacagcttttcgttttttatatttgcacaatttttttgaataaggccatgtttagttgttttggcaaaaaaaaaattttgacgtatacgaaaacacatttaaagtattaaatgtagactaataaaaaaattacagattccgcctgtaaactgtgagacgaatctattaagtcttattaatccgtcattagcaaatatttactgtagcatcatattatcaaatcatagcgtaattaggcttaaaagatttgtctcacattttacatgcgaactgtgcatttagtttttttcgtccacatttaatgctatatgcatgtgtccaaatatttgatgtgacgaaaaagttaaaagtttgaagggagctaaacacagtataagacgagtggtcaaacaatccaagcaaaatgtcaacgtcccagtattatggtacagagggaatagaactagacgatactactagaaactagactagtgaaaaagaaaatggaagtctgtgacatgaatggcaccagtggtctagtggtagaatagtaccctgccacggtacagacccgggttcgattcccggctggtgcattttttcttttctctctcactctctctctctctctctctctctctttttttgccttccttccatctatgtgctgatgttaaatacgttttttttcccggttttacttcagcatgaagcaccaacaaaatggccattacaggtttgcagggactttactgttagcgcaaaatgccgttgttgacttgttgtaaagagcggcttgtcagatgtttttcatttttcacaccgtgctgtaacttggaagcatgacgcggacggactgattattgttacgctgaccaattctagctctagctccgtcagggtcatcaaatgagtggttgctccatccgagaattctgcagcctcatcggttggcatatttcaaatagcatatttataagagataatccaagaaatgtgagttctaagaaatatcatcgacaagtgtaaattctaagaaatatcatcatacaaacgattttgtcctaaaaataccatcgtcattagggttctatccattttgcgccgttaaatacactgttcatcctatagaattttaatatcgtggaatgaatggaaccctaacggcgatggcatttttgggacaaagtcatttgtaagatggcatttcttggaacttatacttgtcgatggtatttctgggatttggatgcttgtcaatagcattttttgaattatctctatttataaataaacattaatttgtgaataaaacttctatacacatgttcttagcgatccaaaagtaaatgctgaaaaataaacttctatgaaaaaaaatcccataatcaagttgaaaattttaatggctgaaaccgcaatgatacaatccgtatattgttatctgagtgagccatcctaaccgtcaacgtgaaactacctctgcctcacactgtcgcacacacaaaaccttagcccacatttaacctgtttcaatcagttttatttaagaaacatgatggttcactggcacttaaagggccaaggcctcatatgttggtccagacccccacattgtcattctcacacaaaaaaaaatatgcttgtgatagtattttatttaaaaatttatccattgtaaacgtgtgtttggattggctttggtgaatgaaatggtatttggtcctcacctcatccccaaaagcatatactaccaaataggagggggaaaaaaggtaaaaatgcagtttctaaacacaccccaaataaaaaggaataatatgaattgacttctcaaaccgagctagaaattaaccgagctggtgtgtttagttcacgctaaaattgaaagtttggttgaaattgaaacgatgtgacggaaaaattggaagattgtgtgtagagaagttttgatgtgataaaaaagttagaattttaaagaaaaaatttagaataaattcggtagaggtgaaaccgagagaaccgagtagttgtacttacacatgagatgagatgagatgagatgagatgggatgggagtgcagtgtacagtaaaatatgtttggtgatgagggggtagagtggtggcagcacaccactggctgagcgcgtcgccacgtgtccacgccatttccaaggcaggcccccatcaacggcccagacgtcagcacgtggtgatgtcaacacccctacccactgtgtcactgacaggccggggcccatcctcctcttcgtcctccacccgccagccagccagcgcctcctcccctctcctccccacgcaacccgatccattcccaaatccctcctctcatcaactcgactctcggtcggcgtcaccggcgtcggaggcggaggcggaggcggcggccgcgtcggcaaggtagtgctgtgctggatcgagtcgagcagctggctgcgcgcgcggtttgtggctctctgtgtgagtccggcgctgctgcttcaattccttcttccccagggcacctcccgtgagccgccatctccctccctcacctacctctggattcgctccagatccgcccatgagtaggcccccacgcccaccgcctgctcgccatcgcgcctccactccaccacaccatgccgatccccaccacctctgacactactccgcccctccccctctctcattcccatggaggacctcgccctgcccgccgctcctcctgcccccacgcttagcttcacgctcttagccgccgccgccgccgtcgccgaggccatggaagaggctctgggcgccgcgctgccgcccctcaccgcccccgtccccgcccccggagacgactccgcctgcgggagcccgtgctccgtcgccagcgactgcagcagcgtcgccagcgccgacttcgagggcttcgccgagctaggcacttcgctcctcgcggggcccgccgtcttgttcgacgacctcaccgccgcctccgtcgccgtcgcggaggctgccgagccgagggctgtgggggccactgcgaggagcgtgttcgccatggactgcgttccgctctgggggctggagtccatttgcggccgccgcccggagatggaggacgactatgccgtggtcccgcgatttttcgaccttcctctgtggatggttgccggcgacgcggcagtcgacggcctcgaccgggcctccttccgccttccagcccatttcttcgccgtctacgatggccacggtggcgttcaggttccctttgcttttgtttttgcctcatcacagtcacagcacattaaacgaatccaacacaccgatgataaccttttctccatgctctcatctgttgcaggttgccaattactgcaggaagaggatccacgccgtactgacagaggagctgcgtagagcggaggacgacgcgtgtggctctgacttatctggccttgagtccaagaagctgtgggagaaggcgttcgtggattgcttcagtcgtgttgacgctgaggtgggaggaaatgctgcgtctggagcaccgcctgttgctccagacaccgtggggtcaactgctgtcgtcgcagtcgtttgctcgtcacatgtcatcgtagccaactgcggtgactcgcgtgctgttctctgccggggcaagcagcccctgcccctgtcactagatcataaagtaagccatggactcccattgattccatgtatgagtaattgactcgagtcctgaggataattggatacgaattgccttgttcttcttcgtgcttcagccaaatagggaagacgagtacgcgaggattgaggcgctgggtggcaaggttatccaatggaatggttatcgagttctcggtgttcttgccatgtcgcgatcaatcggtatgcattctcacccttttgacataattgaaccagtgtttgtttgtgcttcattgtttatgcttctccaactttactgatgtgactgtgctgatgatagctgattgggtaattgatgtgtcaaaggaaaagtctcttgactggttcattttgttattttgttctgaattgtgatgatatatggtgctctagggtttgtgacttttctaagtgaaaaatcactggctgattgttgctccctggtgtaatgacattgtacccccaagtttatttacaaataccttgcatcaatgcgattgtttgcaactggtagtgagtttgtacctatggtggcagagagagctcctcggctaattactttgttagtttgttcctagtcatactgttaagtgatttgcgatgctatgattcaggcatatatttctatatttgttagctatgttgccatatgcgatactggtataggcgtttggtgagtatacatgcagttcacaataggaaaatataagagaatatgagagacttagacattgagatcaccttgatggaaaaatattaagagtaatactaaatggcagaatacttcaaagtagtgatttctgtcataccaaacactaggatgagtcactaactacacgacagctgtataagccattgtttgcattcattgtgatcaaggaacagctgtactatatcgaggattgtaaggactgatgtaataatgtgccattgtgcatcaattgagctttggatgttagcttcacaccttcacccatgttgctgcacagcagtcaatcatatttgttaatttactgttgcagtcagatgaggtttcttcccattgaatcttaagggagaaagcctggcccaatatatatcacaagacttgaataactctttcatcagcatttactctgattcgcttttgctgtattgatgcttcaaactagagagagaatcataacatcatgctattcttctgttgtaccccggtttattagttccagtgttcatgtatcctgtcagtttttgttgctcttaacatgttattctgtgactggtaatttgatttcaatgtctttaatatatggcttttgttgatacttcaaagttcaaagtagataaattatgtttgatttattggtgcgcttgccaatacttctggtctgtgcattgatgtatttgcaggggacaaatacctgaagccatatataatcccggtccctgaggtcacagttgtcgctcgtgcaaaagacgatgattgccttattcttgcaagtgatggcctttgggatgtaatgtcgaacgaagaggtctgtgatgctgctcgcaagaggatattactatggcacaagaagaatgcggccaccgcatcaacgtcatcggcccaaataagcggtgattcttcagatccggctgctcaagcagctgccgactacttgtccaagcttgccctacagaaggggagcaaggacaacatcactgtcgttgtaattgacctcaaggcacataggaagttcaagagcaaagcatgacattgcctccatgaacaataacaatagtttataggaagctagaaatgtgggaaatccaagacaatttatttagctgctgcaccggtacaatttgtttagctgctgttcagtactggtgctgctgcagctgcagctgcttctttgccctcgccatttatttctgccgagggatgtactactagtatactgtatttttctacacggtacagactcccaaatctgattcagggtcgaggacataaggtggatctgggaattttggggtctctcaagacaagacagaaaacataacaaaatctgtagatgtaggtaggagtcctaggacagattgggtttctgcctctggcattaatcgtttttgttaaccggtaaagatactgctacttgcaattgctgtttcatatatactcctatatctttcttgtgccttcccttgtgatcaatacctggtgtttctcccttgttcaagacggtcaatgtacttgccgattttggagtacttgaaatacagagaaaataatgtctgaacctgaacttgtacactggtgagctgaagagaaaccggactctagttaactttagtttgcagaagtgtaggagaccaagaccagtgacgaaactaggatctgagtattaggggagtcaacttatcaaatgattatgataaaaaaatagtagtataaaaatatacgaaaatttaaaggtttttcatagataatatatcatatcaatgtaaagaaaatgataatacttaataggtatatgatacagctacaatgtatatatttatttatttcaatcatgagctgcaattaggagtccaatcacctcaagttagcatgtaagtttttagagagatatcttatacgattgctcatgcatttccaaaaaacgaacttaaaacctgactcaaatacatatctgtatttccaaaaacgaacaaacttaaaaaccgactcatacacggatacacggatgacgtaccaaagtaccggaaaaaacatcttcaatttttataatagtagatattttaaagagtaaattgcagtttgggtcatgtatttttacccttgttgcagcttggacaaggtcttagccatgatttccactttgcaccacataaccttgccatttgtttcactctgcaccacccctcatcttctccgagtcaggcagccttattatctctctcccaacctgttcttgttatgctatcaccgatcaggaggaggtagaagtacgacagttttccaaactccaatcaccctatccaatctggagggaagagtagcaaatcatcacaggttcagcaccggtacaggtgctcaagctgagatgaagtgcatggtgataatgctgaagtcattgctggtgcctgagctcgagcgtgggagcagtactacaacacttcgtcagggactagaataggcaaagtaattggggtcgagtatgcaggttgctttcaccagagagctcaatcccaaccacacatggggaagatgaagactttagtatgctaatgactaaattaaagggtgaatagccaaagtggtccttcaagttttatctgaggctcaatttagtccttgatgtttcaatctatccttattagtccttcaagtttttattttagttcaaacttatccttgaaccaacaactctcttgataaatgacacttatatccccatcattcacatatataaaacaaaaattacatgcttgattttatttatagataatgcatagtaaattatgtaaaacgaaaataaattatgtactatacgatagcaattgcttaagtttcatgtgcacatgttgaaataatgggaagtacatctgcaatgttgtttattcatcttggtttcctcttttctagtatatagtatacaaattaagggcaaaagggatattttctaatagaaatattgactagaaatagccatatggcatattaagtgggcccaaggatgatttcaagccaaaataaatatttagaggagctatgtggacaaaatgaaacgtgaaggaccaaattgagccttcggtaaaacttgagggactaaattagctattcaccctaaattaaactaatcgtatcaccttacctaacatgctagttttagtatcaataaagggaggacatggtagtgctcaagctcacgtacagtggcttcagctcaatgaagaagagaagagaggggagatggaggaaacaccggcccaatctgaaacttgtgtaaaattatttagtccaaagtgaaaatattactttgtccctagtccaatgtgtaactatggtaataaaaggtagtccaatgtgcaattcactctattttaaattatgatacagaaagatatatggttattagatatttttattttagataatacttttgccggtcaaaatttattaagaaagaaggcatcagtttataaagccacaccaacaaagctgttgctattgttgtgtgcgtgtttttttttgggggggggggatgggggaggcctcccctatccatagtccatgctagtttgctagagctctaaatttgatacaatgtcagaattttagaggtgggaaatatatctttatcctttgtatgtattttgtatagcaaatccacccatcctgttcttaaaacaatcaaaatcaagtagttcttgatttggctccaactctatggataaagatctagagcaagtaagctgtagacaagtcatgattatctaacctgatgcaagtgagattggttatggttgggcctgttcggctgtctatttgcggtggttgcagctgcggctgcgccgtgtgtgtgcggcactgttagtgccggctgcgccacaaccacagcacaggcagccaaacaggtccattattgcgtgatacgaactctaaagtctctaatacactcaaacaaagctttttttaaaaaaaagtgagttaaaaattgatgggtgaagtttatattagtatgattcatattgaaaaaaaaaattataaaaacgaagaggaagcggaggcgtagtaagaaacgtaggggtgaaaacggagcggatattatccgatccgatccgctctgaatctgtccgatgtgaggatatggtaaggatttttagatatctggccggatgcggatgcggtatgaacgatatccgacggatgcggattatccgatattttaatcggattatccgatgtactgtttggcggataatccgcaaatttcagaccacacaacaactttcaggcccacctagctagcccaatagcccaacccggcctaatctaatcctctcctcatcccccagatccgtctctggctctctctgtgtgccgtccctcagttgtcagtcgaggagtcggagagagtagcgcggcggcacggcacgacggcgaccctgcgcggtggccgctccttcccaacacgcgccaggccgatcctcctccccaacacgcgccagccgttcctcctcggctagcgccaccgccggctgcaggaggctgctagcgccgccgctcactgttgtgtgttttgtgctgtacacctgtactactactgctgtattcctgtatgcagtatgctgcgtgtagcactgcataggggtgctctactgctctatgcttgctgttgttgtatgcttgtatggcttgcctcatgccgatgacttttatttttacattttaagctatgcagtaaccggtgaactattgaactgaacacttatattatgtttttgatggatcgtggatatatcttggattattttgactagtgaactattgaaccgaacacttattacttatagttatactattgctattgaactgaacgcaatgaactaatgatgttttgccatcgtattggggcaaattgtattgccgccctcttgatgtatggattgaatacaaacttgacatccgataactttttgtccgtttctgaaccgagttcgcaccgaatccgacgtccgaaataatccgctccgcatccgcatccatacgtcatccgcatccgcttaaaaaatatggtttaggatatagtatagctattattcatccgaatccgttccgttttcaccaataaagaaacgcatcctgttttggttttggttgtattgtggagcagtacagcagtatcccgtttcgtttgggcttttggtgggggttgggtgggtttcccgtctccttccgattgctgagtagcattagcaaaggagcaaaggaaaggaacctcgatctccatctccatctccgcccccaaaccctaacacacacacgccgactctccaaaccctacacccccccaacccccaaccccgccgatccccccgctcgccgccgatgggtcgcaagaagaacgtcgccatcgatgacgatgagtactccttcccgcaggaggacgccgcccccgcccccgccgccgacaaggacaagcccatcaagaagggcggcggcaagaagggcaagaagggcgccaaggccgccctgcccgacgacgacgactacgagccccccgcgcccccgcccccgcccggggacgacgacgacgacgaggagcccatcaacctcgtcttgaccggtaagaagaagaagaagaagggcggcggcggcgccgtgagctccttcagcgccttcgacgccctcgcggccgacgaggaccagggagaagacgacgacgaggcccccgcccctgcccccgcccccgtcgagcccgatgccgccgccaaatcagacgccgaggacgacgacctcgatttcgacttcagcaaagccaagaagaagaaaaagaagaaggacaagggagctcgcccagtccctctggaacacgacgacctcgacctagataagcctgccccgccgcccccagccgccgctgctgatgaggcagacgacgacgaggctgctgcagctgcagcttccaaaaagcctcagaagaagaagaaaaagaagggcggctttactgtggacaatgaggacattgacaagctcctcgccgagatcgacgatacttctcctcccaccgaagaggctgagccggtggaagaggtgcctgcccctgatgcagatgatgccttaggaaagaaatcaaagaagaagaaaaagaagggaggctttaccgtcgatgatgaggacgtagacaagatcctcgcagagtttgaggaccagccacctcctgtcgacgatcctgagcctgagcctgaggcggtgaaagatgtgggtaatgtggccgcctcaaccagtgtggatgatgcggaaggcaagaaatcgaagaagaaaaaaaagaagagtggaaggacagctcaggaagaggaggatttggataagcttctcgctgagcttggtgagggcccaacgccagcagaaaaggagaaggaggttctgccccaggcgccacctgctgcggcaatggtgaaggaagatactgaaaccgcagaggatggtaaggctggggaaggagaggtggaatctgctgcagccaagaagaagaagaagaagaaggaaaaggagaaggagaagaaggcagcagctaaggaggcagatgctaagaaagaagaggaaaaggctgtagaagctcctaaagggaaggttgacatgaagaagctcccgaagcacgtgcgggagatgcaggaggcacttgccaggaggcaggaagctgaggaacggaagaagcgtgaggaggaagaacgattgaggaaagaggaggaggagcgattgaagaaagaggaggaggagaggaaagctgaggaagcaaagaggaggaagaaggagagagaaaaggagaagttgctgaagaagaagcaggagggtaagctcttgactgggaagcagaaggaggaagcaaagaggttagaagcaatgaggagacaattccttgagcagagtgaacttcaagtagccgatggtgctgtccctgagacaaagaagaggcctatatatgattccaagaagaaaaaaggtcaacagaagactctggagactgcaaaggtagttgaagaacaaccacaagaagttaacgaaactatcaatgacgaggaagaatatgtgttagtggatcaggaatctcagttgcaagtggaggaatctgagaaaaccgaacctgatcaggatgtcgaagaattgaaaccagaagaggaggaagatgaagatgaatgggatgcaaagagctgggatgatatagatgtcaatttgcctaagacaagtgcctttgaggaggaagaggcaaaccctgtcgccaagaaggttgctgaacctgttcagaagcaggaaaattctaaagcacaatctacagtggctactgtaaaaaaggttgcaaactccaataaaggtgaaacggaagatggcgaatccagtagtgcaaatgctaggaggaatagaggcgcttcaaagaaaggacctattaaagaggatgagactaagaatggcagtgaccttcgttcaccaatttgttgcatccttggtcatgtcgatactggtaagacaaaactgctagactgtattagacggaccaatgtacaagaaggagaagctggaggtattacccaacagattggggctacgtacttcccaactgaaaatattagagagagaacaaaagagcttaaagctgatgccacacttaaggttccaggattgcttgttattgacactcctggtcacgagtcgttcagtaatctgcgttctagaggttcaagtttgtgtgacattgctattttggttgttgacattatgcacggtcttgaacctcaaacaattgaatccctgaatctcttgaagagccgtgatgcagtttttatcgttgccttaaataaggtatattgctttggagtttttttttgccctttgacctcatcttttcttacagtctattaatgtctcaattgttttttggcttaatctctatgaaggttgatcgtctttatggctggaaaaagtgtacaaatgcccctattgggaaggctttgaggcagcaaaatgaagatgttaagagggagttcaatatgaggcttactgatgtgcgtaaatttccatcttgatttttctttaaagaaatgacttagcactagcagttgtatttatacaatcacacatatatgcagattgtgacacaattcaagatgcaaggtgtgaatactgctttgtactacaagaacaaggagatggaagatacatataacatagtgcctaccagtgcaataaggtatgatctacagctgaattaattgattcttcattcaactatgatattattggcatctttgcctcaacacatagttcacttctctcaacagtggtgaaggcattcctgatctgcttcttctgttggtgcaatgggcacaaaagacgatggaagaaagacttactttcgttgatgaagtccaggtacggtgcataaatttacttgtcattataaaagcatgcattcttatctcgtttctgtttcagtgtaccgtgctggaagtcaaggttgttgaaggtcatggtactacagttgatgttgtgttggtcaacggtatactccatgaaggagatcaaatagttgtgtgtgggatgcaggtaagagacgtttttctttataaatgcagtttttcaacaaacacagcttattgaagttgccgcctgctcttgttctatgtttatgtagggacccattgtgacaacagttagagctttgttgacaccacacccaatgagggagcttcgagttaaggtgcgtgcccataatagtg

SEQ ID NO: 8497 - DNA, 39632 bp, Oryza sativa
gccgccgctgcccaccgtcgccttagtttccgccgcccggtactgtctctgcttgtaactaaccatatactccactcgatcagatgcttcaatctccataattcctcctcttttcgcctttacatcataatatatgtgtttgttgcattccattagattggattggaaaaccattccattcgacttgtatttcttttgctgcttcattacatcaatcgatcgatcgatcgtcggttgggaattaggccatccactccatatatctatcaccatctcttctccacttgttcatccatttatgctgtctccacttcccttctcttgtacccatgcaattcaaatcatacttcattttcaagcacttctctctctctctccctctctctcttttccaaattattattattattattattattattattattattattattattattattattattttcattcattcttacctgttaagcacgcctccttaataattaaaagaggtcttgaggtacccatgtaaacttttccctttttttttaaaaaaaaaggatccttgctagcttgttatgtcggcaacgcaaagctatttcgtgtcacctcagctgcttcaaacttcaatttgcattcataccctccagtccgaccggaatatatgcaaaagcaagctgcttttcattatactgcagctgcagcattgcctttcacataatcacattgcttgcttcattgattgtattcatgcgtccaatacgcgtctaataatccaatgcggtcactacctttctcgctacagctagctagctgtcacaccaccaccaaagtctctttccgtgcgctctggcttcataccattggagtccacgtttcctgctcgcacttgataatgtgtcactgtcagatttactagtataatactggtctacatttggggtgctggcactgccaactcccattttttaaagctcaaaaaatccattcttttttctgaaataagattttcttttttttcttggtttgcattagcagtatatatgcacacacactcattcctacactaacaatcttactacatcatatcattaacacttgcaggcctgtctagagggcagccatggccactgtttctgacatcggcctctccgcggctatcaacgtctcgatggccgttgcattcttgctggtctttgcttttctacgattacagcccatcaacgatagggtttactttccaaaatggtacctcagaggaatgagagacagccctgtttcctctggtgctgcagtgcaaaaggttgtcaatttaaacatgagatcatacttgaaatttttaagttggatgccggctgctctcaagatgccagaggatgagttgatcaatcatgcaggccttgattccgctgtctatctacggatatacctaacagggtctgttcctttccatcttttatgtttctgctcttctcaattgttccttgttgccatctcattttttgttccaagtcatacttgtggaaataatgccaattagttaatgatacagtgagcatttaatccaatgggtaaaggcctgcggcttcactttgttattgtttctaaacaataagagatgctaatgaagaaatgatgagcaaatttatcactctgcatttttcccatgttaatttaaacctgagaatatgaatcgtatcattgttgtcaaaatctatttgtgcctaacttcaattatgcctgtgtattgatatacctgtattgaccttttacaggatcaagatattcgttccaatatcaattttagcttcgcttgttctgttccctgtgaactggacaaatgacaccctagacagcatgaaggtagtccacagtaaaattgacaaactttcaatatcaaacataccttatgggtcaaacaggtaagcctccataaatcatttgatatctggatgcggtgtattttgatgagttgtgtagagataaatgtttctttttttggtctggttcaatataaattgtacgtaaaacatcaataagattgcccattggtccaccaattacacaaacaaaatctgtatagtgattcattttacatgcagattcaacctttttaagttttgggcggcacctgaaatccaaccacttttacttatcttcatgctgattatgcacatgtacttggtacaatttttaggagcattatcatcttatggttttgggtgatttgataaatatgccacttgcctgtgtgactgtctaatttagtaaggtacaagcactctattttggcctgtgtgcttgggacttagcagctgccctgccaagttcaatattgggtggcagttgctctggttgaaaataaattcatccacactgaacttctaggtttcatttattaatttctgttgatgctagcacatgtctttgctgttcatgatgaacattccatctgttttacaggtttgttactcacttggttatggcttatgctgtcacgttttggacctgctatgtactgttccgagagtatgagataattacaacgatgagattgcggtttcttgcttcagagaaacggcgaccagaccagtttacagtatgatcttgtcaactttgcaaatcccctctctatttagtaccaacatgtttacattggatccacaagaagggtaaaaaattgtaatattaatggactgaaactattcaccactggaaatagtctaagagattgtggctaagcattttgtctctgagcaccctgatactcactttgcactgacttggtttatattatctaaagcaatgttgtagacgggaatggtttcatatctcaattgaataaacacgatgagttaatttccttctggttggtttgttgaatgcacctcaaatgatttattttaggttcttgtgcggaatatacctccagatcctgatgaatcaattagtgagctcgtggagcatttcttccttgttaatcatcctgatcattatctaagacaccaggtaatctttggtaaaaatttgtggataactaagtcagatgtagttctgttgcttttctcttctgggggtttcaacaggtcatcatctgcttaggtaggagctgtgtttctagttatgctgattggcctaatgcaaatagattttttttctactcaacagaacccccttcatatattatccttttcccacaaattattgatggtttcaaatgaacctaatattaatgtttgctagtttcatgttgagattttttcccccagattctgagaatagtccacataatagcctacccacagattatttggatattaatacataaatattttggttttgccaagtaacaggaaagttatgatctcttggttatctagattttcatttaaataatcatattcatatgttaaagggtctaaaaactgtctctctgtgctaacacttcacagtgctaattgctgaatgagatttagaagggtcatatccaaatttgtgtatcatatgcacttgggttttctaccctgacttcattgatttttttattcttccttatactaattactgtatttattccgtcctttttctggccgattgtctatatctataggtggtttacaatgcaaataaacttgctgatctggttgagaagaagaagaaactgcaaaattggcttgattactaccagctcaagtatgaaagaaatccatcaaaaaggcccaccactaaggttagtctgccatatggaccttgatcaatttatttttcatttcaattataatattacattaggatcttttttctttttaattctctgtccccctgttggatttttgttccagactggctttcttggctgttttggttccgaggtggatgccattgaatactacaaagcagagattgagaagattgggaaagaagtaagttgtactccctccgtaccgtaatataagggattttgactttttgcttgcactgtttgaccactcgtcttattcaaaaaatttgtgcaaatataaaaaacgaaaagttgtgcttaaagtactttggataataaagcaagtcacaaataaaataaataataattccaatttttttttaataagacgagtggcatttttgtctattaattccaaataaataataatcccttatattacgggacggagggagtagtatttttgtctatataatcattggaccattcggcattgtccattttttctgattgagttgtatcattctatgaacatgggtttgcacaatcgattcttttttaggattagtattatgtctaagcatcacacattcacaccttgtgggagtttaatttgtttacagctaacagtcagataacaataaattcatgtgtaacaacatgcaggaagctgatgagcgtcaaaagatcatgaaggatccccagtcagctgttccagcagcctttgtttcatttcgttcacggtggggggctgctgtttgtgctcagacacagcaaaccagtaatccaacagtctggataactgaatgggctccagaacctcgtgatgtctactggaataatctatccattccatttgtgtccctcacagttaggaggctgatagttgctgtggcattcttcttcctcaactttttttatgtcattccaatagcattcgtgcaatctcttgcaagccttgaaggaatagaaaaggcgcttccatttctgaaacccttaatcaaaatgtaagtgtttcttcatgtgttgattatttatactattattgcatttccatgatttattcagcgtgtaattaatttgggtacattagacatatggttatcttctgctattcttttgaaatgccctgataaatcttgttgactattgtgcagtgatgtcatcaaatcattcatccaaggttttcttccaggaattgctttgaaggtcttccttatattgcttccaactatactgatgtttatgtctaagtttgaaggattaatatcacagtcatcactggagcgaagatctgcatctaaatattatatcttcttgttcttcaatgtatttttgggaagcatcgttacaggatctgctttagatcagcttaaggcatacattcatcagtcggcaaatgagtaagtactcctatgccgccaactctaccgacttgaaagtttagagattatatacatgcttggttgttcatttgagtcttcccatcttttaataggatgcagtttatttttcctgcttcgcggatctctgtttgttgacaattgtatttttagcaattaattatgggagaacacagaaaaatctggttcttgtcggagatcactttgttcatgccggctgtcaaatagataccaagttcttaattctgttttgattagtactgtggattatatattcaggagctacactttgtttgaatatttagacacataggctaaatcaaatatgaaaaaatgggaccaatctaggaaggactagattgattttgaattaaggagggggtgaggctcgaacccggaccggctagctcgcagcttgcgttgctagccgggaaggccccgggcctttctccttaatcaaatatgtcaagcagtgaattatgatatacattcttattaaataaaacatgtgctggtggttcaaataacatcatgaactcgtgatatattggttcttaagctatcttagaaatagataaattcttttggttacagtgagttagacataaatagcaacataatgatgcttaataggcaaaaggggggccatttgttgataggctaactctgtagatgcagagattttggcatcaaggcaaacgccaaagcatgggcctcagatacttacctcgtggaaactcagatcgtatttatgctttcacgtaccgatatttatgtcctgctatttgtctgtttattttacaactcattcttcacattctctgattgaaaccaaatgatcattacaatttgcagcaagtctaaattagttcttttgcagaataccgagaaccatcggtgtagccattccaatgagggcgacttttttcataacatatgtaatggttgacggttggactggtgtagctggtgaaatattgagattgagggcacttataatcttccatttgaaaaactttttcttggtgaagactgaaaaggacagagaagaggcaatggatcctggtagtatctgttttgattggtgtgaaccacgtatacagctatatttcttacttggccttgtctatgctgtggtgacaccgttattgcttcctttcatattggtattcttcgggctggcatatgttgtctaccgccaccaggtaaggaccactgcagctacttgcgagaattttattgtgttaagttttaagtgattatgatgaactactaaattagcttgctttgtatgactatttagaccatttttccctggtttattggaaataaacttcattactgatcggcacaaacagtttccactcatgatcagtgttgctatgctgttgtgcatgtgttaagggtatgtaataatggctaagatttactaagaatatgtgcttggatatattgttttgagttcgccaacacaagggagtatgctattgtgatagatggacagttatgctagctaaaagttacatgcaataaatctatcagaatggtcatgcaactaaggggctgttcagctgcctgggatgtgcaagaacagttccccaagcacgaaaatagcagcgggcagcagcttggcctgccgaacagcccgctaagatacttccattatcatcaactgcaaagcaatttatatgaaactgcagtgatgcaattaatctacatatgattcctaattttgcgatattaattttatgatttagttgtgtatatagtgttttggtatgcttacttggttgcacatttctttgaagataataaatgtctacaatcaacaatacgagagtggtgcacagttttggccgagtgtgcacgggcgcataatcattgcattgatcgtatcacagctacttcttattggactgttgagtacaaaaggtttcgaggagacgacaccagttcttgttgttcttcctgtgttgacgttttggttttacaagtactgcaagaaccggtttgagcctgcatttgtgaggaacccactacaggtaatgtgtgacaggaagttttgtatactgaaatgtttgttttggtttggtggtaagagtgaaatttgttggatgtgcaggaagcgatgaggaaagacaccctggaacgggcaagggagccaaccttcgatctgaaagcgtacctggccaatgcgtacctgcacccggtgttcaaaggcagggaggaggaggacaatatgtcaatatccgaggatgtcgggatggaggaggtgatcgtgccgaccaagcgtcaatctcgccggaacactcccgcccagagcaagtacgaaggctccgacacgctctctcttcctgaaactgtacacgaacgatagagctacgggaatatcagggtgactactagcttgttgaattctttatagtctgtacagatagattgatacatacctactcctacggggatgttggcagatagctttgctgtacactttacagcacgagaggtatatggagggattgttcaacacccacagactgatgattggattgccaatattatgatttctttgttggtttccaactgcaactagctgtagtagtaaattagtactaccactgtaataatataaaccagctagctagtagcaagtttttgtcagtgcaagtgtgcaaccgcgcaaggttgttaacagtaaaaggagtcaagccggggaagggacgggagatgcatgaacggctttgctttgcaagccaagaatattcattccccactgactgcctgctttgttgggaacatcatgcatctctcattattatatcttcatatctcctctgctatcttctaaattctaaattccgaagtgcgtgtgcgctcatatctggtgtcatttcgagagctctcctctcctctcctctccagaaaagcacaaccaaaacccttcatatgtaggactgctacctgcactgcatttcatcctgctgctgcttgcaatggcggtacaaaagcgatggtgatgcatgtcaccatctccgagtcatcaccacactactgtcgtgcaagtaaccatcaatctccatatcttcctcagtagccgcaaatatatatactccaaaaatacataaattatgtccttggccccaaaacaacatagattcccaattttcattagcattaactttgggtcattggcattatactccttccaaagttttaggtccaataaatgctgagtcttatagttttcagtccaatcacacaagtattgttttcggcccaaaatcacatgtatattgatcttggtatcaaattttcatgcttattaaacatgagccccccaaaagtatctgattgtatttttcagctcgtaatttcagtagtgtcaacctcgagccaaaaaattcataaaacaatagcctttgcttcaaattttcatgaataacttgagcccaaaacgcttgaatatttgcatttcggctagaaaatgaacggcgtttagcttttagccaaaaatttcatgagtggtaacattgaggaaaaaacacatgaatattagcctcctacccaaaattttcatgataattaaccctgggcccaaaaaattgtgtgaattttagcctccggcctaattttttttttgagtattaaacttggggggtttgaaaacacatgaatactagccttcttccgaaaatgcaatggaattcaaattctagtggctatgaacattatgcacacacacggatgcaatttttatggggtttcatgaagctagtgatttgccatggtcttcgtctctttgagaatctattaggggcaaatttgtgagtgtgtgtgcatgtgtagtagtgcatgtatcttccgtgtaatccaaaaaaattctccattattaaccttggcaccaagatacacttgactggcaagggtatgtggtttcaacctcaacaggtaacatgctcatattattttcttaaaaggtaattggagaaacgtctctctaaatctcgttttttaaatcttggcaccaacagtgcataaattctctcttttggcccgaaacacatgaatattagattttgattcaagatttcaggagtactaacttctgaccaaaattgaatgaattttagcctttgccccaaagcacatgagtattgtccttaggcttaacattgcatgagtattatccttggataaaaaaggaatgaaggaattttagctttcggtcctaaatttcataaatacttaccttggcacgaaaatgcatgaatattagtaaatacttttgccccaaatcttatgagtactaatgtgggccgaaacacatgaacaacggcgtccaacaacgacaacgacaggatcgaagcttttcccgtcaacgatgacgagggcgagcatcttcttcatcagtacagatgctaccaacgatgctttggacgacgaaaaagaagcagcaagaggcaaagctgtttgggaatcgccaacttccgcgagcatcttgctcaggattctaccatcatacatgcagagcagagaagaatgagatcgatcatctgtacttgaactgggaggagcagtgcgcagacgtacgcccaacccagctgatcgatcagccgatccatccatccattatatgacgacgacgcccaagtacacttaacaatggtccagtacctttaatactctactgagcatacaccagtgcaaaataggctagaccaccgtatcctccctgtatacacataacagcacaggcagtgcagaataaagccagcttcaaaatgtctatgccacctatcaagcatctataatcagatcaaatgactagaaataggcctgtgcgtgccaacataagtccagtcccgctttgtgtttcatcaagttttcaaaccaaaccattttgacattaactctcatccatgggatcatttccaccgcctctctgggactctgaatccttgtctccagctcctgaagcttttgccacggagtcttcaagagcctccaggaacgaagctactgtgaatttatctgtgccacaaagacacccatcaaataagttttccgaaaacatctcactccatctccagattttacaaatactaaataaatcattttcagacttgaccaactagcatcaaggatgtttgtcgtctagcagaaaaacaacgctcatattttgggcaggggtcacctccataagccattgaaagtaaaagctagactagcaaggtaaatatcatggtcattgaggtatcagttgcagaatttgtgttttttcaatacataaataaaagtttcagccacatgcacaaattatctaccgtgtatttgcgaatgaaaaaaaaaaggagcctgctacatgctgcatttaactttactgttcagtgcaaataaacgagaaatttggttgtcaatataagtgaagatgagaaggattacatttactagggtcaactccaaattgtgctagatctatttgcccagtccgcagcacctgccatacatgcaaatatcagaataaaaataacatttgaagcattgtgtcacgattcaccaagatgttcaatagaaagatgaattactaacatgggtaaacgcttctacttgctgccgcaaaggaggactttgcaatagttcaagaatatcaccagcagtccatgggccctggaattaagcaagcacaataaaatgagtggaagagtcaattgaagtaagaaccaggatgacaaatacaaagttacaaacctctggaagatatgatgccaactgttcaatgggcaaagtttccatgagtggtaacaccaaatcaggcttcaagatgtctcctaatcctaatcctgttacagcggttaaaagtactgatacatacagcaaatcattgaagaaaagtgaatcaatagagtattgtactgtaattaccagcatcagggtctgccacagcatctgaaattacaaggcgaatgcaagtaaaataaaatgagaaggtggtcaaatggaagaacatttcaaaagtgacatgatttttcagctgatacctgatggctgtatagcactcagtattctctgcaggtcttccaaccgtactggcccagcagcagatgtcacctcaccagctaaatcagcagtcatgctctgatcaactaaattcccagctctgatgagaagaaagaaggaaacaaaggggttagaattattaaatggtcattaattcattatacccaaaactcaacacgcatgcatgaatgccatatcaggaacaaattgaggccacactttcatatatatttagcaggaaaaatatcagtgtgaaaataggaagaatgaaaggcagtgcacaataaactcagctagacatagatagtgttaacttatgcatgaaattggagtgaatatacttgtggtttataatgaacgtgcatccatctgttactctgacggccccattgaaaaataaagattgcaatgcaaacgtctaggtttttctgtgctgcacattgcatcttgcagttcgttaaaattacctggaggagatgtcatcatcagctgtgtcttcatgtgacatttcagcttcaatagaaactgcctcaccatctgcacgcccatacaacttaagacacaagaaaaatgagcgcataattaagagttgagatcccaacgttcagcatacctaatggtcggtttatgtaggcattaacttggcgacatatttgtgagtcgtcatcagcacttggctcctgcacagtaaagagcaaaacacaagtaaattttagctggtggaaggacttctgtggttttcaaacagatacacacacacacactcaactgacctgcatccagaagaagaatttcctgctatcgtgcctgaacttcaagatgtaaacccttccagaagattgtgttacctgattaagttgaattacaatcatcaatgaagcccaagaggttcactaagatggtcttgcagaagaaaataaacttgaacctatattcaataccttctcaaagacagcctcctcagggaagacaatttgatcctgtgaaaagggaatcaaggatatacaaaagtacgataatttcctaggatatacacaatggaaatcaggagaaacagacacagccaagttcaaagttcaaacatacgagtcatacaagtacagtatttgcagattaaaaaatgagtgcacgatgactactaactactatctatgctcgagaggatacaacttcaactagattctgtccacgatcaagccattgaaaatgaaccaagccttcttcaccctacaaacaagtggatatgttaactgcactgcaaatccccataaaatatgagaatgcaaatggcttataagttatactggacaaatagaagtacagaacttcaattcaagataagtatgacttttagcatgcatacccttcctatgcgaacaagacccttgcgtgtgtctgggatcactcgtgttccatcaagggacatcttacccgcacgaaactcgcacatgatatcctgacaaacacatgagagattgtttttaaatagaagctcaacaccttgttatatcatagcagagataaatgagatggcaaaaataaatatataggtcattaagattctgaataagcacaagatcttaatttgagatagatcaataagcaccatgcactgcaacagaaaattaactcagttcactgaactactgaaagctcactatacacaacctacatttcttatcagaagattttcttgctacaaattgctagctaaatattttggccttttagagtgcaggcaaagattaacagaagttctatcccagttttctgaaaagaactaaaacataaagaaacaaactgcctagtatacaaaagagacatctatgtttttttttctttttttgtatcatgtacgatgaaaaactggtccaaacatggttcaggcctttgtacatattacacacaaaacagcccattaacatggtactaccaatgccattttctgtcaggctttctttaaccagctggctcacttgtcatacactcaattacttggcaagatttgcgaatagttgagaatttgtccaccacaaaagacaacctcaattatccttttggcaaagtgttgataccaaccaaacagcccataatgtcattttagatggaacttgcagcagctaaatcatgatctcaaatcaacagcaaccgatcatcgcagttaaacactaacaggaaattcggtatttgaaaaaaccaatacttgcagaaacactagaaggcaaagtgaggagtttacctgtaggggctctgtgctctccattgattaaagagtggctaccacaaggtgcaggccctaaaacaggcagtaaaaaggacagtaaagtattggacatagaacaaaatcaagcaagtgtgaagtataataggttatcagtaactagttgtcagaagtgtactgcatgccaattgagatgaacaaaaggtactgtagtctgaaagtagtagctgcctttagaactttgtgcatatgagaatgaaaacattatgcgcatgtgttggtaaaatacagaaaaatgcacttgtgaaggattaaagaagactagatctataaatttatgtacactagagtctttgttgtgcagtatttgcatcttcaagtagcacgtaggcaactgacaaattagtatttacataaagaaattcctgcgtctgcgtgcttgtagatttgtaatttgtaaggtggtttctttgggctttataagatattattactgcattacttttgtgctgctgtagtgttatttcatagtggagaaccaacgtgacccaaaaaacggcgaagactagccaaaaaccctagcagctagcaagtcgcattaacataaaactcgtcaatgattagcttgtttgcaggggctagttccttacaggatggtgcagtgttttatgtttgtttatttttttttcttacatgtagatgtaagcaaggagagcaaaataggtgggtgatctataagattttgctggtaaggacccaagaaaaacatgagcaataaaatcgattggagcagccgtcctagaaagagagatttggattggagagaggaacaggtagggcaagggagaagaaaatatcttagaaacaatggagcaagagttggtcaccactcagtcactcaccaacaagtgggggattacggaggagggctggacgtcgtcgtcgtcgtcggcggcggcggcgggacgggaggagagggattctccgacgcgatgtgatgtgatttggggaggcgatgacgacgggagggggagcagagaaggatctctcatggtgggctgggcttctcttagctgggctggagaggcccgcccacgcatttgatggcccatataaaagcccgctcggcaactccaaagacgaagttgagctagggttttcaatctctttcttctctccaaaacacaaatcgtcgccgcatcccctcaactccggcgatccccttggcggcggcggcggcttccccaatcaccccactccacctgaactacaggatggcgtccgccggcccggggctcgaatcgctcgtcgaccgtgagttcatccctcttttttttttatctcatctcacccagctacccaagattctcctcctcctactattactagtgatagatgatgttttttttttctctccagagatcatatccgtcatcacaaacgatggccgcaacattgtggtgagccccttgtttgatctactcgtacaccttttttgttttttttggctctcgctaatactcactcgaattgccctgcctccgcttcgtcaggggacactcagaggattcgatcaagccaccaacatcatcctcgatgagtcccatgagagggtctattctaccagggtagggttgctcccaactctttctacgcttctttcatgctatcttgcaaaccttcaattaattttacagcaatatcaatatttcactaagctagtactatatgccctgataatccggcaacacacactttacttccatcttcataaagttatgtttacaaggcggtcatacttacagttagttactctgctaaatttttctgcgtttagaatctctaccacagtctgtttggcattttccatagagttgcctgtttgctaaggctacaagttcagccacacaatttttttttgttattccagtatgtccttgttaattgtgaccttctccctggtttgctgtcaaatgctctcattggttcactagtgcagaattctgcaatcagcaataagtttctctcatggtgcttgaaagttagttgccaacatgtattacacagtaccctttatggctaaacacagattgttttcaaagatggctctctttcatgatggttataaatgtcatcatgaagtaatgagttcatattgttgactgttcgtatctatcatcatgtctactgtcagtatgaactgaagttcgtttcctgcaaaataatgagtttatactgtaacatgttttagctgaatttgtcataacagcacctttttcttcaaggattggttcgattaattctaccttgtgcacgttcaatttttcagaagtcatattattttttgtcttcaatagttaggtattggaatgtctttgttctttatggtgcagagttgttgttctaacaatttgcaggcaatgttgactatgaatagttatatgtctcgtatcatgcacctctctattgaatatgggatatgccttcttaaggactaggggccaatgcctttaaattgtcatgcttttagtttgtggcatgtgctgttagtagtacagttgaaattttgagtagtgatgagagaaatgtgttgtacctgcaggagggagtgcaacagcttgttcttgggttgtacatcataaggggcgacaacatgtaagctatttcctcaattgtcgtttgagctgtttattgcttattaattacctgcatggaggtcgtttatggatgtgttattttgtttggtggtgtgcctaactgaagttgaatccgtgggtgatgcatatttacagcagcgtggtgggggaggtggatgaagaactggatgcgaggctggatctatcgaatctgagagcgcacccgctgaagcccgtgatccactaatggaaacgaatgaatgatgtactactactagtagtaagctaaacctaaatgtagtgttgtcccagaagttgtgaagaagtgggtgctagtgttgccgatgagtgaacttctttaacgtacgcgaggaagtccagcaagcggatgagcgagcatgaagaagaatgttatggttttatgtggtggtggatgggtgatgcatgtttgttgaacacgaacacagacacagtgactcagtgagtgaagatttggtttccattgtattgtattgtttgtgcagctgtatcaatgtacatgaatgaggaaggcaggcaggtcagttgttgaagagaagaagagcatattaggagtaggtgggaggggtagccggctggtgctgctcgtctttgaagtagttgcaggtgatgaagacgccgccgttgaagcactcggcgcgggcgcagccgatcctggtgaagttgggcctgaccatgaaggcgaagtggccgcactcgtggaagtcgacgccggcggtgcatttgccggtgtccctgtcgtagaggtgctcctcgtcgccccagcatcggacggcgtcggaagccctggcgttccagccgttcctcccgatgtagaggctctcggcgaagctgttgccggtggagtggcggatctggcagtcgccgcgcatggcgtcggaccaccgccgcgcctgcctcgccagcttgttatcccacctcatcggctgcagcccgtagcgcgcgcgcagctggttgtggccgtccacgaactcccgcggcatccccttgtaccaacccatcccattggtccacgacaccaaccaccccgctggtgccgatgctgatgcgtcgtcgttgaaccaacacatcgcgtcgcccacagacagcagcagaaaccaacacaatagcaatagtaatgggaggatcatcgcggcggcggccattgtctgccgtcgtcccgacgaggacgaggccgcccgccgatccgatccaatccaatagtgctaatgggcttcttatatcctagctcatcttttgccatttgcttttcttggatttgcctctcgctcttccaaccataaacaacgaactaataatgccaatgccaagtttaggcagtttttcttttcttctctgcatcgatcatatcatcatatcgcacggccactctgtccaaacaacaaagcctaacctccccgggcactggcagggcagctggctgggctctggctctaccagcttgctgcctgcctgccgtgtctcgtctgcttctacaactacggagcacctgtttgcaacggccaacggacggaaggaatgttttttttttttgtttggcttggattccatccatcctctccggcctgttcgtgtgtacgccttgtgctaggctaggctccacacacctggacattctactctcgatcgttcgcggtcgcggggccctcttctgttctgttgcgttaattgcggccgctttgctttcaattacttaatatctgttttaatttcttcgccacttgacatggttatgagtatgacagattaatatatgctatcttttttgtaagaaaaaccgttaatatatgctagctacgactgcatatatatgacagattatatacgtagtatatacttgtggttcgcaataacgaccagctagcttagctagcggatcaatcatacgacgttacgttacattatactagtacgtgatgatcaaagaatcatgcatgtcaagctcatatgtgctttgtatctactaccttacacttgctctgcttctttaaccggaaaagctgtatggctgctgaatgatttttgctcggaaaactaactatgccttacgctttcccttgctctgcttctttaattgggtcggagtgtgtgtacgtatatatgccgatatatatgatcgatatgatgcatccagccgcgcgctgtagaccaaactagctcgatcggattcaccctccgatcgggcgattgatcatgcaccaacagctaattataaggaaacaaaacagagataattagttatatactactccctccttcccaaaatgtttaacgttgactttttttaaatatgtttgactgttcgtattattaaaaacttttatgaaatgtgtaaaactatttgtatacataaaagtatatttaacaataaatcaaataatataaaaagaattaataattacttaaattttttaataagacaaacagtcaaatatttttaaaaaatagttaacggcgccaaatattttgggacagagagtagtatttagttactcctacctatacgttgttgttgatttcgagaggcgccgaccagccgctgatcgatcgagctacgtagctatctaggaattaatatacgacgaaagacaagttaccccatactgtatatgattatatatgaaatcaaatcaatcaattaactaattaattaaatgaagatgatgtgtatataaagacctacgtgtccggatgtatatataagtattccagtaagcaacatgcatgcatatcatccatataatgaaatcatgaatgaagatgtgtgcccctggcaccgtccatacgtaatactcgtacaattaacatagggtagtagcagtacatgcagtagcttatcttgtttattatctggacacacgatcgagtcatatatatatgtgcatccgaatgcgtgtggataacagctacctccaaatcccaatcacagtcacaatcagaatcgcatgtctttgatcgagtaggatcgatcacaacgaatggatatgtacgcatgcatcacctccatcccctgtctctcccgctctctttgaccattgcatatatatatatatcttcttcttttcttacatacatatataaataaaagaataaagattatatatatatatatatatagtaaatttgtttggtgctccatggtgtccgggcaccattgttgaaattgagtatatacccaattcaaatgagtatgaaactttttcaattacttaggtattaacattaactactttactaactagttcaaagcatgtttgtactgaatttgaacttgtttttgttagattttgattctaggtatatagcatccatacatataattagttaggtatgtaatcatggattgtgaaataaagttaaatttgagttgttttgttgataggtatagatatgaatcgaattattataactaggtatatactcacaatttaaaaattttgaaaaatttgagtgatttgtacattagataccatggtgcccgggcaccatggagcaccaaacaaatttaatatatatatatatatatatatatatatatatatatatatatatatatatatatatatatatatatatatatatatatatatatggagagagtgcatgcttgactgtcaacctagctatctagctacggatattatttagcctttgattgatatgatatataagaaaagccatatctagagtatttacactcgatcgagtatgtagctagggccgagtttagttacaaaatttttctttaaacttttaacttttctattacattaaaatttttctacacacacaaaattttaacttttccgtcacatcatttcaattttaatcaaacttttaattttaacgtaaactaaacaaatcctaacatcctagatagcgagccttgccaaatgacgtgtgtgcgcgcgggtggaattagctactgggggcggggcggggccggccgtcatacgaacgtggaagcgccagctagcacttgaattgcttgcttcctttaatttgtttgttttgttttgttttaggagcagaggaagttgaagtattttgtttgtttaattatggtgagagttaattttactttgggccatgatttattattaaagtttcactttagactaccctttgtccaatctttttactttaaactagataactttatctttattgcacaataaaccaccccaagcaacatcttcaatacttcaatgacttcaaggaaattgttacctacgtgccaacaaattttcatatatatatacataccatatatttgtcgaaagagacgctagacatcactagcgaaaagagttagggtggtccattatgtaataaagaaaaagttacctaatccaaagtaaaaagattatgtacagggtggttcaaagtaaaactttaacaataaaacatggcccaaagtgcaaatcactctgatgataatgactcttactatagtggaatggactaccgataccgaaagctaccagcacaacgtaggagtgcgtggtgtgcatcgcggccattaattatgtaagctatttagagtatgaccaattgttaccttcaattctaaatccaacccttttgacataggaggtcagcaccaaccttttagcgctcatctcaagcacaccttaacaaaataatatagacgttgttctctcattttcgtaatcttaagatatctcaagcataccttaataaatttgtagttgtctatattagaatatgtcacatctatattagagttgtatttatattaaaacgaaggaaatccatatattatagtagcagaccaataagatggtctagtggtttggggtagctgggcaactttattataggtcaagggtttgacaagggtagcaagagaaacattaattttataccactgtaatacaacaactactttcaaccttaatggaacaagtagatatatagtactccctccggtttcattttaattgttgttttagacaatgatacggtctacaaaatatacctttaacattatttttctattataatatacacaataaataaatgcatgtttatttttattatagtattttgaaagacaaatctatatatgttgttctactttctttaaactatatatttttgagacccggagggagtattaattaactaattaacacatggcgttgacctcctgctgacttagaaaatgtgcgagctcgatcggtacatatacgaagtatatatctcatgctggtattacgtacgtggcgttgatatatagtagtgccatcggacatgcatgatacggtcgtggtttattttgaaataagtttattatttagttttgaagatggcaatttggcgaaagctagttccggggagtaactactgtacatgaatttgggggcagacacatgttaggatagagataggaaggaaaaggaatagagcacgcacgcggcaggaggtgattgggagtgcaacgtcgtggtcggcgcgcggcgtctgcagggtcaaaaggcctggatgatgaagccgcgcgcaacgtgtacccgtacgcacgcgccatgcgggagcgggacgacgactcgatcgaatgacggacgttatgcttattccggtgaaagaaatgcgtgtcacacgcattccggtgacttgattttaagcaagcaatcaagctagctagcgccaccccgcggagtcaaccgtacgtggatccatgcatccatcgattcatgcttaattatatatatgctcctgcgtgcgagggccttaaagcgcatcaaatcaaatgactagctaatgcggtaatgccttcaacttcaaatggagtacctgcctatttacgtacgttgcacaatcaagcaaccacatccactttaattttctctatctctcttgagcctctgtttccttcctttacttgctgtcaaaaaagtggcatcacccccacctcacaatgcaagcaatgctgctgtaacatgatcaacgacagcatatatattgcgctacttgctgttaacgttaatgattcgactctacatagtaacgatggaagtacaggcggggaaacgaattagacacagttttcgtgttccttccccccggcggggtgggtgtcccttaattaaataacacgatgcaagtactacaagcgtaacacaacacacttgagcctaacgaatcaatttaattatctccatgtgtttacaaaaagagccacacagttcgctcttaatttactcccttttgttgaaggggaagttaatttacttggtgagatttgagcaaatccacaaacttgaaggtggttggcagccgaataatatgcgtttagttgttataggggctgtttagattgatgctattttcagccatacaaagttgacaaaaatttgttaccaaatttggtaaatatataaaaaatgctgtcaaaattttggcaatattgccaacttgatagggtttattttggctgcaatctgaacaggcctatggaaggaaggtaaaagaaagagggaccgacgatatatagatttcttaatagaagtggtgagtaggagtaataaacaatggagtgataatctctatctctatctctactattataaaaattgaaatgtttatgcggtccatcatccgtgtttgaggttcgtcatccgtatttgaagtcggttttctttggttttaatctatatctcttctctactattacaaaaactgaagatgtttttgcgggtattttgatacatcatccgtgtttgagtcgggtttttaaattcatttgcttttggaaatacaaaaggaatcatataaaaatctctttaaacaaacttgtatgctaacttgagatgaatgtcgaactcctaattgcagctcatgtttttctagaaaaaaaatccaagcgaattcccacggtggattaacagttataagattaaaatagcattcatccgttgcaacgcacggacattttcgttcacttttggtaatatagaagaaatcatataagaaatctatttaaaaaactcgcatgctagtcgtgggaagaaaactcgtgaaggaaggagaagattttgcaaagagataagaattgggcgtacacgtgggcggggcagatcgatcttagatacatacagattgaaaaagaaaaaaaagaaaagaagaaggagaggttgagggagggaaggaagctaggaaaaagggaaatactcctaaggaacgcggcggccgtttcccgaaccgtcgcgggcgttccctagttggactgggcggttccatcccagacgcaacgcgcagcggtcgtaggagtaggtgttttttttttgttttgcagttgccttctctcgaggccggggggctcggctatatatcctcctcctccccctcagttccgcacaaacacaaattaacctcctcctcttcttcttcttccgctctctagctttgctttgcttgcttcatcaaaccccacacacgcacacaacaacaacaagagtaatcaaagtagaagaagatggtttcggccttgttgcggacgatcctggtgacgggcggcgccggctacatcggcagccacaccgtcctccagcttctccaactcggcttccgcgttgtcgtcctcgacaacctcgacaacgcctccgagctcgccatcctccgcgtcagggaactcgccggacacaacgccaacaacctcgacttccgcaaggtcttccttccttccttccttccttacttaattctctctctctctctctctacattagattctgattttgcggttccttttattaatttaacaaaacaaaacaaccattcccatctcgataagcggcgcgcggcgatatatcataacttgtctttttgattagattgaaatgaaatcaattggattggattaatcatctcatctagtcaacatattactagttacttatatctgtattcgggcgacacaaatccaaatagtaactactcctcttcctccttagtaatggaaagttagagttcctacaaatatttttgtttgaattggagttgtagtcgttcgttttcatggggaggcggtcaattgaattgaattgaattgagttggtggagtagtagtggaaatgggaaaaaaaaacccaaggagggagggagggaggcgttggaaggcgccggacgcgttgttcccgcccccctgcttcatttctgttttgatttttcatggccaagcacacaacgcatgcaccacccaccccacatacgttccttctactttctttccacccatatataaaaagatcctttacaatccacatctcaatctcaaatataaataggattattaatactaataagctcattcccctggtgcattgcatactcataaaatttcttgcttaaaggactcaaaatctatcttagactaatataacatataaattattatgcaggttgacctccgcgacaagcaagcgttggaccaaatcttctcctctcaaaggttggttagtcttccttgctccttcaatttgcacttaagtacctacctttaatttgttttcatttttggttagcagcgtgacaccgtaaatttcagcataatatatatacaaactatagctattaaactatttcagcataatttcatcggtcggtcggtcggtcggtcgtttattccatgaatcaaatcaaatcgatcattgtcaaaataattactcctcatcatgtattacaagtattctggacctagctagctgctcagccagcctgccaggtcaagaatctggtgcttggccagtttaatttgcagccgtctatcacgcacggtagctgtcacgctcatagtaccaaccaacgaaccgaaccttccttgtggaattaatgcattactatatatcacaggtgacagtccatcccttttgtacccaaccgcgtagtatactggagtactaataagcaatactatgatgaatgaaatgaagagtagtagtaggtattattatctgttttggcgaagatttgagacggacggacgctggtctgcttggctgcaggtttgaggctgtcatccattttgccgggctgaaagctgttggcgagagcgtgcagaagcccctgctttactacgacaacaacctcatcggcaccatcactctcctgcaggtcatggccgcacatggctgcaccaaggtacagcccccgcaccatttcatttatttttctcccattgttttgctttgcctatatgtatatgcgtgcctcttgctggctttattggttggctggcctggctcttctttgcattgctgggggtcacaggatataccttatgcctttttgcattgctggggaacacaggaacatataccacagattacctacctatcacaaccactctgtgtctgtgtgtgttgtttgccatgcatgatgcacgggaatataaccctcccctcttaaaattgctgcctgcctggtcccactcccagccaagatttttttttttgttctcttcctactgccctctgatttttcttcttcctttcatcttgttttggttggttggttggttctgagcttactctggaggcggcatcgcaacagatttatacttacttaatccactaaaagtaaacatatatgctttagtttttaataatggacataatcataagctattttgctccggccagctggtgttctcatcatccgcaactgtctacgggtggcccaaggaggtgccctgcactgaagaatccccactttgtgcaatgaacccctacggcagaacaaaggtactccagttttttctcttctgttatactatattcagttcaatcatcatgcctaggatcaatcaatcaataaatcctaattaagccaaacaacatatatatgatatgatatgattgcagctggtaatcgaagacatgtgccgggatctgcatgcctcagacccaaactggaagatcatactgctccgatacttcaaccctgttggagctcacccaagcgggtacattggtgaggacccctgcggcatcccaaacaacctcatgcccttcgtccagcaggtcgctgttggcaggaggccggcccttaccgtctatggaaccgactacaacaccaaggatggaactggggtatgtatatgcattattcattcattctcaacaatcagtcgtatatgatttactaattaattttattccttgccggcaggttcgtgactatatccatgttgttgatctagcggatggtcatatcgccgcgttaaggaagctctatgaagattctgatagaataggtatatatgaaccctctcttgttgtgcatccatccacgggacgggacacatgaaaacatcatcatctcataaattaataatttatgtggctatattcttccaggatgtgaggtgtacaatctgggcactggaaaggggacatctgtgctggaaatggttgcagcattcgagaaagcttctggaaaggtaaactaacaggacaagtgtacttcctcttaattactataataatcattaattcccaacttgtcctttgcttttgttgatcatatgatgtcgtcctaacaataataatgccaacttgaacagaaaatcccgcttgtatttgctggacgaaggcctggagatgccgagatcgtttacgctcaaactgccaaagctgagaaggaactgaaatggaagtaagtatcaggatatatatatatatatagcatctcacatcatttcatctgtactgtaatgaaatgaaatattaaaatcatcatgtactctcttcacaccagggcaaaatacggggtagaggagatgtgcagggacctgtggaattgggcgagcaagaacccctacgggtatggatcgccggacagtagcaactgatccagctgaatataggcgtccaatcctccagtagcagcagcagcagcatgacttctatacatatatatatataatcataaagaatgaagaaacaaagaattcggacttgttgagttactactactactactactaatcccatctgatggaccgcattgtatagggggcttgtaggggtccagcagcttcatcatcagtctccttaggaggcctctaatataatctccatatttatggtagaaataaattttgcccaccgtggaagaactatataatagaatcatgatgatttgttgattcattgtcgcgtcgattcgtgcaaagacgtgtatgtatgtgcacgcccatcttcttcaagtcacattgcacaagttgaattgggccttaaaagtacctaaagttgatcttgggtgtttttccgtcaggacatacctttatgatttccgtatccatcccaacaagataaacgggccagccagaccatctccgaatcttcgatccgtttgtgtctctgcaggcccatgtaaaatacaaagcttgcgatataagttcactttaggtcactcctgttgacgttgaatctgaattccatccttgacctactacaccagaagatatagagtacccaaactatttttttctggtgccatgtcagctaaagcagcctataatactatcttaggactatatatgtaccggttttaaaaaatgagtgatgtactatatctagtatggtggttcaaggatgtgattcaaactgaacgtcaagataagagacctaaagtgaacttattccaaaccttacttacagggcttgctacagacacaataggcccaactttactacatttgcaacatacatgacaactagccacaaaactgtaaagtgataagtgaagcacaaacaaaaccacaaataccggtcatactcatatcacgatcttaccagataccttgtggtccgatcaccattagagatgataatgctatggaatacgttgtctatagagtagatatatatgatctgaatttaagaggaggggatccctattaagcgaaaatggagggtggtctagggactacttggaccaccccccttggaattgcctatgggtatggttagctattggctgagctaattagttgcacataaaacgaaatgggtaattgatgcatgattaattgaatgttaactataaataataaattcatttgattgtttcaataaatttttattatagatccaagtttttgcactctagtggtttaaagaaacgtgctcctaaaaatgaaaaggtagcccgaaccgaatagttatttggaactcagccttggctcatgtagataacctttcgaaccggctatgagacggagattatacccgcgtcaatctgaattattggccttgaggcaacttttgccattcatatcatcactaaagttaggagcataaatatgtacatcatctacttagttaatttgtgatttgggatgaatgatcttgtacaacttttacatcgtatctatacacgggaggttcgatcggtggcaacgaacgtgttgatcgataaagaagggcgccttgtgtgttgtgtgtaatcttctctctaaaaacaagctactaaaacagtaaaaagaaattgcactgtataaataaataaataaataaataaataaataaataaaattcaaactcaatattgtttttaacaaattaagaaacatatatatgcaaaagaaaaaaaactgaaatacgtatatatatgctactccagaaggaaattaaaagtaaatcgatctggcactagctagaaagaaatgaagaaatgacaggtagctagctagtgtgcaggaacgcgtgtgggtggaggaatggaatggaatgggttaggttagcggcacctctcccttccagttgcccggcgggtcgtaggagcaggtgatgaagacgccgccggcgacgcactcggagcggccgcagccgacgagcttggtgtcgttccagacgatctgggtgaagtggccgcacatctgccccgggttgcagctctgcccgcgccagtcgtagacggaggactcgccggcccagctcttgacggcgtccgtggcgcgccagccccacccggtcccccagaacacgttctccccgtacggcgactccggcgagtgcatcatcacgcagtcgaaccgcctcgccgccgaccaccgccgcgcgtacctggccagcttgttgctccacttcagcggctgcagcccgtactgggcgcgcaccttgttgtgagcatccaggaactcgtgcgccatgtacttgtacgtcccgcgcccgccggtgaacgactgccccggccccaccggcgccgccgcctccggaccctcctcctgatcatcgccgccctccccctcgccctcatcgtaattgttgttgttattgctatcatcatagtacggcttctgattctggttctggttctggtcctggttctgattctggttgccgatgccgatgccgccgccgatacccacgccgacgttgacgcgaaatgacgcagccggccggatcaacaagatgaggtacaccaccaccaccagcgccaccaccacgacgcctggacctgcagatgcggccatcatgtatgtactctcctctcctctcctctcctcagctcagcttcctaattacatacacatatatatatgcaatcagcagcaaccaattagctagctaggaatattatgtgttattagctagctagctagtatgcacagattatgcattccattcatcatcgatcttctagcttgtctacccagcctgcaaccttaatttggccggctatctgctattattaatctgcaaggacatcggaactccgatcgatcatatccatcgcttactcccatccacgcatgcatctttatttctcaccccacgcgcccgggaaatgagctccgtcgatcatcgtctaaactctatttcttaccattcaatttcctccaccattgagggctagctatagctactagctagcgagcggctgcagcggacgagacgatcgaacaagttaactagaagaatacggagtagagtaatacctacctagctagctgttgtactcattttcttttggggaactaacctaataattaattcaactgtgtgttgtgtagagtgtcaccaatcactttgatatggcaagttactaaccaagatggtaacaagataaaagctggttgcctctagtctagaccaagttagataatttgggaataaatagccaaaaaaaaggattttcgagacaaacatatacaaataactttgtgtgaaggtgtacgatttatagtgcaaattgataaacatggataaactaggacacaaactaggtgaaagataaagcggaacacatctatatacctatatataattagaaaaatacgtaaggattccgcacattttttttatccatcccttcctccctcgtgcacgtcgccctccctcccgacatccccccatctctttcatccctccctcccaccctcccactcgcctccgcttccacctccctccctctcggcaccccctctctccctcgctgcatgcgctccccctcctcccgtggcccctctcctccctagcacccctcctccccatcaccccgtcctcccagcgtccctcttctcccaatgatccctccctcctacgctttcaagaaaaaaacataacccccttgtccaggaacacgtttgacgcactcacctcgccatattcaccacaagagctcgccattactgtttctctctctgtccggaccacgtcgtcgttgggtgtgctcccgctgttctggttttcttcgttgccaactgccagcatccatggacgtgccacattgtgggacaagtccgaccaccttactcgtcgatgtttggtaaacgaagcaccgtcgctcatcttctcttttgtttcttgtttggctagggaagacgatgaatagtgttagtcattttttcttcatttttctttctttcaatgcgttcaaagaaaatggaatcccctcatctgagaatgcattttgacacactcatccgatcatgttcaccactagagctcgccgttgttgtttctctctgtcggaaccacgtcgttgtcggtcgcgtttctgttgttctggttttctttattgccaacctccatcatatatggatgagtcatattgtgcaagatgtcctaccaccttccttagcatcatttggtcgcccgagcaccaacgcctatcttccctactcttttgtttctcgcctttgggaagggaagacgatgacctattggccactatttcttcttggtctagctcaaccatgctcttggacgactcacgtaatattgagactatatgaatatgaataggaccggaaaaattctaatttatgtctatgaaacaagcacctgttttgttgttcagaattattggatcggattttcatctaagaactgaaataagttttttttttcaattctagctaatttaagttgtttttccatttaggatattagttttagcactatttaattcattaaaaaatattgtaacctatatttttcctttgtattaaattatttatagccaaatgaaaaaaatggagatttagttacattttttttgagttattgttccggtcaaacctatgtgtagtttgatgttattatttttatgattatatttcctttcgttatttataccaaattgtgatatagggtttataattttaatttatgttatttagaatccgttgtaacacatggacattatgatagtgattaaaatacgactcaaacggttgattatagggggtatccaattgaatcggtaaaagtccttataaaaaggttgctattacataaaccgtgtctttccacatcttattagctaggcttaagttgtgttttagagaaggcaaagaagaagattgagaaaatacgtgaaacaaggtgagtcattctcgtatgactaattgggtattaattatttaaactttaaaaagtagattgatatgatttttaaaacattttttctatatttttttttcagaaaatgcaccatttaaaggttcaaaatgggtgtgcgtgcaagacgatagattttttctcccctttatggttgtctcaaatccaacctatcagttattctctccatcctaaagtaaacttatttttcacctatcccacgtataccaatataaaatccaaagactagagtacttctgctttatcaaattccaatacaactattgtctactttatccactcccagtgtatttatcctttactttcacaaacttcgacacgatgattacttagaaatgaatttattttaggaaaattttcaaaaaaaattattttaggaaaaactggaagagccaaaaaaaattattctgagatggaaggagcagctagactagaaataccttaggcctaaggacaaaaatccgtttataatgtactccctggttgttgggttgcatcaccattatctgtccacattttactggccaagtggtcagctttgcatgctttctgttgcactacacagccaacgatgggtccgtccatcatctagccatagacgatagttgcatcacgcacatgatcgatagtactattcgtcctcatcttcattgtctcatctttcagtagtggactggtatactcgctctgagtgcatgtagtatatgtatctcatcgatcaaaacgacacgacgactgcatgtacatgtgcaagtctgccctagatctgcactattatggccctgcttgacctactttgggtttatatatagggttaattagttccacgccattataaattcttcagcttagaaatatgccactaaaatttatttatttgtagcgataccattacaattttatagcaaattggtatatgccactacttacctcttcattgcattcataaacatatttagaccattttgccctcctttttcatctccctgtcttctttcccctctctcatgtcctaatcaggggtgggcagaaaaagaccaaaccgaaaagactgagaccgagattgaaaagaccgagactaataaattcggtcataggcagtgaaagaccgaattttgttcggtcaattcggttagtctcctcggttaaccgaatagaccgaaaaaaccgaattatcaaaaaaatgtctaaatgcaacctacaatccactatgtttaatagaattaaactctaattttcacatccctacttcttataggcatacaacctaataagagtctttactcataagtgcttacgaattttttttgtgatttttgtgttgaaaatttccatagtttgtttgcatatatgaaaacgttgttgaatttcagtaatgaccgagaccgaatttatcggtcctaacatttttcgctaaaattcggtcttcacttttcaaataccgaaagaccgaagaccgagaccgaaattttcagttagactgaatgcccacctctagtcctaatgtccagtgaacctcggacctccaccggcctcaaacacttcctctaggcgtttctttaccctgtcgccgaggaagacgagcagacgcttgcccgccggagtaggccgccatgctggagctccttcgtgggccaccggagcagctgtgcctgagccgtcgtgcgtggatccgtcgaggccgtgtccgggcgtcgccctcatgccgtcgtgttttgtcctctgctcgtcctcatcgtcgtttgcttgttgtcctcacgctgaatcctctgctcgtcctcctcggcacgcgggcgagcgggcaaatgagcacttgaagggaggatagaggccggaggaggaggagctccggtggagacatgggcttcactggacatgagagagagaagatatgggaaggaagaaaggggaagaggaagaagatgagggcagaatggtccaaaatttttcgtgaatgcactaatctcaaattacatcaaaattataatggcatcgttacaaatagacgaattataatgatatatttttaaactagagaatttataatggcatggatctaattaaccctatatacaattatacatacgataatccatcgatcatcatgcgttaaaaaagagagaacatgtcctaatatgatcgtgtaaataattagcatctactcctagctagcgagttagctatctcgctcttgcatgtatatttatatatagtagtagtagtatttatatatcatggaagtgctcgtgtacaaattaaattaacgagctttttcgaagaaataagacaaataattccaaaaggagaacaaaacaagatagaagaaagaagaaggcgacttacacgccggagaaggagaattgctagctggcgaacagtcaacaggtcgcggtccaaaacgaacaaattaataagctgtaaagagatggagaccagctagctagcaatcagcttcccagccacggatattaatttatcgcaggtgtattagctttctacgcgatttaatgttatatattttgactatttaaatctattataaacaactacataactaatactttcagatacaaatataatgaaactatatatgcatggcaataagtgccactattgatagttcaattgttaatgaaaaattaaatgtcgattttcttaaaaacgaaggaactatatacataccatacatcctaagaaaaagacaaatagtaagacatgcccacaaattatcattcttaaatttctttccagagtaaatttcataaaatcctaccttttatcattcaaattacacaaaaccacagagattttgacatgtgacatataacaccaggtattatagccttaaagttttcacaaaaccaccttgttaaccaaaattgccatattcctatattaaatttttttaaaaaactttatttacatttatatgatggataaataactcacaaatttgataggtgattgtagaactgaaaagtatagacgctcaaagtcaaaacaattaatagtgttgtttttgtgaatgataaggacatcctccactattacccgctaacaaagacacaaaagtcgggcggcgactatgtgagcctttgaataatcccaccttgcttagcttgggaggaggaaaccaccttaaaagggagagccacctgtcaggattatggataccatatacctaatagtagttgactaaatctcggtaagacccaccacataccatgtcttatacgaaaactgacctcggatatggagggagttccggataaggaaagacaaccggagttctacatggaaacgacaaggattactcgaagataaggattactcggattgtattcatattggtttccctagttctactctgacaaggggacacctatgggtataaatataagatcccctaggaggagaggagagacgaaacaatagatcaacatacaagccaacatacgccaagacaagccgccggatatcaacatcggagataggcctagtagtccccatacggtacctaagatacgactaccgtcaggaggatctagtgttgtctctgatctcgtcgggcacggattcgaggaggaagactactctgttgtcgactacgggatggttttatggctgccaagtcgacaacagatagataggctaccccaaatattgtactggtgtgattatggtaaataagagcaacgaccggcttcggccaacaggagtagggctattacctgacaattcaggggcctgaacctgtataaaaatcatcgtccccatctcttttacctcaatctcgcatatatcctagtaccaacgatccccatactatgcaaataccatagtcgtgacatcaaacgtcgacaccacccttcccctcttggactagtcttttagggagattaggcctttccccgagtgggtgtgcctaagaactgttggggtccgggcaaccttaagttattgggcctcggttgaccccacctgggccagattgttatgatgaggacatcctccactattacccgctggcaaagacacaaaagtcgggcggcgaccgtgtgagcctctctgaataatcccaacttgcttagcttgggaggaggaagctaccttaaaaggggagagccactcttcccctattggaccagtctttttgggagattgggtctttccctaagtgggtgtgcctaagaatcctccactattacccgccggcaaagacgcaaaagtccaagtgggtgtgcctaagaatcctccactattattcgctggcaaagacgcaaaagtccgagtgggttgtgcctaagaatcctccactattacccgctggcaaagacgcaaaagtcgggcggcgaccgtgtgagccactgaataatcccgccttgcttagcttgggaggaggaagcccttcccctattggactagtcttttagggagattgggcctttccccgagtgggtgtgcctaacaatcctccactattacccactggcaaagacgcaaaagtcgagcggcgaccatgtgagcctctgaataatcccaccttgtttagcttgggagaaggaagccaccttaaaagggagagccacccttccctattggattagtcttttagggagattggacctttcctcaaatgggtgtgcctaagaactgtttgggtccaagcaaccttaaattattaggtctcagccgaccccacctagaccggattgttattagtgaatcataatacatagagttaggtgtcatgtgtcatagggttatgtgtcaagtgtcagaatttctatgtgttttgtgtcatgtgtcagaatttctatgtgtttttacaacttactctctctatcccataaaaaacaaacctaatacgtgatatgaaacatcctagtactacaaaatctggacatacttatatactaatatatcacatcccgtaataggtttatttttacgtagggttaggtgaaatttactcttgtttttgaaatagtagtaattaattatttgtgctttatagggggtgtgaatggtcaaactctaaattttacacacatttataagtataaatacaaaataatagaaagtctagcgtagtaattaagttaagtggaatgtggatggcagttttaatttctcgcagagccgggtttcatactttcatgtgaatgatgatcgagttgttttttgaggcagtaatccgctatttattgccgtgtgggagaagagaaaggagagatggacggacaaaagtcccgtttaccgtaggagaggaccgtaaaaccgacgttgatgcgagcaattcacgttggttttttcctgacgtggagaagagagatcgaagagaaaagtagtcctgcgtactactccagctccggacatcagtgacggaaaaacacgactcgtcaaatatgagtcatctccaataaaccaaaaatatcctgattaatatatggctactggatagaacccataaccgatcacagttgatatatgatgagacataaccatggctataacatgtcacgtgtgacatatagtattatgaaccatcatatatagatgagaccactcatctttgacgggtctttaactaccacacgtgacacatcacagataaagttatctctgacgggtgctagttatgatccgtcagtgatgagtgaaaatttaaattttaaattttgcaaaaaatctcgagttgggacatgctctataaaagttgtagctctcgacgagatatatacaactttataactaacaacatttccattataattttgagttttttcaaagagtggtgctcttgtgaaaatgatttgaaccattcgttattaaggttaaagtagtaatttactaatatgtgattagggctaactttttcatttagtttttctctggctaaattgatctatggtcattccatgtgttgacaccactcatattccataaaaaaaggaaaaagtttggtcaatgctaaatgacaattataactctctgcacctaattgttttaacaaaaatacccctccatgtttctaatattgctaaccatggtgatagtacaattagatctgaatcttcgatcaaataagatcaatgatttagattgtcttctactactaagtagagagcacggtaatgggactctttttcaaatgacctggatgaaaacatgctttatatcaaagatatagagctcaaccaaatttacaatattataattgacaatattttcatttacaatattataattgacaatattttcatttgagatagtttacatactcaaatatccattataaggtgagatctattttgaaaaaaaataattctttaaacaacatcggatgaagatattctttacgtaaaagctgaacatgttgagaactataaatgtttagttgataatattttcatttaaagtcatttagagtattaaatatatgttaaatgatttggacacaaatagaaaaaaaataataacactgattgagtagtcaacatgtgatgaggatgagatttggtaagggtgctctttgtggaggcggaggtcttgagtttgaaactcataatacgcatgcatgtctatattacacaaaaaaatgtggatatgtaggttgtgatgtgtgaccttgtataggatggctagtaaaatctaaaatatttttttttactttttgttgctttaaaattaagagattgtcattcttgctttgtcggtgatgagtcgtaagagatgagtcattagcaacaggcggaagttacgacgacacgccactaatgacttatctgtgacggatgataagttatgacctgttacagatgacttaaatacccgtcagagatgagttatctgcaacaaatgttcactcgtcaccagtgatattttgtctttgctggaactagatccaaaaacttgcaaggggttgttgtattcttgctttctcttctataatgaaattggtagagctcctgccctttccttaaaaaaaagattttgtcatcactaaccatttatctatgatggggtttggacctgccagtgatgacctaatctgatgtagtgacgttaaattgttgtcgacagtaagaaaggaaaccgaggagttacggacgacgacttgtagctaagttttgataaacacacacacgccatgtatgctctaaattgtgtttgtgtcggtcacaacgtatatacatgtaccccattttgttccaagttccaacatcacgagttcatgacggattagtcacccttgttggtggatcaatataatctcgactgtacatgatatttcatacttttcttagaattaatcaattttagtctcatatgtctctaagagtattttggatatttttctctatctcttctctatctctactattataaaattgaagatgtttccactgtcggtcacttgtgtttgagtcggttttaattttatgttttggttttaatttatatatcttctctatctctactactataaaaattaaaaaaattttgctggtattttggtacgttatctgtgtatgagtcgatttttaagttcgtttgcttttgataatacagaaggaatcatataagaaatctgttaaaaaaacttgcatgctaaactgagacgatcagactcctaactgcagctcatgattatataaaaatatatgtgcg

SEQ ID NO: 8498 - DNA, 10625 bp, Oryza sativa
gggcgtgagagggagttacgcgcgcgagagagagggtgccaaggtgggctcggggaggagcgcggagggaaggggggactcatctgggccactcgattatttgtagatgaatactgatagttggatttgatgaatgagtaatgtaggtgtaagaatgagttggtgcaataaagttttgttttgtttaagaggaattttactatccttgaggagtctcaaggtaccaccaggtatctacctccttaatcaattgatatccaccgttaattcacaaaggttaatttagggacaaaatttattattaacaaggatagcttagtaattgaccaatcaccggttctccatccactgccaagcgttcacgatttcctttccacgatttcagtgcttaaccataatcaattccaatcccaattgaacgagctcggaggcaaggagcaggggctgcgcgcgcgacggcggcgaccagcaagcacgtgcgaggcggcgaccggctagcgcgagcaatggctatgaccagcgtgcggcggcggtgatgtcgactggctgccgcatacgtcggctacgatgggcgggcgagacgggcgcgtgcggcggcggagacggcgaccgactgccgcgttagtttgctgtgactggagggcgcataattcagcagcgacctcagcgtgtgtgcagcggctgagaccggtgggcgcgtgcggcctcggtgagcggcgggcgcgtacggcggtgacaagacatatcggtaaaagtattacataaacgtttaactacataaagaagcacaacgttcttcctcctctgctgcatgaatgcagcttatcttgaaacggataggagtaggatacagatctaaaaaaaagacgattttgtccttagccatacaaatcaattataaaactcaattaccattttaacctttcaccttacatactttgcccactcttttaatacctttcttctagtaacttctctcttggagcgttagatcattagagatcaacgatcctaattaattccaagtatagaagaagatctcaccatttaaatataaccgtctatttaaaaagggtaggattggaatatgtaattgccagctcctgcttgcaacaccatcgtctcaaatcattcgctatatgttgcgccacagttatagatggccaaatgagccacccagcccgacacggcccaataggggtcggggcaccatgctgagccagtccgaaggcacggacagcccatcgtgctttctttaaaataaatctatttcccctccctcttttttgggttgtgacatatatatatatatatatgtatatatatatatataattttctaataatctactcgaacgcccatgtgttctccttgcggatttcctcctcctccggcgtgaagtcgttcttgatcccaaactccttcctgatctgctccggcgacttgcctttgatcaggttcgccgtgtgctggcagcacaaatccagcaagctcttgatgttcaggaaattggacgccaggagcaagccgtacagcatgttcttgtccacgtcgatcatgaactcggcgtcgaagctcttcagctccttctcctcgtcctccgcggcggcggcgtgcttgacgcagtattcgatgaccttggcgaggaccttggaggcgacgttggggagaggcaccccgttcgtcgtgcagtcgttctcgatcatgttggagacgagctgcgacaggctcgccgccgccgacggcacgttaaagtgctcgccgtcggagctgattaagaggatcgtgtcgtcggcaacctccttcttgtctgccgccattgatctcgctactttgaaacacggacggacgaaactcgcggattgcaaagctcaactgtttcttgtctttcttggaacgtaaacgttgggtgtgcttggatcatggcgagagaggaggtggtgtgtttttattgcgtgaaaccgcgcaaaaacaactcggattcggtcatgtggagtcgaaatccaatccgaattcaattgattttcggtgatttccgcgttagtttggtgtacgtacgtcgtcgagactcgagagatttttaactggactgatcttcggaaccttcttccatagtctaattagactccttttggaaacgagtactctaattatttctcgatattaattaatttacaattattacagtagtaaaatgagattaaaatacgactcctactcggagtttaattatctcacgctgctttatgcaataaatacaatcacgccgcgaggttctatctgattaacaccaaactttccaagccatcgaccaaataatactacttcaggattagattatcgtcagaagttcatcaacaatggcggcagcagcagcggaggccacgaccgatggcggcggcaagatgatcatcctgatcagcgccgacgggaaacgcttcgaggtgacggaggcggtggcgagccaatcgcagctgatatccaacatgatcgaggacgattgcacggagaacggggtgcgtctccccaacgtcgacggcgacatcctcaccatggtcgtcgactactgcaacatgcacgccggcgacgccgccgccgccggcgacaccatgaaagcatcaagcacggaggaggagctgaagaagttcgacgccgagttggtgcaagccctcgagaatccggtgctgttcaagctgatcttggcggccaatttcttgaacatcaagagcttgctggacatgacgtgccagcgcgtggcggacatgatgtccggcaagacgccggagcagatgagggagacgttttcgatcgagaacgacttcacgccggaggaggaggcggcgattcgccaggagaacgcctgggccttcgacgactagctgtagctgcctacatcatcaaatttaatctaagcagaatttaggcatatatatatatgagattttcttagttttatgatttaggtgttttatgctaagtaattaatcgcttagatgttttgcttattatagtactgagacttcctccggtgcttgggagttatggtgtccgttgattacttgccagttgccatctaacggtctgtgataaaaggtatgtctcagaaggtataattaaaaaaatgagcaaggtattaacttgatgattaggtggaaggttagattgataactttagtttcatacagattagagggtggggctttaatcagtaaaagaattaggatcgataagccctgcttgctgataagaacagctttcttcagcaagtaccatacggacgaaacgccaccaccactgatgatccacaatgaccatgaattttgtatacatacacagattcaacaaactggttgatcgagccatacttgtctttgtgtatggacgaaagaggattatatttgtttctttggagtctaaatttagatgaggacctgaagaatcaattagggaaaggggattttggacaagtgttaggatttatgatctcatgtactaaaacgcaaaaaaaaattgaattacctagaaacgatgcgaacgacagaatcggagataagtaataacttgatgcaaaaaaagagatagacggttacatgtaaaaggagttaattatcggtgtttattaatgttttctattcctaagttgcccttaacagatcaacggtgggtgattaagtagtaagggaggtaccagaaagtagtaagggaggtacctctggtacctctcaagcaccttaaaagctctctatagtactatgtacatttgtaatcttttcgaatcctaatttatagagatcttcttctgtgcttggaattaattaggatcgtttatcactaatgatctaacgctctaagagagaagtatcaggaaaaatgtattaaaagtgtggaccaggtatggaaggtgaaaggttaaaatggtaattgagtattataattgatttttacggttaagggccaaaacgtctaattttcaataggcaaaatttgcctcagaacactcaaaaaacgtgtaattggctgggagacaccacgaaaacgtgacacggctgatagacactacaaaaaatgtgtaattagctctaggacaccggtcgcattattttattatttctgggtcaaaagaggtgagatatttttctaaattcctggattgccccttctctttccttccttttctcccactctttccttcttttcaccttcttgttgatttcgccgagaacggcatagcagcctcaaagccgcggtggggcgaggtcggcgcggcgtggtgcggcaacatcggcggccagggcggtcgatggcatggcacgaccatggaggcgcggtgtccagctagatcgatggcgggtaggcgacgacagtgccggtgtagcggggcgcggctgagcggcagcaccaagcgcaggcggggaggctacgatgggtcttggcatcacgacttgggtcccggcgtcaccactgctcaccggagaaagcggaatcgaccatggcgatggcggcgggttcagatcggcgccgatgaagaaggggtgtgatctccttctccggcgcaccatttttcggggtccttgaggggagatagagaggaggatgaggcggagatgctggcgcgacagcttggcccggcttggtccagataagcgggaacggcgatgatgtcgctgcggcggtgcacagagcgcgctccagagctctggtgggcacgacagcgttcccgtcgattggctgcacgaatcgagaggttgtcaaagcgagatttgatcggcatggagagaagataatagaacatgaattagataggaatggagacagctcgttggtgatcggcggcgccctccttctcggcggtcgacaacaaaagagagatagagagggagagctggagctctcttcctcggatggcgatgcagcagggacgagatggcgatgcgtcgaactcagccggcgccgatctctctctcggctgtctctggtcgatctctctcccgtcgcacgcccaacacgacgagatgaggaggctattctccaggttcggcaagatctagagggagaagaagataagggcaaaactgtcattttacgttgtttctctctcatcaattgaacaaatattatactataatgtgtccagtgtcctgcagcaaattaccacatttttttagtgtcctcgggcaaattcttgttttcgtggtgtcccatagctaattacatattttttgagtgtcctgtagcaaattttgccttcaatatatgtatatccttcctatatatgttctgttctgtattccatccattcgtatcgctgcttggttcgaggcgtcggtggaggtgacttaggcgctgaggcatagggggagagacggaggcagacgggcaccccttacagcgtcgacgaccgtgagctcggctcacaggatcgctagctcgcggcagccgcccgcgccatcgccgctttggagctctcctcgtcgaagccggacgcacccaccgatcgcagccgctgcacgcgccctggggttgccgccgccgtacacgccctacggtcacagctgactaatgtggcagccggtcgccatcgcagccgccgcacgcgcccgtagcgcccgccagtccaagccgacacacacggcagccggtcatcgtcgcgccgccgcatgcacctgttgcgcccgctggtctccattaccgccaccgcatgcgcttgttgcgcccatagcgcccgcccgtcgccgactcgccgtcaccaccgccacacgcgcccatcacgcccgctggtcacagccgccgcgcacgctcccgccggtcgacgccgtcacacaagctgccactgccactaattaagatacccctgttaatataattttttttcctaaattaccctttatgaattaacggtagatatcaattgattaaggaggtacctaaggtaccttccaagtaccgtaaaagatctctaatttataatatgcaacaaagttagttttgttttgtttgagaggagttaccatccttgaggaggtaccagaatgtgtaattgccagttcgtgctcacaacaccatcgtctcaaatcattctctctgcgttgcgccacaattatagttggccaaatggcccgcccggcccggcatggcctaggccaagatttgtcgggctggcacggttcgacctacacaccaggtcgtaccgtgccggcccacgtgctccacctatggcccaggcacccaataagggtcgggccgtgctgggccggcccgaaggcacgggcagcccatcgtgctttctttgaaataagtctatttccctccctcctctttgggttgtgacatatatatagctaaaataagtctattttacgtccctactctttgagtcgtgccatataatacgtcgatttgtcttcctattctctgtgccctgtcttacatatggtcgaaagtaagtctatttcacctccttgaacttcatgtcgtgctaggccggcccaccatgatgaggcataggcccaggcacagcccaacagctgggccgtgccggcacgggcctgacagcaatcgggccttgccgtgcctggtccgtgccatcgagtcaaaacctcgtgccttgggccaaaggtgggtaaattgaactattttgatatttagagagtgttggatacccggttttagagtttgctatgaattttagacctagacaggacttgaagggtgtaaaatggattcatccctatttttttattacatatatatagaaatattaataaatatataattttatttatgctatttttagactaaaactaatatagttctccttatttctaacacatactttacatcatgatattcatagtccaagtctttaaaactttgacaatagtctttgttcaagatgacaagtattatgaacccctctagaagtacaaatttattgatactctttcttcctaccttctactcatttgttttctgcgagtaaacttcccgaatggctagatgtacaacacgttttttcgcaaaaaaaaatagtaaaattaattttaaaaaaatcatattaattcatttttatgtttttctttaggaccaattgcatatttgccactcgattgaaccggtattgtgaatatgccattaaaaaaattgcaattgcaaatttgccactaaaaatgatttgaaccctacctacctgccattggattgacggcatgagctaacatcgttaaaaggtataaacattatagcatctgaggcaacaaacaaaagacaagaaacatttggctaaggctccatagcatatcaaatggatgctaactgaatttaattctccttcccattccctctaatgctaacttaagtggcaaatttgcaattcatgtttttctaatggctattccgagttagggggtggaaagtagtgatatatttgcaattctcccttttctttaagctaagacttaattattcatgcgctaatgagccaccttgttttacgtgcgcgggaaagaagcttccagcccctaccactaaacacacggcctaatactggcaccttccatcatggtttactagcctgtgatgtcgcgcattcgcgtgactctatgcctcctgttacatggtacttaggagtggcaatatgtttttatgggtttctcatcgctcgtaaaaaatataggtcagaatgactaatattatgctcatacaatagatagcttaatatttattacaaattttgtatctgagtgagtcattgttttataggttttcacgttgcatgaccccttattttgaataagcgcacactatttatagcctatgctgaaatattttgtaggtttttaaggaatgaatttgatttcattttatattcatgtgaaaaacattaaacctatattcgggcgatatgattgtgcatgttcttgcagcaatttttgcctcaaatatgttaacaattaattgttagaaacaaaattaatcgtatgaacgcacatttgtatatgttcttaaatagctgaatcttgacatgtgaatatttaattaggatgagggtttatttgtaaaataatttattttattacatgagcaattcataaattatttgcatcctatgcctattctctagcttttttccccttccctctttctttcctcttctagtagctttatctccggaagcctctttaattattatttttatcatccatctaatccaacggtccagattcatttattctcaattcatcaaatgatgtcactcatcctcaattcattttgagtttcacttttcattagttaagatatcgatagctttagtgttggcatcttcttgcttgatgcaacaatactactattacttaagtaatcatgcacatgcaacacatgtaataaccactatgatttaaaacaagcatattgcccatgtaatgcaagatttccgtcatattttatgtaattcagaatccataataaaaaaggtaaatcattcatgatactatattgaaatttaatgtaccaacaatacacataagtctctatataaaaatacatacaacatacaaaaggatgaggatcaatggtctccgaactagcactttacacattgttgatgcaaaaaaaaaataaaaccctggcctaagagatttgcttaactctagtgaaaaagcttgccttcagacctaaggcgtgccaattggtttaatactgcaaccaacaagaaacaagataaacagttaaatttataaacgatagccaatcggctggagggctgatgacatatcgtctttaacctagccgatgcaacctggtttgaatcagctgtaaggtgtagcaataaaattaagaccctaaattcatgtcatcagctgtaaagattaacattacataatctatgaatcatcattacttgaaataacagtgattgggatagatagaacttaatcgagacagtataaatcacttgtatccgaagttatatgaaataaagattatacgagttcatgtcatagctgatgaaagaatttaagcatgtatcggctatagcttcaatacaaccttatactggaatattactctaatataaatatattgaacaaatatcaatctaatgttttttttgcggggaaatatcaatctaatgttagattaattataacaagaccgatgataagcataatatatttagatgattaagattccaatataagggcagatataacttgtaaagcaatacaaagcaaagcaaaacaattatatcatgtaagatcggtggaaactccgattctatccttaattacaatcataaagtagcctagagattatggttctaaacatgacttagtaggtcgaacccaattgatgcaacactaagtgtatagagaaacataatatctagacaatcaagatgatgattgtttttcaggatggtggatatgttatactaatctaagccaacaaagtaatctagccgttatcgggaaaaccctagaaagtgatcgaccaatataagtacaaagtattgtcaatctagattatataacatatatgataactcgacattttacatgagcaagattagagtgtcataatgatgtaagcacaaatcccgaaaatgctaaccaccataacaagttttacctcttgtcgaagatcgtaatcgatgcagcccaactcaaaagcaagaactcgtcgaaaagtaaagtaatgaaaaggtggcgatgcgccgagagtatatatttatacccaaatacataactcatccataacggacacgactcacacttcctattacaactctaaccgacgaacaagtcccttaggtggactcttaataaggaaaatacttaatatcctaattaatggatacaatttcctatctcggactctatccttgcccagcaatatcattgatgctcttcattcaaatccgacattgattatgagaccaatcttgccaatatcggttgtatcgactcaccgtgttcaactcgatatcagcctatacagacttccagccgatgcaaactctgcttccagaaatatcgcatctcttccaaatctaattcagtgtttatctccaaatccaatccatatattaccaaatttggtcgttaactcatatcttccaaactatgttgatgatggccatagaaatcgctaagtggggaacaaaaatcttcatttaccggcccaccaccgtcatttgactttttcatattataagtaatttgactttttcctagtcaagtttgactaagcttatagaacaaaatagcaacatctaaaatatcgaatttgtttcatttaatgtaatattgaatatattttgacaatatgtttttttgttgaaaatactaatatatttttctattaacttggtcaaacttagattgtgttttcgagacaagaagttttttggtagagtcttggaaaattctataggtcacatatttcatctatttgagtttaacttttctatggttggttcttgtgggctcctaagtgtgaaaaaaatatcaaaaacataaaataaaaataaaaaagttgcacgtctctcttctacactagagaggagaggaaaaatatggcatgggtagagggtgggggggggggcggcgccagcctcattggcg

SEQ ID NO: 8499 - DNA, 10755 bp, Oryza sativa
ttatacgcgtgcactctccagggacaaccatctttttccttaacacaccgaacttcatattgcgaccggttcgacttggcaacccaaaactctctatgaagtgacactgcaaaatattttaccgcctccttcatatcttctgctctactataaatcgctccctgaataacctcattttctttgtactcccatctcacactatcctcttcagagacgattagcccagaaaaatcctcactagcccattctgctggattaatatccgtctcatcatctgacgaatcaccttcctctacacgctcgttgtcagaatcctccctctccatttcatccacaatggcaccgacagtctccccctcgtcggccactccacctggttgaatgcccactggagctactacgcccccgtcctctcgtgcgttgacctcctccacagaattctcatttacttcagcacttggtccctcgccatcatccatgttcatctgcacacttggatccttcgggtgaacaaacggaaccaaagctagaggccacccgcgttgcaatgcattttccaaataccatctccacactcgagagttttgaactggcattagttcccaataaaaaccctcggttgtccgacttactataacattgattgttatgtcgcttgtctgtggatcaattctcaagcccctcattaaccatccttttatagaaggtacactcctctcagccggtctatcaattcccctttctgatacaataaaatctgacagatctaccccagttggcccgtaatggacgtttcctggtccatggtaaacttggaatatttgtttgttcgacatatctgtcaacaaaataactagatcatattactctttcatgcaataaacatctacaacgtaatatcttcttgtgtaagccaatgcaacggtaatgtattgattccaaactagcagatctacgtagttaccgatatctacaatacgcacttctagattagtacaactaaaaccctaaaaatataatgcatttattcaaacaaatttttaaaaaatacacactatttaactcaatagtcacatataggatttatgaatattacctgaaatcggcgtctgaatccagcagggcttcgccccttcttctcttctcctcccctctcttcttttttttttcactggatttgaggagggaggaatgagggctgggggctgggcggcaggccttttataggcagcgagacctgccagagggcggcaaggggctttcttcaaaatggcctgccccgactggcttttttgcattcgggccccttgccgccccaccagagagcggcaagggtttttctgcaaaaaaaccctccctccgtcaccgcccgtacctcccccgtttgccacgtcagctgccaccccagaggtgggtggccgggtctatttttgtaatttttttggccgatagattatttctgtaaatatttaaaaaaaatctaaaaccgaaaaaaattcgtcgggtcgcccacgacatgaactcttcttctctttctagtacagaaccgggggtgttagaaaaaaaagagaattctccctaagccaagccgaagatccggcggcatccatgtcgtatcgctccctgctgcacaagaggatcctccccgccgccgccgccgccgccaccgccgccgccggagctgctctccggcgaccggcggccggctctcgccttctccaagcccgacttcaccaggttcgcctcccgctcacgaatccgtcttgtttagtgtttaccactagtagttttgaatgcggctaagattgatcgattatacgttgccaaaatcgacctgcgtcaagtcgcacaatatcagatcgatctatgcgcttttcccgggtagaatttggtacctcaccagcgtggtgagctagcgacgattggggattggggattccatccacattcctacagtgacaggtcttgtcctgttattactacattaagatatacattgagatatgcatcaatgaatgctatatcaatgaatgctcttgatatcttgttaggttatcaatgaatgctcttgatatcttgttaggttttggattggaacatatattcaacagctactgtgaatcgatagttcagggtctgtttactttgatgcaaaaaaaaaaaaaaccttaccaaattttagcaatgccaaaacttggcagcaaactaaatataactattttttttgacaactttaccaaaatttggtaaggttgaaaatggcatcaaagtgaacatgacctcagttactttcaaaaagaaagcatacatacagagtgcttcgttgtcaaattgttaatatcttagctcaaattggtgcaatatactcacctctaattttgccactatttgtttgcagggtaatggaaggcaacgcagcagcagtgcatttctgacgctggttttagagacagcgagaaggatatcgatagggaaatagaacagctcgctcaaaagttcgaagaaaacagcaaacggtggaagcaagaacgggaggagttggacaacctcaggaggtacacctcctcctaaacatcttgcaattttcttttcgtcatatgattcaatttaactccatcgaattgactattatatacactacttcctttgtttcaggttataagattttctaacattgtccacatttatatagatgtgtctagattcattaacatttatatgaatatgggaaatgctaaaaagtcttataatttaaaacagaggtagtaacaatcataaattaatctactgattctctttttccccctccatgttcttgtcggagaaaaggttggatttggaagagatagagaaatccagagagagaacacaaaagattttagacgtcgccactggtgttagtgctgggtttttcctcgtgggtattgcaagctataataatctgatatagcttaatgagatgttaccatcggaggcatctgtttttcagtttatattgtaactatttattgtagtattaataaatgttcagtgttgccaggaaggtggaaatgccttgtcttctttacctactttatttatccgtcctaaaatataatggattttgggtgtacgttcttgtgtatgtggcgcctcgagaatcaagctacttgtactcttgttgtatgaggtaatataggaatttgccaagcatcatgtgactgaccatgagaaccatcttaatttagcgatggctagcttctcttctcaggtgacggtgatggcagccatcaatttctcgaacaaatgacccaaattagggttcagagttagggtggaggaaggtaagtagggactacggattgttcgggtgtctatactactccctccgttttctaatacatgacataattaatgtttgatacgatgtttgaccatttgtcctatttaaaaacttatgtaaatgttgtttattttgttgtgacatgtcttatcattaaaaaaaacatttagacgtgttttatactttaacatatttgtcctaactttttaataagacaaataaccaaatattatttttataagtcaacatcgttagctattaaaaactggatagatgtagtataggaggttgaccagcggtaggtgatggacacggacatatgcttcttgttccatcttgatcaccgggactgcaactgaatcaccttaatcctcttactcgcacaaccatggttgcctacttgcccaagtatcttatcactaacgctctaccactagctttgggctcctcccttctattggctcataggatgaccgtgacttgaataaaacgaatggtcaaatattatgtgaaaagttaatggcgtcatacattttgaggaggcactagttattacaaattatacgtatgacacggtattagtagttagcgctgtctatgatgtctggccttgcagttgacgtgggcaatgaagagaagcagggcggtctgtaattcgttgcttgtatgaggtaaagtatgtcttagttcctgttttatagaacttttgatccaagattttagagctggttcatagctttataaatttatgaatatggatttacaattacattgataatgaatcattttgttcccattttacataaaatataaaattataaacctctgcaatttcacatctattatgcaatattgtttccgaaatcttttgatatgtatgtatagagggtgcattagcatataattaagcttaatttctgaaagatgtgtttggagaaaacggtctgaagaagagacgcgccttcaacatatattacgacgactctccttttccttttgcttacttaattcttgttggtaatcttcaatgcatatatcaaatagtttgtaataacgtatggcttgaacttgtcgtcacagctaaaaaacaatggcacgtggaggtttactgaaagttactaaataccacgaaggacgggctgcgatttcgtgattgtctagctcggagcgatcgagttgaaacataaaacagaaaagcaaatggacaactcgctgcagcgtaaaattgtcgagcttattcatttggactctaaacaatcttttctaaaaataaaaagaaactaattgattctgcctaattaatagataaattgctatgccatatccttcttaaatttggtctcttccagataagctttctttattaattgattaatttacttaaccaaatccactaagaatatgactgctggtgaccttcaatcaaccaatctctagaactctaatactctaatactggtactgactctaaccgatgatgactttggaggttaattactaaatttttgtattaatacgtacaagccaggagtctatctaagacttcttctttaaaaagcttatatgactggaggaacaaatattgagaaaaatgaattcaaccatcgtactcaataaatcatatcggaaaatgcaagtggtacaaggagtaatataataggttgaggttttgcataaaggcaattttcaaacaggcaaggtttaaagcttcaaagcacgatcttaatctattcatattattaatcagcacacctgcacgaactttgctttaactcatgccatcaagttgtagttccaaacattctagtttaacatagtaaaatctctaacttgggtatatttatttttagggttgtccataaccgattgttaatacattataggatccatcaaaacgtacaaactgttgtgctaaatgttagccctactcaacttcaaaacgtacattttgacttaacagagttctctctggtggtctgtcctcacaggacctgggagagagaatggtgatcacaatatctgcatgttttctgcttgatctatctatgcttatgcatgtttatacttcacatcctgcaaactatcccaaagcatttgctgtacgtagtctgcagctcgatctgtgcatttcacctcgtattccatcacatgcatgctttatcccattatctctatgaaaaaaaaaaactggcaagatagtcctcaagttatatatatataaatcaacatttgttccaaactaagtgcgcatagatatcataagtatatagagtgctcttacagaagagatcgagtgcatatcagatacatagccacaacaaaagatcgagcgctctcccacacaagacatcagagtgttcttacttcttacttagagctgaaccataagacaaactggctaaccagagtgcaagctcttacatgatcatattgcttaattttacatagccatagaagcaaattaattgtagcacagaaaataaaaccagatagatgtttgtttgctgctcgcccttctctgcttgactactgtttgatggatatttttaccaaaatttatagaaaaaatgataaatcattggtcattaatttcatattcgaatataatttgccgcccaattttccaaaatatatgtgaagggtgtctttgacacgtgggcccaagaaaatcaaatacaaggcggcgttcaaatatattaaatattggactcggtttgttgtataatttaaatagaaaataatggttcaaacagattttaaatccgatgtacaattcaaaagatttgagccatggaaagaaaagaaataagcaagtgctatcgttacttgctttggtacgtgagcatgcagtcattatctctaatttggagattaaacgcaggaggcccactgtcattagcactgttaattctaggatgatttaatcggcagtagttatctcgtgcagatcggtggattagtacgcctgtttgctgtcttatccaaggaaattcacgcgtgatttgccgttgtattcggacgtggttgagagtcccagcctgatctatccatccctacatctgcctataaagcaccttgactcccactgctcggggggctggcagatgcatccatgcagaagcgctaaggcgctgcacatacacgccacgccggcgccgccgacgctatgcgctgcgcagggacgcaggccctgcgccggtggccggtggcacatgcacccactcaattctcggtgacttgccggcggctcgcaagcaggcgcgccgtgcagtggagattaaacattcccccatcgagctgatgtcgcaggcggagatgatcgtgctaggcggtgagtacgatgaataatttcctccaatcctgttgctaaatcggtcgttctaatggatgattggagtacctcttttctcctcaacaattgaagtgcgatgaaaatcaaatcgcatctgctttcttgaaacataaacttgggcatgtctaatctacggatcggactatcctcgtatttttttataatcaaaacatatgttttacggtgcacatgccgggagcgagccccaaattataaaacaagggaaggagatgggagaaaatctctggtgctgaggcggctgacagaggaggagacgtaggcaggcaactctgctgcgtgctctgatctgcttatagttccacaatcccatatccaacatctacacaatttacaagccgtcaccggggcgcacacatgtacacgccgccgccaagcgctgcgccaagatgcaggccctgagctggtgatgataaacattatagctacacaaatatttgggaggaatcgggagaaggcaaagtaatcgtcaaggagtctgcttcatcatcgctggtgcaactccaaattaatcattcgccttctgtcgagccgcgcttcatcaacataatttctccgtcaagttatttgtcatcgacaacacaatggcgccgtagtgctgtgcagatattatgcatagcccgacattgtctcctagagggagcaaatatacaccgtagcgttgtgcagttacgcagtccggacggtaaaacagtaaagtggagtactggtgaatatgtcatggatacgttgtgaacttgtagccatggatataagtatccccaacggcgcatgcacatgcacacgtcatctttgtcaagcaattaacatgagctgcaaataaatacaaggcgagcctgaccctcgtgagggttggaccgtctaaattatcaatatcaaatattggatgtggatatttatttatataaacttggaatgagtttaagtcttattggcatcagaccaaccatgatatatacatatttatattcatgccggatgaatcacacattgcctcgtgcatgtcatgtacgagagcaatttcttctctctctaaattctatcagatggatgggggtgattctcaaaattcttgaagacaacaaaaacaatgctagccaggagggcgaggcatgcagattaaaacacacatctacatcatggccgagtgtcgacgagatgaaatggctaatttatcaatatttgtgctatgtccgagaccgacgaggccggacaacatattggctaaaagctaacaaagctatagccattcactcatttcatttgtctatgaccgacgaggctagacgaaatcatggctgagtgccgacgaggccaggtcactatactattaacacgtctaaaatggacggagccggatacaccgttgctgggcaccgacgaagcaaaagcaaccacaaaatccatgtttgatgaaggccgggatacatgactgagcaccgacgaggcaaaagtcacccgcttcaccaaattccctccacacaccgacgtgatggtagtgtattgtgattgggttttggcaaaacaaagccacccattacatattcactatattcaccattaaatctgcaccaacctcaatcttgggcgagcaaataattttgaagacgacgatcataaagcgcagcttaatcagaggtattccataggctcgtcctatggatgtaattaaccggcagcctcattgctaggcgccgggaatcagcagactgcacgcaatctccagttagcatacctttccattaagcattcctcgcgaaggcaaaaggcgaacttctgtgggagccctcctatgtattttgtaaacattcatgttaatgaatcatgattaataaaatacagggtttctctattttctgtgtgttcgttgatttgttttcatcaaacaactacatgtagacacgggcgaaaagatagcacccaccacaaaacccaaggaagttggcaagcctgcaaccaacgaacagatccctcctcatcctcttctcaaatgcacggacccgatctttcatcagccttaattaaagagagggaaaaaagaagaagccatgagtcacatttgtatagttgtacccctataaaacagatcttggcagctgagcaattgtacctctataaaacagatcttggcagctgagcaattgtacctctaagtttatctctaaaatcagacttcaacaaacatactccctctatagatgttaatgaatctaaatacacatacatgtctagattcattaacatatatatgaatgtggacaatgctagaaagtcttataatataaaacggaggaagtactaaacacacacacatcaagtttcagaaaagcttagctgctaaagtcatgtttgctgaagtaatgtgtgtatatcatagtttatttttgttgaaaagagcaagtcagaaatctgcatattcaccaatatggttttaaaacagcaatatccaaatgctactcttaagtttgaacatactcgcattccaaacagtgaatgcgcgcattgaaaagagccatagcggcacagaatttataagaaaaatatacttaattattttaagtcttaagcagtgttgactgaatttaaaacttgttacaaagaaatctttcaaggttaatagaacagatattaaacaggtactcacattagagtccagttcttcagtaatttatctccaaggtctgagactcactgtacttcaaaaattagttgcagcccaaacactctgcagtaatgctgagacggttagaatttttcctagcttgacaaaagattaagcctgctatttgaactagggaaacatatgcagataattaataacttattttctcacacatgcagaaaataacctttttttctcacacatacaaacaataactttttttcttctcacaggtggcatagtactacttatcagcttattcagaaaaaaaaatctgagaaacttatagtgtgaatgatcgcattgagcaaagcttaagtgaacgtatccgccagcaggatttaggaactgtaaagggcacaaatcgtatgtacaataaaatttaatctttttaccaaaatagatatgccaagacgtatgtcgttcatagctagcaaggtcaattttggtagcacagaaaaacaaaaggctggttctgcatcattaattaaccaatgtatcaatcacacaaggaaaacaggggaataaaagagtagaacctacaagtcagaaaaaaaccgacgtcgacggtaaacagcaaggggtcccaagaagagaagcggctggttggccaacgccgatttttgaatgggtggcttgttctcctgccagatgacgacgctagtgtgcaaatcaatcatgactaaaataaaaaaaatgattatattgaaaattcactcagaacaacccagaaatgatatcgccaaattcagaaatattcagaggaatgctcactcaggcatttttcattcagccttgtgttctgatgatagaagaaacatggtttatagagctgtttcacaatgaatatctgctcaatcaagaggaagcatttctcattagttttagtacacaccatgtttagagaggtgatatacgtttttagaagctgaacttcaactgaaataatacatcaaggggttagaactgaattgagtatttttttattattattattttacctatgctgcaatctaaacaggcaccccattctaaataatctgaaaactcaacaatctaaacaggtttcccattataaaattataaaacacatgaaattggttgtaccttcaattcagggaaggaggttttgcgagtgcgaaacacctgttcgtagtgatatgggaatagataatggtggcagcgccgtaggctgaaatgacggtgagacggccctcttgacagaagagtcttatactcaagcaattccttacactgatgagatgaaaccaattcagggagaaagcttaaaaaataaaatactgatgacatcccatattttagtggtgcaatcaatatagaaaacattgtcattatattcatcagaacttggacatgataatataccataatgattgtttt

SEQ ID NO: 8500 - DNA, 25333 bp, Oryza sativa
agaggtctatttattaaatatgtttttcaaaaggaccaaattgtgaaacatccaggatgggagacggcctcgagctgtcgagcatgccggccggtcacctactagccagcctcggcggtgcgcgtgaagagcttcttttatgtcctcgagggccatttttgctcgcctccacctcacccacatcgttaacattttcttgcccattccgagtgaagcttctgctgcttcgatggttcaacgtgctcgactaaggcgaggtggtgcgtggcacggatgtttgcgagacggcgttcacggcaagcactagatcagcgaggatggcatgttcagcaccctatgctgcaatatgcgtgccacgcccggtggccggtggcggtgatcgccaatcgtcatggcgaggatggcgagcatgcggacatgagcagcgagatgacaatcgaagacgcgctctggagtctagactcgctcgacgacgtcggctggcgcgcgcgtacacgtaccggaatcgcgcaaaggaacatcgatcatcgtaatggcggattccatatccccacagcgcgttcaacgtgctcgacctcagcgtgtctgacttggggctgatcctggccctccttgttggcgcgcgcactcgtgaggcacagcgctgccacatcggtctgggactgggatggcggtcggtcgttggcgtctcgttccacttccacgctctcagaacggatcttggggaagcagagcacgtacgtgccagcgcccggtgaggtgtgtgagtactggatcaacgacgacaagttaattaggcaccctgtccctgtgccggcgctgtgcgcccttcgaaaatgatcgacgtgctgcgccaggtgccggtgatcgccactagccgtgcatggcaacgacgatgagcagcagctatgcaccttaaccggccggtaatggtgcaagtggagcaggctacgccgccaacacggcttcaattattttcacataatcactgccctagaatggaactaatagggttgacattgtagtttttagttcaatcgtcatgctaccatataattgctgcttcagtaattgcatctcaaacagcaacttatatggaaatgaggcccaagtcaatactagctcaatacagaaaaatagaatcaaaatgctactccatagagcaaaacatataaccaaatttgtttaatccataaacaacaatagctcagtacagaaacgtatgctatagagcaaaacataagaactacgcagcggttgccaccacctcctgctcacgagcgggctcgctcctcgcctcctcacgagcaacacgatatcgtcgctgcatctgccgcatccaccttacgaccactgcagcagttccctagataaaactagttatcatttatgattcatcgctcttcttgccaccaatagaagtcctatcattgtcaactagtatttaatgagtttggcccagtcgatcgagcccagtagaagataaagtgccccatgcccgaggatcgtggtgaaggtacgggcgaaaaccatgcgtcgcatcacgacatggtaaccccggagcttggccctcatgtcgtcgtgggagtgaaggagaagatggaattttttttatcaaataccctccattttcattaatagaacgtagatcaggctacagcacataaaagagaaaaggaaggtaggttctgctacagcgactaggccatataaaaaacaaataggcgttcacaggttttacaacaaaagagcacaaagaaatgaagcccatctaagctaagaagcaaaagactcagtattttctaactatccagacactgcatttagtcctctctatcagcaagtttcaccccttcccaatttgtacccgacattttaaatttgttggatgaaatagattctgattacaataaatttgaaatatatatgtttgaaagtttgttgatacagtctcattcacatagtagcaaaaaagatacaaaacgggaaccttgccatgataagataacccctaaaacaaaactaataagaaaaacctgcgaaaaacaataaaaagaaaaaaaagagagaggtcttatatagagcataagaagtatgaaaaaccccaaaaaaagctaaagcacttgagagagttgattaaataaattagggtggactagttaggcttacaagaagcaagattaaaacattgaacgatagagaagtagtttttgtgtgggagaattttgattgggttaaaggaggaaatatttgggattatagagacaaaaataaaaaggaaaatatttttttcaaacaaacaattgtgaataaaaatgataaggagtgggatttgatgattgaggctgcctagaaagaaaacaaagaagatttcctaagagaattgacacatgaactgaattgggaaggtaagtataaaagagaaaagaaagaaataatttcacaaatagaataaattgacagaaaaactaaagtccatgggatgaattgggaggacagtgaactgagaagggagttcgaacagaagttaaattatacaataagagaagaaagggttaaatggtttcagagatgcaaggatcaggaaactatagacggggataataatacaaagtactacaatgccaaggcaaatggtaggaagaggaagatccatatatatagcctactgcaagagaggaatgagcaataaaagatcagcacaatttggttgagtacatcaccaattattataaaaatctatctggtcatgctgagacaaatatcatgtcccttaacatggagggatgctcagagcttcaggaagaagacaaagaagatctgattaaagaaattttcaaagaggaagttttggcagttgtgaaagaaatgagaaaaaattgggaccctggtcctgatggtttcccccattgaattctatgaacatttttggggcttgattagtgctgatttgatgaaggttatattagatttccaacaagggctcattgacataaaacctgaattatggtgtgataatctagtctcaaaaactcatttacagatttagaagtataggccaatttgcttgttgaatgtgagttttaaaattataactaaagtgttaatgatgagattggttacaatcattcaatacttgatagccaaaaaccagacatcattcataaagaacagaaacataatggagggggttttggtcttgcatgagagtttgaattccttacatcagaaaaaacagagtggtttgttattcaaggtagatttcgaaaaagcatatgacaaagtcaattggagcttcatttttcaagttctgaaagcaaagaaatttcctgacaaatggtgtgattggattatgaaaactgtgagaggtgataaggttgcaattaagatcaatgattagattggtccttatagtacatataaaggtctcagacaaggtgaccccatgtcgccattgctttttaatttggctgtagaagcactgactatgatggtgtagagggtgttggtgatatgtcctagaggcaatcatagagatgattgtatcgcatattatgtttacatatttatctgacattgttccttgaaatagataactcattattgattaatgaatatgtgattctttcatgagactttttatgttgtatgttactatttctaaaggatctctgatcaaatatcatatgtggaacaaatatgtttaaatgatcagcacatgtattaattgatgatcatgtctcatagatcatggtataaagataccaaattaataatgtggacacatgttggggaacatgttgttggatagacccaacaagagactgcaagagccatatgtgttgtgtcatcagtgatatctcatttaatgttggtgctgaatccttagacctgagattatcatggttctcgacatgtgtagtagcttacttagagactgctaaacactactccgtaattgggtagttataaaagtagttttagggtatgctatgaaacatgtagtgggatatgaataatcaagatgggatttgcccctcctatggagagatatctctgggcccctcgatgttatagattatggaagtgtatggctatgccaaagatgattgaggagtcaatcacaaattatataatctatcacaggttcgagtgaatgattgagctaatagaggatggcacatatctagccttgagcttaatcgatgtcgtgaggcaaaggggttcatacaagtatacactagaggttcagccgatgtgatctttatgtatgcccgatgggtcaatacgttctgctaggggccgctgttgacacgtggaccgaaaaggagtttttaggttacagccgagtgtacgtgaacctatagggttgcacgcttaatgggccggaataagggaattggatggagatccaatatgagcttaattcggatagggatccaaataggagtcctacgggccttggaggcccgagtcattggatcctatatattcgtgactggtgtgaccgacggatgtattgcatcacgtgagaaactctagccgccactcccctctccgagcaaaccctagccgcgtgggggtgctagcacatctgcacgtggtgttccgtccctgtacgtgtggataccggtagaggcgccgctgttttgcggtgctgatcggcgtgggagaacgacgaggagaacgcacgaggaggagaaggtcgagccggtgcgatcgactacttcgtctacatcgacgcgcgctacatcgcgagggttccttcacctacttagcactttcttccgttgtgcagcgcgtcgagtggtaatgatctatgatctaatacttgcatggttcctagtttatacggtagaaaattttgatttatgctatcgtagcctctgcatatcccaacagagggcagaacagaaacagttgattcaagggttggagataaataatgagtgtagtattccaattctgcataatgcaatatgcagatgacaaaatctttttattgagagacaagctggaagatgcaaagaacctgaaaaacattttgtgtttgtttgaacaattgtcaggactgaaaataaatttcaacaaaagtgaagttattttccttggaaatgatgtactgaggcatcaggaatacagcaaaattttcacatgcaacaaaggggacctgcctatgagatatttaggaataccaattgatcaaaaacacattctaaataaggattgggggcagacagaaaagaaaatggagaagaaagtgggttgctggcaaaggaagttgcagtcaatagggggcaaagttactctaataaattccagtctgagtggaacacctcagtatatgttgtatttttatagaattccaaaaggggtcaaagaaataatggatttctatagaagaagatacttgtggcaggaagatcgaggaatcagaaagtaccatatagtgcagtggcctgtggtgtgttcacctagagatcagggaggcatggttttgttagatttagacattatgaacaaagcacttctcgggaaatggctttggcctttggaaaatacagatggtatatggcagcaattacttagagaaaagtatctgataaagaaaattcttgcaaacaagaagttgaaaaatggtgattctcatttctggcaggggatgatagatattaaggaggcattcatgcagttcataaggaaaaagccaggggatgggaagaatattcttttttgggaagataattggttgggtgggagacccatagctgaacaaataccccaggtttacagtgtcactcattcaaaaaatataactctagctatggtaaaagaaaaaggttggcaatcaattgtttttagaagaaacttaactggagacaggctgaggagttggaatgaataaaacaaagttacaaagatgtgataatatcaaactgtctatacaaaaaagataaactaagaatggggaatacactctcaaaactttttacacttttttgaaaatacaggatatgatcccaagattgccagggaagcacaaaaaaatctggaagttaaaagttccattaaagataaggatctttatctggcttctgataagaaaaagcatcctcacaaaggataatttaatgaagagagggtggaaaaaaggagctgagttgtgtcaattctgtgataaaaagaaacagtaaaccatttatttttagattgtccacttgccaggtttacatggaatgtggtgttctgtgcttttgatttaaaacagatcacaagtctcaaacatatttggggagattggatacagggcaaggacaaaacaacaagccaattgattctagtgggggttgcagcagtactttggtcaatctggaaacatagaaataatgcatgttttagtcaaatttatcctattgatccaactgaaattattttttgtgcttgttactggatatcaacctgggctgttttgcagatttcggaggaaaagcgaagaaagctgcagtggggggtacaacttctaaaacaggtcacaaatgagatcttcaaatcacagtatggatggagaacaggatcaagaagattggaggggtgaacacaactggacttccagatggggaggagaatgaacaaaaacaccaactacgtgcaatatctggatagttggaaaatactaaggcttttgcttcttacttcctccatttcatattgtaagactttctagcattgctcacattcatatatatgttaatgaatctagacatatatgtgtgcgtagattcattaacatctatatgaatgtggacaatgctagaaagtcttataacctgaaacagatgtagtagcttagatgggttttcctttctttgtgctctttttttgtttgcaagacctgtgaacgcctgtttgttttggatgtggcctgatcgctgtactagaacctatatttcatttttctcttttatgggctgtagtctcatctgggtttctattaatggaaatggagggcgttgtcatttgataaaaaaaactccaattgtatagtgagctgattgaccatcgtctccttcactcccacgacgacatgagggtcgagctccgcagttaccacgtcgtgatgtgacgcatggtttacacccgaaccttcgccacgatgctcgggcacaattgttttgctttgctttgtattgctttacaagttatatatgcccttatattggaatcttaatcatctaaatatattaagcttatcatcggtcttgttagaattaatctaacattagatacatatttgttcaaaaaaaatattccagtataaggttgtatcggagctatagccgatacatgcttaaatttgttcatcagctatgacatgaacttgtataatctttatttcatagaacttcggatacaagtgatttatactgtctcgattaagtttgatttatcccaatcactgttatttgaagtaatgacgattcatagattatgtaacgttcatctttacagccgatgacacgaatttagggtcttaattttattgctacatcttatagccgattcaaaccaggttgcatcggctaggttaaagacgatatgtcatcggccctccagccgattggctatcgtttataaatttaactgtttatctcgtttcttgttggttgtaggatcaaaccaattggcacgccctagaccctaaggcaagtttttgcactagagttaagcaaatctctcaggccagtgtatgtttgtttgcatcaacaatgtgtaaagtgctagatcggagaccattgatcctaatccttttgtatgtcgtatgtatttgtatatagagacttatgtgtattgttggtacattacatttcaatatagtatcggtgaatgatttacctttttctattatggtttctgaattacatacaatatgatggaaaacttgcattacatgtgcaatatgcttggtttaaatcatagcggttattacgtgtgttgcacgtgcatgattacttaagtaatagtagtattgttgcatcaagcaagaagatgccaacactaaatctatcgatatcttaactaatgaaaagtggaactcaaaatgaattgaggatgagtgacatcatttaatgaattgagaataaataaatctggaccgttggattagatggatgataaaaataataattaaagaggcttccggtgataaagctactagaagaggaaagaaagagtaaagggaaaaaaagctagagaataggcatatgatgcaaataatttacgaaatgctcctataataaaataaattattttacaaataaaccctcatcctaatcacatattcacatgtcaagattcggctatttaagaacatatacaaatgtgcgttcatacgattaattttgtttctaacaattaattgttaacatatttgaggcaaaaattgctacaataacatgcacaatcatatcgtccgaatataggtttaacgtttttcacatgaatttaaaatgaaatcaaattcattccttaaaaacctacaaaatatttcagcataggctataaatagtgcgcgcctatacgaaataaggggtcatgcagccgtgaaaacctataaaacaatgactcacgcagatataaaatttgtaataaatattaagctatctattgtatgagcataatattagtcatcctgacccattttttttcgagcgatgagaaacccataaaaacagattgccactcatgtgtaccatgtaacatgaggcatagagtcacgcgaatgcgcaatatcataggctagtaaaccattatgaaaagtacgagtattagattgtgtgttctgtggtaggggctggaagcttctttcccgcacacgtaaaatagggtggctcattagcgcatgaataattaagtcttagcttaaagaaaaacatagaaaggaattaatataaatttttaaattaattttgctatatattttttttgtgaaaaaatgtgtggtacatctagccattcgggaagcgtactcagtgaaaacaaatgagtagaaggtaggaagaaagagtatagataagtttgtacttccagaggggttgataatacttcatttgaacaaagactattgtcaaagttttaaaaacttggactatgaatatcaagatctaaagtatgtgttagatataaggagaactatatttgttttagtctaaaaaaacataaataaaattatatgtttattaatatttctacatatattgtaataaaaaaatagggatgagtccattttacacccttcaagtcttgtctaggtttaaaactcatcccaaactcttaaaccgggtatccaactgttgatgcgaaaaacacgaggcctgaaagatctgcttaacttcagtgtaggtccaaaaatcttgcctttaggttcgtaagcgtgccagttaatttgatcatgcaatcaacaagaaacaaagacagaaaataacaattaaatccataaacgatagccgatcggccagtcgctgatgacgtatcatttatatttgagccgatgtcatatttgaatcgatcggcaatcatgaataactgaaaaagaactaaatctattcgatcggctgtaggtattaacgatatataatccttctgtcgatgtatatttaaatcaagtgattgggatagatcggtcgtcatgccgagacagtataaattacttaggtcaaaatatacattaacataaagattataaccgttcataacatagccgattagatagatctagcatgtatcggttaatactctgataccactctatattaagatattaaagcaggcagaatatatcagacaggaagcttaatataccgaaatgcaacaagatcttaacataaagggcggatttaacatgtcaataaagcatataagacataaagtagttaaatcagataagatcggctgaaaccccgatactaccctaatcgactaccaaaaacaggctagagattgagattctcatcacgacttataaggtcaaactcaactgatgcagttataagtatgaaaagaaggaccatatctagacaatcaagccgttggatgtttcatagggtggtagatatcctatataatctaagccaacattgctatttaacctaatcggctgccttccaatgatagatgttagttgatcgaaggttaaatagcaatattatcaaagattatataagatatatgataactagacgaattacataaacaagattagagtatcataaagatggaagcactaatcccgagaacacaagccgccataacaagttttacctctagctgaagatcgaaaccgatgcagctcaacccgaaagcaagaactcgtcgaaagtaaacgaagtaaaagggtggcgatgcgccgagattgtattgaacgtctattatttgattacatgggttcgggtcatatttatacccgagatacaaaatatgtccttgtcggacacgactcttatctctaacaaactctaagataccataaatctttgcggcagacttttgccaaacttatgtataaggaatttacataaaatatcataattaatagatacaattgccttttcagtactcaatccgtgcgtggcaatccatatgaagcaccctaattcaacccgataacgtgtaccgaatcgtattgtcggaatcggctcaatcggctaaccttgtccgactagaactctaccgattctagttgcagccgattcggactttagccgattcttcctctgtttccggaacggtctctatcttcgattccgcttcggttttatatccatctccgatacttaaattaccaaattcggtcgttaacaccaacactctctaactatcaaaacagttcaatttaccctcctttgacgggcggcacaggagcacggcctcacgaggcatacggcgcagtgccagagcatgggcacactgcggcgcaacgcaaagagaatgatttgagacgatggtgttgcgagtaggaactggcaattacacattccaatatcctacccttttaaaatggacggttagatttgaatggtatatacttggtacctagtggtacctcctcaaggatggtgaaattcctcttaaacaaaacaaaacaaaacaaaactttattgcatattataaattaggagtcgaaacgattacaaatggagattttttactgtccttgaggatgtgaggtaccaaatcttgaccatcgatcttgtatcatcggacggctgagattggagcgtaccgcgtcgtaccgcacgcgctggtttcagcggtaccgctgtggggggaaaaggtattttcgcgttatcccgcaacagcgagagagaaggggtcctttgattccgctcgattccgccgagcggtatcctctctgggctctctttccttagttcgtcttcatctgcccatctctttcgttctctcggctctgtttccttctctcatctttctctccaatttcgttgtgggcgcacgcagagggaggagtgcagatgatgggggatggcagatccctagaccccccccccccccccccaatctggtcgtgctccccttcaagcaattgaggcaattctgccgcaagtagggtggggctggtgctgtcaacagcgcaacagcggttagattcagctgctgcgggagtcgtggcctggaaaacggagaggaaccgccagatcgtagggccacaccgctacaccgccagatcctggagagtttggccaccggctggaatcaattggttgatgccgaagctgtcaagatgggtgatgtatgtgttttccgtttcaatgactctgatgatgagcttactcttgaagtacatgttcttagttagtgtgatggatgaacatcaccattttgcctggcactgtgtaccgccactcctaagttagtatatatgatgtaatcgtgaagactatatgacgatgtgcttagtcttaatgttcctgcacttatgtactgtgatggatgaacatcactattttatcaagcaatatgtactgccttcctatgatgtaattaagttagtggatgaactatctacacatctgtttaatcctaaatggatgctattcagtttgctttgaaaattgatgttctggctgcttcggttctggcggctatgaagttctttcggcattggttcttccgtgtaattctgttgtgtaattcggcacccagttacacacaacttcaactccaggcgtgtggtacatgcatatttcaaactaacaaacatcttcaaatccaggcacactgcatggatattttgcacttaaacagaactgattaatagctactcgtacagtttagctcaagtgaaaaaaacataacatgcaagtacttctgctccaatacaaataatcttgccagctaatctatacatacagcaacacaggcgatggcgtggcgacgaaacgattggatcaaccggcgatggcgacggaactgacagaaggagaacacagtaggggattgcgctgctctgtccgggatggccggcggcggtgggcggtgggcgaactaaaaactcccagccggcattggcgccggcggcggaactaaatggcggcaacgacggatgattaggggctacggcggcggaactgctgcggcggaggacgaaacgctccgccccgagactcgcgctctgacttgacgggaagggattgcgacgacggctcgctgcttgagcgtagccgacccagaggcccaatcagcgaatacctccttttttatcctatcgtgcccctgccaaatcaatggctagatttgattggtatctcatagtatcttttcaaggataggaaaagagctcatcaccgcctcctcctccggcgtgaattcgttcttaatcgaaagcgtctccctcatctgttccggtgtcttgccggaaatcgtgcccactcggccgacggccgctgccggcactgcgccgcggctcccgcctccgccggtgcgcccagccggcggccgcccctgccgtgctgcccccgtgctggcgtggtcttcggctcgccgcgccgccgccgccgcacgccgcgcccgccgcccgcgccgcaacgcacgccaccactcgcgccgcaacacacgccgccggctgtggctgtctccaagcaaaattagggttaaggtcttagggaattggggatttttgggaggaggggatttttgtttggaaatgggctcagttccagcccaaatagaccgcgggccgagtggaaagggggaggggagtgtaaaatttaggcccaatacaacagaaatggtaaaacaaggcccaaataagtagtttaactctttttctttatctttttcatacatttttttagataatggaatataatcccggcctttactcaaatagctacagccaattattatatcaactcaacaaaaactcacacctgaataaacaaaagcatagacgaactaataaaacacacacagcataaacgatcacaaaaattattgaattctatttgtgaatctccatccaaagttggcgaacagctgcataaccaatgactcaagattacgacatgcagctttcattgacttgatttcttcatcacacttttgtagctgagcccaggatcggagccaatatgttgtcctgaaaagaacctgcatataggatatagatggtgatttatcaaaaaccatatcatttctacacaaccatatagcccaacatatagcggatgctctaacaagaataagtttggtagattttttataactcccacgagccaattctcaaaaatataagatatactatgaggagtatataaaccaacattaaactgtagagctctccaaagaaattttgcataatgacactctacaaacaaatattgaatagtctcatttctcatgcaaaaacaacatttcaaactaccatgccaatttctcctagataagttatcctttgttagaacaacccctttaagtaggtaccacataaaaatcttaatcttgagaggcatcttaagtctccatataatcttattcctctcaatgttgccattattaattaaagctaaatacatagaccaaaccgagaatacaccattttgatggaaattccatctaaaaatatcattctcctctgacaaatgaatatgaacaattgaagcacataaattatgccaattgtttaaattctgtcctactaaaagctctcctaaaagaaatattaagtgaaacaagagacataacatttgcaattgaagcattcctcctacgaactatagcatataacgacggatacctatctttaaaagaataattccctacccatttatcttcccaaaatttgacttgtacaccattattcacaatccaggaacccatatttagaaacttactcttaactttcataagaccagaccaaaaatgggaatccccttgtttcttctcaacctgactttaggattgattataaagatatttcattttcaatagatcctgccacacaccctgctcgtttatgagcctaaacaaccatttactcaaaagatattgattttgaatttcaagattatgaactccaagaccaccctaatctttgggttgacaaatcatatcccatttagtaagcctatacttcttcttgtgttcatccccttgtcaaaagaaagtgatctataataatcaatttttttgaagacctccttttggaatctcaaaaaaagaaatcataaacatggctaatctagaaagcacaaaattaatcaacaccaacctccccccctccccatatgtttacctttccaactactaagtttcttttcaattctttcctcaactgttttccaatccttgttactaagttttctaaaatgcataggaataccaagatatctcatagggaaattcccaagcttacaaccaaaaatagtagaataaagctcttgacattcctttgcctgaccaaaacaaaataattcacttttatgaaaattaattttaaggccagataatttttcaaaagtcgatagtaacaattttagatttttggcttgtagtagatcatgttcaaaaaaataagagtatcatctgcatattgcaaaatagaaagaccatcatccaccaagtgtggaataatcccactaatttgaccatcatccttggccctcttaattaatatagtaagcatattaacaactatattaaaaagaattggagataatggatctccttgtctaagacccttataagtttgaaaattagaaccaacttgatcgtttacttttatacccacatgtcccccctagataaaagaggcaatccattgacaccattttgaccagaaacccttcatccttaaggtttgttgaacaaaagactactttaccttatcataagttttctcaaagtcaatcttaataattaccccattcttgtttttgcgatgcaattcatgaatagtttcatgtaaaataacaactcttttcatgatatttctcccagtaataaaagcagtttgagtactactaatgactttttgggcaaccccaattattctgatctttttcatatatatatatatgaactatatagtatatatacctattttttgtccaaaaatcttgggtatacatctgaatgccctttaattatagctgggctgcccctggtagaacctcgtgtggttgtatttattgcttaaaccagcgggagataattaaactccgagtaggagtcgtattttaatctcattttacttctgtaataatgtaatttaatatcgagaaataattagagtagtcgtttcgaaaaggagtccaattagaccatgggagaaggtttcgaaaatgagtccagttaaatctcttcacgacgtacgtacgtttgtacgtactcaaaactaacgcggaaataactgaaaatcaattgaatttggatcagattcggactccggatcaccgcatccgtcttgtttttgcgcggtttcacgcaataaaaacagaccacctctcgccgtgatccaagcaccaaacgctaacgttccaagagtcttggggtccaagacaagacaagacaagaaacagttgagctttgcaatccgcgagttctttcgtccgtgttcaaacttcaaagtagagagatcaatggcggcagagaagaaggaggttgccgacgccgccgccggcagcggcagcgacacaatcctcctaatcagctccgacggcgagcacttcaacgtgccgtcggcggcggcgagcctgtcacagctcgtctccaacatgatcgaggacgactgcacgacgaacggggtgcctctccccaacgtcgcctccaaggtcctcgccaaggtcatcgaatactgcatcaagcacgccgccgccggggaggaggaggagaaggatctgaagagcttcgacgccgagttcatcgatgtggacaagaacatgctgtacgacctgctcctggcgtccaatttcatgaacatcaagagcttgctggatttgtgctgccagcacacggcgaacctgatcaaaggcaagtcgccggagcagatcaggaaggagtttgggatcaagaacgacttcacgccggaggaggaggaggaaatccgcaaggagaacacatgggccttcgagtagattttcctttgggaaaatatttatgctaattaattatgtcatgttgctgcgaattactgctctaattagttactactaggtagtagtactagtagaggttcagataagaaattagaggaatattttgagtggcttttgcttaattgtcagtaacatgcatgcattgcatgcttatatatattacctttgtactaatagtttcgactcccctacttatattctgcaatatatgaagtgctcattaagtcattagtgcaaactgtttccttgctcttgtggttgtgaaaaggggcttctaattagaagccgatctgacgtagggactaatgtggaatattttgatccaaagtagggaccaatgtatgaattgaacttgcaacattacacttcataggggccgatttgaaaaattcttggatcgtgcatgcacggcgtggattaaataatactcgaagcggtacgagcaacttatgcagaaacaccctttaaatatattactgtttaaatgaacccccctatttggaccgctaaaataaaattggtagcgatccaatcctcgggtcgtcgtacaccgtccgatcaaaactgcgtggctcagatcggcgaccggcttccagtgggtttggtgcatttttacaaaatagcccctgcgtgggttttaccaatacgaattctctccgcctcgtcgtcccgttcatcgccggcgccgccgcgccgccgccgccatcgtctccaccggccaccgccactcctagagcctggatgcccctccattcgcagttcgaatccacgcatccaccgccgcgccggaggtaattttctctccactcccttcccttctcgttgctgcaatgctgctactaagggcaaactcgatggcaaccatggatctgtacgaacgggaagaagggagggttagggtttcattaacgggcgcatactaataaaacgaccgcattggggaacgggttagggtttggggatttttgggttaccggcgctgatccccaaatctccaatgtgccatgattatttgaagctagacttgcctactaggatcattaattcaatttgacaatttcattggcatttgtgttttatatttcttgcggattgcgtgtgcttaggtatttcagttgctgtgtgaatggaaaaatcctgtaatttaatttctgacccatagctgttttgaaaaattactgatccatggttgtgtttgcaacgaagtctgatgatactgatgtagaatttattatacttctgtagtatgagtacttgttttgttgcgtgtgtctaggataacattttggtttagtgcatttgcatgtgatctatggctattacttctcatgtttgctgttctgttggcttgatctaaagagaatcatgtgtcttaagagtctgtcacgagtgttctcttgtactgttcttcgtgtgttttcctcccatgtccaagatagcatcacaagattagtactgtacatatacacaaattttagtgaaactacttgctgtcacctgtcagcatccagatgatgttcaacatgaatcctatttcttgccagtacattggacaaacatcacatgagatgtacaagtccctgacagtaccgtcatgttcagtaccgtcctggttagtacgactcactgacaaccaaatcacagattcaagtgactggatttacagagaaatctaatttgcaactctaacttgcaagagaaaattatgtaaacaattaaggcagcattgacacttgagcaattgagacatgccatatgaacttggaggcatcaaggcgaggccaaccatacacttgcatttgctacagcgacactagagttttcagtcaaaataatgcactcaactcaacacacagaagagtatccatctaatgctagagacaatgaggctaaactagattgatgaaagatcctcatacacagacttgatcccaggtctttcagagaccggccggatgcatctcaaggcaatgcccagcacatccttcatgcccttgacagaaacttggttctcagaatctgaagccatggctggatcaaagcaatctgatccccgaccttcagccacccgcagacggacccaatcagtcaggtcaacaccaccttcagaacccgagacaacatccccagcacacctgccagttaggagctccagcagcacgacaccgaaggcgtacacgtcagacttgaacgagggagatggcttcttggacgctgctagctctggggcacggtagcctagcacgcccaggtcgaggatctgctcaacaactccagcctgggtcatcaggcggtgcaggcagtagtcagcgacacgggcattgaggtcaagtccgtccaacaagatgttggtagccttgaggtttccatgaggcatcgctcggtcaaaatggaggtagttcaggccacgcgcgacatcaactgcgatcttcagccgttgcgcccaggtcagtggagggcctctccttcctggacgatctgctaggtttcagaggaacataaagcttagttagagactgaacatattggtaaccaaccagtcacatgcatttgcagatggagtatacaagatctctaagcctgatgtgttcaattgcagaaatgagaaaccagtaaatgagagcattaccgtacaaaaagctcgcaagacttcctggtgaaacataatccgacaagatcagtttttcatgtgctgttggaccccagtagtaaccacgcaagccaacaacattgggatgcctaatgtttgcaaacttcttggcctccttcgagaactctttcttgggccttgcaacaccttccctcagccatttcactgttaggaagacaccattctcaagtgttgctctgtacgaagtcccgtggctgctcctcccaagaacctcagccggtgcccttgacaattcctccggtgtcagtgtgattgtttcatccaggaagtgcaactcccctgctaacctgtcaggtgatctgacatccaaccgtgccaggccttcctgggtgtatgcctctccagaatctggtgaccaagagaagcggctacctttggatggggaaaatccccctacacctgacagcttctcttcttggcttagtgcttcagatgtagagccctttcgaggagcaccaagctcatctgctgagaccaccaaaccacctttgtcatcctttccttttgtactggccatgtctttgctagtcttgtggaggttcttgtctgaaaccttttctgagctagggaactgccgtgagatttgcttgtaatggcaaacaatggcaacaaggataaggatgacaagagcaacgatactagctgctataagtgctattttagctgctgcactgagtgacctgccaccagctgaaccagaggaactgccagacccagaagagctagcaggatagtctagtctcgagttcccaggatggaaggaagattctggaaacttcctcaagttcactggaacaacaccagatagatcattataagaggcattgaatgattgcaatgtatctggaagtgcatcaggcaatgacccagtgaactggtttattgatatgtcgagagcagtgagcgctgcaagcttggtgatagaggctggcaaaggaccagagaaattgtttgtagatatatcaagagcttggaggctagataaagatgctatttcatcagggaggctgccattaaagtgatttccagaaatatcaagaacttgaagactcagattttttgacgatgatcctggaaatgatagacctccactaagcatattgtcgtggatgtagagctcttgcagcatggacgaagtgagtaaattagcaggaataggacctctgaactgattggagctgagatcaaggacagtgagtttggggtactgaacaacagcttcagggatggtgtcagctagggaattatgggaaagattcaggtagttcaagcgaaggaattgagagctcacatcaggaattgttccagttagattgttctggctaagatcgacatactccaaatcattgctccatttggcaataactggcaaatttcctttaaacttgttatttgacagatctaacacagtgcagcttccagcaagcattggaagatccccaaagagagcattggaggaaagattaataacttgcaaggtggtcgatgtgatcatattgatgtgtcctgtggattaacgaaaaatattgttagtccaaaataacacaagtggaacttaaaagtgatacttttgttttaagagaaatgtcatgatatgacagaaaacataggagcgtgtttgagttgtcctgctcttttaataacaatttagataactatgatgaatgcattgagttctaggagtgatgactttactcaaatgcaagatataatctgtgagacataatattttgaaatgcaacagttcagtattcttactcatacacccagtcaggtatatacaactagctgcgtcctattaataattgtatttttcacaacatccaaaggtgaagatctaacaacaaaggttaagatacatgtactgtcactgcaactacacaatgcatttaacattactgtggaacagaaatccatcacaaactactttcaaatattctcaataataccattggggtatgcatgcataataaataacgtctctcttcatgaccaaaactatcacaagctagccatcactgatccagtaattgctttggagaaaattattagtcagtaggaggctaggagcaaagattccaagaaagaacctttcacgcaaaacaagaagaatgcaaatatagaattggcataagacaaaacaatcaaatgacctacactggtgcacactcaaccacagatcagtaaaagctcatgccatgctgtgtaatgtaatcaacagatcagtacatcattgaaatgagagaatcaattggtataatgaactaagaacactaatgtaagatgccgattcaaagttttatgcaagctgaacactaccgatctgttttggaggctggaccttttgtgaaggagccccacatccaatttttttaaatcagaatgggcatccacatggtatgaagagaaaaggaacaaaaggtgtaagaagaacaattttcaggtagagctcattaccagtcagattatttgcactcaggtccagctcactgagaaccagagaatcccctttcagaagtccactaggtacaaaccccgtgaatgcattgtttgccagtcgcaaaacttcaagatcatagacataattgaaccctggcaagtctccagataactgattatggctcagatcaagcaccttcaatctcccaaatgtcgagagctcaactccatcaatcaatgacccagtcaacttattgttgctcaagttgagatatagaactgtctctgaaatatctgccaggaacttgagctctttgggggtggtactggtgagcaagttcccactgaagtcaacatgagcaacagttgactcaatcaagaatttccaatcaacaccgccttccaattgattccagcttagatccaaagattggagattcacaagaaggccaagcccagatgggatgccctttgtgaaggcattgtatgagaggttcagagcaaccatgctgcggagacctttcagagatgaaggcaatggaccagacaaagagtttccactcacatccagtgactgaagcgacgcaagcccatcgatggagtcaggcagtggccctgagaagttgttcctggcaagcgacaggttctgcaggctccggagattgcctatgttatcaggaatcggccccgagaaccggttgtttgagatatccatgaacttcaggctcttcagactacccacattgctcggcaggctcccagacagattgttattggccatagagagcttcacaagcatagtcagattgacgaacacggacagatcggcgacaccggagatgccatggccatcaagcacaacccctgccacgtttgcgccattgcacacgatgccgttccaggaagccggacagccattgaaatcaatcgactcgtcgttccacgaatcggtgatgaatccagcagggtcatgagtgatgcccttcttgaaagcaaggagcgcaaggatgtcctgtgaaggtagctggccaaatgcaggggcagcaagcaggagcagcaccaaaaaactcccaagaatccccattgctgctctccagacaaagattggaagctactgagcctcaaagacacagcacctgaagcatttcttgcagcaaaaatggactggaagtgtagagtgtatctaccagaaggctctcacaacaagctgccactaatacccacaacacttgtccctttcagctgatctccacagtaccacacatcaccataaaacccccaacttttcagctccttccaacctgaaataagcacggaatggcaagttaaggaccgaatctttgagcctccctgcaagcaggtaaaaatccagctagtacaaagaaatggcaactttagtaagggatccaaagagttggttaaacccctcaccagcttttaacacccaatcatgcaggtaaaaaaaagcaccatctttcccccctcactaaaacagcccaactaccactagtgtattatcacagcttcaacccacaaaaacacagctcaaaaagcagaaacttttactcatccatccaagccaccaagaaaccaaaagaaaaacaaaccccagatgcaaccagcaaacaaaacaaaaaacctacacacaatctttatacacttgcaatcttgcatcctccttacccagcaatgaggccggttgctctgacgcattaagaacaagcaaccacaccaccttggagaatgaaggaaaagaatgaatggttgcggcggcaggggaggaggggaagtggtggaggcaatgccgtggagagaagggaggacggcggcgaagcgaggaaccctagcaatgggggattgggttcttggtggcttggctgctagggagaaggaggagaagagaggggaatggtggtggtggtggctgcaagcctgcaggggaagaggtagaaaggagaggagggagcagcggcggcagtggggagtgggactgtgtcctttctctctctgtgtgttggctagatgaatcttttttttttttggtttgttttttacctctgcttgtgctctgttttgttttctcctcgcggttttttattgtgcatttttgcgttttggtccttgtgattatgattatgtgtgaaatcgacccctcagttgttcaatgcagtggtactgtggttgtactggtgacaactaaacaatacggaaacactttgaccaatggtattactatggtagtttctcctttaataatgggatcataatgctgcgtacacattctatgagtatatacgattttggcaggcaatacagaatatttttttagtttgaataaaaaaacgtgttcttttccctacaccttttataattgtgtgatttttagggggcaattatatttagctatctttattgatatgaaaatatagttacgtcgttcaccaacattttaaaatagatataaggggttcgtcgatctaaatacattatttcttttttcgaaaacacagacctaactaattaatgagctactatctggtttacctctatattatatatatattacaattctcaatgaaaaccctgtcaaaaccttgatataaaattgtgtgagccttgaccctgctcacctactaactacagcgtaccaatacacccacccatcactgtacgagcctacagtacgaattagtcccaacatggatcagagtttgactcgacactctgttttacaattcgtacaaaacagcgaaatacactagcaggtcaggggccaaaacgtaaaatggccaaatccccccgtctccctcccagtgtcccccctcctttcccgtaatcttttctcctcccctttcccgcgaaatctcttcctttccctcgcgcgcgcgccaaaacaaaacggagttgcaacgcaacaggcgcggttgggtttggtttggttccgcctcgggtcccccgccccctcttctttccctcgcggaccccaaaaccgcggctcaaatgcggctcactccacgccggcgcgcacgcacgcaccgggtccggtaggtcgctgcaggtgggccccacatggcagccgccggaggaggataacccccgttgcctcgtgaaccgtgtgtgtgcccggaaaatccgagaaaaaacagagagaggaaaatgtgccatgcctcctctgtgtgtgtctctctctcctgaccttttgcttttgccaccgtggctggatgtgggccctaccaatggaaaagtttcattttttttcattgtactgtgttttttggtagcacgcttctgagttgttgttaaaaatcaaatgaatcttttcttcaaagttttactgcttaatatgttctctctgtttcaagttataaattgttttgattttagtcaaagtcaaactactttaaatttgactttgtttgttaaaaaaagtaataatatttttaatcaagataaatatattttgaaaatatattcaattatagatttaattgaactaatttggtattgtaaatattactatatttatctataaaacttaattaaatttaaaata

SEQ ID NO: 8501 - DNA, 4748 bp, Oryza sativa
tgtttcaaccccaatgatatgttcctaattttttaattcactatcttgtggaaaatctgacaaaggacgatctaatctacggctatagggtacgtcagttaggtccaatccgttcaatggacgtccttttttattctcttctccaagatcacgttgccctgggacatcatgatctgttcatcattaacaaaccaacacaatcattgtgtggcaataagatgaattagttaggttaagggaagcttttcatatggccgcattgaacattctgtgcctactcaagtctaaagccgtaaacttactcttaccatgctggcctcgtgcaaactttacaacgcacaggcacagcaatcctaaagcaatcgatccatactgtttagtcttacaaaaaaatgattcatatatactcttggaaaataatggatcatttttgtttgaagccaaaatatgctctggctcgttaaatagtacattgtctatgtctagtttgctaaaaaaaatgtgcgatcaaggcagataagctgtcaaaatactggcaataccaaaacttctctacattttagcatggtagcaaactaaaacaacccaaagtaatcaactgtgacatcctttacctaccctgcataacttcattcgattactcaaaataacctatataataatcattgcaagtctcttgaagatctgatagtacatcatattgacaaacacattgactgagagagaatagactgacctcatgaacagttctcttccccaaccaggccaactaaattaattcctcatgtcccttggatattcgccagatcaatacaggaactaatcagcacacagattgcttgccaaggctttaacttactttatcaacatctgcatgatggagtatgacgtcagaaatatcaaacatgaaaagatttgattctgcatcaaagacctcctctcttctctttttttttttctgttgcccctgaaattgactgaatgcgacagcacacagctagcaccccagaaagtgcgttcactattggtagagcaagaagataaaggccatccacaatgggtgccctcgacccgtcccctcacaaacggccgtttccctcccgtccctttttcagcgtgaatcgtctccccagctaggagcgcggcgcctggcaaaggggcgcggctctttgcaaggagcgcccattttttgcagagcaacgaccctcgacgctgggaggagacccactgcaggctcctgtctcctcgctactccccccaaatccctctcctaccctcgcccctggcccctctcccatggcgccgcccgctcgtcgatccgctccacgggccgccatcgtgacgacggggaggagctcggcggccttgaagaggagggcgagccagtcgtcagcgaggcgacccgcgaggcgatgttgggcgggggtgccaggggcggcgaagtcggctgcgctgggcggcggagtcgtcggcgacggctagagggagaggggagcgggaggagggcgacctgcgaggcggcgctgggcggggatgacgggggcggcggagtcgtcggcgacaggcggagggcgaccgggcgctgacctcgccggcaagccgccgtcgtcgctgcccgaggccagatccggcaagcccaggccggatctggccaccctgccgccactccgacggcgacggcgacgaccccggcggagggagaggggatctggcaaccgaagtcgtcgggcaccccccgcgcccgtcatcgtcggccacccctcgcgcccatcgccgtcgccgacctcgcgaggcgctcgccgttcgccacggcaccccgttcgactgagagagggagagagggagagatcggaagaggaggagatggtgggcggaggagacgagaaaatgtgagaaagaggagaggaagaggtggctgggctagtgggctgattaggggaatgggtggaatttttgtactgggctaccttggaccaggacacccattgtgagatgtagtatcctcatcgggttgcttcagattttaaggagcccatctagggatacccttcattgtaagccaagtttcctacgagtgtcctcggttagtgaggacagtgtctcacattgtggatgctctaacacatctgatccctggagcttctcgttgcgtcggcaagctgaatggaacaacgactcgaccggggtacaaacgaaaggcagcagagttctatgacgattaccaaaagattggaacactttgcagcatactgttttggtcaacttgtggctcatcaagatgtagtgaaccagtcgatgtttccttggtgtagcaatcaactgatatgtaggctggaacccacttagctgataaaactgaatttgactgatcactccatgtacttttaaccagaagacaccacgtacatttgctcggcctagacatgtttgaattttttatgtagagtgcaggtcaaagacaaagagcaatgcagtgcaaagttcaaccacgatcaggcactccattgaaccactgatttgaatagcaaccaggagggttgcgcctagtgcaagaattcattttggtgacttggatcataaacagtcaagatgacactgcataatcgccttgcaaatcacatgccgctggacatgattaaagacctctttgattcatagaaattttatgggaaaaatgtaggatttaggatttggcactgtagcagcctttgattcacaggattaggacataggaaagttagaggaaattttcctttggaactcatttcacaggaaaatggaaacatccatcctaacctcttttttccatcatgtgtgcgtaggattgaggcaaatgacagatctatgtatcattattgctcttttagaagaaaatgtatattgtaatattgtggataataccaaagtgacacgtattaatacacttcctgacattctctttcccgtgaaattcctagcccctttgaatcgcagggtagaaaaaacagaggaatagaaaaaacataggattctgattagaattgaagtgtaaaacagtggattgcaaaacacaggaatggttgtttgattggagcgcaggaaaaacgcaggaatcggatgagagagatagactcaaaggaaattttctaagaggttggagctcttgctaaatttcctccaaaatccacatgcaatgtgccattccataggaatttaataggatttggaaagattcaatcctttgaatcaaaggaccaaataaaaaaatttcctatagtatttgaatcctataaaattcctatataaatcctttagttcaaaggggccagtaacacaactttcctactcatacatttttacagtcacatccttgtttttacagtttacattcctacaagaatactacgtttttatcatttctctgtttttccattcctataatataatttaaagggaccctaaatatatttgaagatttgcagtaaaaggaactgtttattacttctttagggtaaaagaactcagaaaagtcagaaagcaccgacataccccccaccaaacaatgcggcggagtgcggcagatcgaaacagccgatgcggcctggagtgattaggccggaccggcggcggcgcagatggaacgggggaaccaccggattcgggggctgggtgggggctctctgcggccggccagatctagttcctcccggcgattcccaacgcctgaaaggctgcgtctggacccttggagggacggcggtgcgagcgggtggcgttcgccgacggctcggcatctccgcggacactggcggatcgatcgccgactcgccgtccacgacaactgcgccggggccgccgttcgtccgagcactccatgctgacgttgctctccttcgtgggccaagcccagtgcagcccgtatatcgtcccaatttcttacattcaggccccttattttggatagcgtaaatattaggatcgctattcgttaattcgtgtagggctggatatcgagacagcgggtttggtctggctgtctggctcgttaggccaatgaactggtttggctagttaacctaacggtctgagtagggttaaaatggtcatgaaatttttttttgatcgaccgagctttatttccgcataagatgtaccgtttctgaccgttttagctatatataaattttgtttttttctaatttctttctatatcatattaatatcgacaacgaatagttcaaatgatgaatatggtccattgccgaccgatcgactgtcgttttcgaatagatgctaccaattccgatcgtttttactccgtctgactcatgagtcaacatgactttatcccaaaataaaccaatttccgaagtttgaattgtgtcttaaaaaatgaatcaacttctattttcttgcctaccatctgcctgtaaatcaagaaattttattcctttaatactccatcacctactcgtctgccaatataatttttcattaattatggattttttttgtgttagattaatgggctaggccaattaaatcataataaatttcattggcctacagtaagtgctatgggtaataataccatcttggaaatctaagtgaagaggtctcaatttaaatacggggctagttgagagtctctattgaccaattgagatggtgggcggacagctacacacatgcacgcgcgaggcgaggcgaggcaggctgcgctcgcctggttctgttcacctgcacaacgccgtgaattgatttcgtat

SEQ ID NO: 8502 - DNA, 17603 bp, Oryza sativa
atgcgttgctgccattgcccagcttttgtcccgccagccgatgcccaccatccactgcacttccctccgtcagtcgtcgcttcgagagaggcgagagatggggaagagagggcaagagtggagaggaggagagaggactaggaagaccgctgacatgtggggtccatgtgagtctcacgttgactcagcatcaagttagttaaaattaaacacaatattgttttgggatcttggatagtctgctattataagttaagaaatatgttatatttgagggctgtttagattgtaaccaaaataaaccttaccaatattgccaaaattttggcaggatttcttatgaatttaccaaagtttggcaataaactaaatatagacacatcttagtgacggatgcagctttaaaataaagatgggacggagaacaaagatgtttacttgataagagcaatcgaacacaacacatcgtattaatagttcattcgcatcactgtctcaatatgttgggtgttcataccttgttatacataattttaatggtccatgactgctataaggggataagcgggtcttcagggtgtgggcgacacgagccgtagcttagtcggtcgacccaccctgcctaataggtagatccacccctaatctttggcaagtttattaaaaaatggtacggttggaaatgacatcaatctgaatagccccttcctgttagggttcaatgatgggccagtgtttacttttttccaaaaaaaattgggaaaacaccttcggaatcttacagggttacgagcagtttcacctgaaaatagcatctggtatgatcaaccgatggtcaaatcggactggccttaatactacgatttttcctggtaccctggatcgaccaataaattttgattctgaggacgagcaatcaattttgattctgaggactagcagtcgatgaatgccaacatatacacatcatcatccgtggattcctttgtacagtgcttaatttttgccagatctcaacgcatgcctaatctgacagagtgacagcttggagccatccagtgtagcgaaccacatctcgcgtagaatccaatttactacgtgcagctcccgacagctacaatctcctctttgagcgtcttcctcttgccatcgtgcttgctcccggccttcgcaggcttcttcagcgtctgcagcaacattggccagtgactccacacatcagaaattcggaattcattgttgcagaacatggagttgaagactttctgttcatgctgaccttcttgagaagcaggtcggtctgacgctccatctctcggatctgatccaacgtcatgccgtaccactcgtcgatccacgcgaagcacagccggtggcacgccaagaacagcgccctctccccctgcacgcacgcacagaccacaagtaaggcatcacctctgaatttctttctgaacattgtgttatgcagaagagatcaaagcattttgttttaccgcgatgatgcagtcttccaggcgttcacccaagccccagatcggagcgtccatgatcaccagcttgtacgtggtcatgacgggacggcatgaatcctgcaccaaatgtcacgtcagacctgacgacgcaacacgagtgtatattggtgttttctgaactgaaacctgcgtaccatccaacccttcaagagagggcctcggctcgtcctctgcgacctgaaggctgtcaggtcgacgtttggggcgctgatcaccttgctccagtagtccctcgactgcaacgcgatgtcgacgacctctacctctcttgcagctaattgttcactggttaaattgtgggcctggttatgtacattgtgctctcttagtatttgccgtttggtctgaaaaagattggagcaaatatggttgctagatgattggagagtacttacgttctcagagcagccattgtcaggtctgatcacagtgtcgatggtcagtgaacacttgctaaaaagcgggcactgataacaaataatcaagaaacctgaagttaggttggaaaactgaaagagtatcagactttaagagcgaatgggttaactactctgtactctgtggtaccttgatcactgatgagggtcggagtagaaatcatggccacatgaacacagagaaggggaatccaaatggaacttgtttagcaagaatgatcaattattaaaacacgactgctgcactttaatagcgaaaggtctttgctaacctgtcctgctgtttggatatgcgcaccatgattcctcatgcacggtaagtgcacttgctggcgcaaaacctttcatccaagatggaattttgctgcataatttttacatttaattgtatataagaactagcattcggtgaaacacatcagcatgcattgcttaacttaggaaagaaggtaatgcatgctcctaattaggacaataacttgaagtctttacatctgcaatgttcgacatgttactcctttctactactgatcaacctcgttcttccttctgttcttggatgaacacttcctatgatcctatctgctttcagtagctacgagatctaacctcttgtaattaacatgacatgcttattcttatcaagattcaagactacaattgatcaggaacttctgaaaggccttgaggatcaacatattttctgaaacaatttaatattgcctgattgaattaaacttctgaaatccatcagcaggactggcacggaacaaactaacctctgcaaatgataattcttcgaggtgtattggcccttgccaagcttctcatcctcaaatgggacctgttgcagcacctcgacgccctccttgctgttcgtgttttgctgctccatcttcatgatggtgtagctgatccctatttcatactgtaacgaaaggatcggttctgatcagtccatttaccaaattgctcgaaccacaagaatgcaaagccttcaattgaaaattttccttttgccacactacttctccatacctcttccatcgacataggcacgacgatccggcttggtgaaagattgaagtcaaggcatgcccaagttcaagcagatggcacatgatcacccaaaaatgacagaaaaagaacacagcaaagaaaagaaaaaaaaaatccatggacacaagaactagtaggatacaattccttgatcttaaccatctctgaatttgcaccgataatggccaaatctgacagcttcgatgagctgctcttgagagggaaatgaagagcttatttgcttctatctccctcttctccggggaatggttcagtgatcgtctgatcgaacagggcaatggagaacgcagaagaaaaccaacttatcctccaagctgcaccctacaaacatcttccatccaccccctcccaaaaccagaaaatcagcaaactcctcaactagtactattctttcaatcttttatccatttccccacttgaaccttccaactgatagaaatctgaaggtttaggaggggaaacgtgcaaagaatcaccaaaactaagaaacgggcaggtccacatcaacccgggggggtgtgaggtgagcaatgttctaacgtcaccggcaacctttacgaaacgtacgtatcttgcaagttctggagaaagatgccagcatccgcgattccgcgcgccccggccgcccacacggtcgtggtcgccctttcggttcatgccacgccggccactcggcccagggagaaacacatggccacgaagaatttatgccttgaaaaaggcgtcgtcccatggatcatggggtgttccgttctcactttcttgctagcgatacatttatttacctacagtgatagccagcgacgctgtcaagcccaaacaattagtagtgtttttttaaccaactaaatatttgtaggtgtcgccggttattggcagtgaaaacggtaatagtatagctcgggcggccgtccaatctgtgtgagagtttcctgcagaaaaagtgagatgggattaacagtttaacgctgcaagcatgcctgaaatttcaacatgagagcacacggtgcgcatttgatttttgattgattgtgtggcgtccaaaagtgacttgtgttatgatgatagctgtttcgtgttgtatgtgagggagtttgctggtgtatcaagcatggtgcaagaggacaaccgaataagtttcgttgattaattacttgcgacatcaaataccagaataggtgaaccggtcggtaacaccgacactaatacacaaacagttttttttttaaaaaaaaataacatggtagatgcataaacacagacagaggagctcttaaataaaggacagttccttttaaatgtgatggctggcactcctagatagtcagtggtgatttaataagagtaatttatgtccaaacaaggagctcattgattttatgagtttatcgaaccagcagatggttagatatgaagttcagacagattaagtccgagcgaaatgaaaatatatgatatgtattaaatccaagtgaaatggggaaaaggtactccaagatgaagattggcacaaaggattggtagcatctgctgtctgtgaagatgctgcctgagacaatttgtggatagaagattcgagtggatataccatataccagtaggtaggatacatgtgggtgaccttgtactatttgacctccttatattgttctgtcacgcaaccatttcttgggtttactttgggagtatatattgcaggcattcatttgtttaaagaaaaattcacaagacctttcacgtaaatttataatttgtacttttattttgatctgaacttgtttcttgtccctaaagagaaaatgaataagttcatctaacgtcccttaattttacaccgaatccgattttcattcttaaaccccaaaactagatacaaccagtccccaagctgtcaagactggtgtaaaaaaggtccctcggcggttttgaaggcggttttagctgatgtggcgcctacatggctggtttgactaggtctacgtcccacgtggcaccgatgtagcaattatatattagaaaaataataaaactatgggcccacctgtcagctaaaaaaataatttaaaatgttggggcccacatgtcaggaaaaaaggtggggcccacatatcaatacatcctctccttctctctatttctctcccttccagctcttcctctcagcgtcgtcaaatatcggcggcgcgggaggcactgcagacgacggtgaccggcagcggccgggcggtgtggaggagggaggaggcggaggaggagaaggagggatgggtgccgatgcggccgagcagcggtgccgatgtggaggagctcggccgagcgacggccaggggcggagctacaatggttcctgtgtattcccaggaatacccacttttttttatcaagaaacaagtattacttcaatatatacacatgtacacaaattagttagccaagtactctttctcaataagatgcgtatagatggaaggtttagaaaagtgaaaactcttgctgatctttccattatgattgttgaaacaaagttgcacaatagacatgagattgttttcaagcttctcaaattggttccagtgcttccagtagcagtcccattcatttctccatcaagagttggattaagataaagattttcgtgccacgcttttcaaactgctaaacagtgcgtttcgtggggaaattttctatatgaaagttgctctaaaataacatattaatctattttttgaattttgtaataattaaaactcaaacaatcatacgctaataccacctcgttttacgtaaaaaacttaatgtttatcttcatcttcattttcaggagaaaagaacaccttctcaatttattcttcacataatcttttctgccatgaattatgtgaagaataaattgagaaacaggcttggggatcaatacttaaatgattgcttggtcacatttattgagcatgagatgtttttgaaagtaaaggactgtgatattacaaaccgctttcaagccatgaaggaacgcagaattaaagctactcttccaagccatgaagtaagtgaaatagaaaattagaggtaccgtgtaataatttgtagttttatttcttcgattatcggtattgacaaactgtgaaccattgattttttttactatggacttttttttttgttagacaggaatacccaactttaaaatcctggctccgccactagcgacggcggcaccgaggcagcggggcgcggctgagcggcggcttggcacgagcgtggccgtgcggtgacgccggccccggcgcgggtcgcggcctcggcggtgcggccggcattgtcttctccatttattttctattttcaattttcctttcttttcttcttcttttctcgattcttttcttcttcctatggcgccgatcaccgtggggaggcgctcgtgactgcttgggcggcacggctcctccggccatgtggcggctggccggatcggcggcgaggcaggcagctggtgccatgggcagctagcgccgtgggcctttatattggcattgatttgtacgtgtacgtacaacgtactatctacctgctcgtctgacagcaacatgcgcggctctggcggccacggcggacggcgcggcgtggccgacgagcatgaggaggcgacggattgagcgccatcctagcggctgggggccctcctccgacctctgctccggaccgccgccgtcctcctcatgacccgtcgtcggctgtcgtcctcccgtcagccgcatctgggaaggaggaggggaagaggggaggagatagagaagaccgagttgggcttgagtgctggaggatgacgatggtggtggaggcgggttggcggcggagggcgtgccccactccctctcccgccggcaccgcgtgccgctccctctccatcgcgactgagagaggagaggggagagagatatgaagaaaggggagatgtgagaggaggaagaagaggaggggtgagaatgacacgtgggccctattattttttattaatttatgtgcgaaactgacatgtgggtcccatgggctttattattattcttagatcaaattgccacttaagcgccacgccaatgccatgtcagatgaagaccgagtcaaattagccacgtaggcgtcacgtcagtcaaaaccgctatctaaacagctaagggatattatctgcaccagttttgatagttagggcacctaatgtatctggtttttcggttcagggacgaaaatcggatcgttgacaaattaagggaccttagatgaacttattccaacagaaaaaaaccagttctcttcccaagagaggctccacctgaaggcccatcttaaatagttgatcggtgtgttgtgttacaccgatgcaataagttcattttgtgtccctttaactacaatgctagtagaaatcttccacctccatcgtgcacacccggattaaataagattctctcgtaatatgagatggttgtttttggctgacgtgacattccagtcttataaaagtaaaaaataaatggagcctcatgtcattgacatcctttctttctcatctaccccaacctctcctagcgagaactagcgatcggtcctgtcctcgggagggttcaatctttcgttttcgacgttctatcggagggtgcccatataccgaaattttaaataaaattggtcaaatttgaacaaaatatagcgagaaatgcccaggggtcttccggctagctccacaagttggtgggttagacgacctgggttcaaagcctcacccctcctaattatttgatattagatccttccctaatttctagttttttttgaacaaaatatagctaaattcattaaaaaaagcttaaaaataaaaattttagccaaaataatatcattccgaaagtttttgaaatttttgttccggaattttgaaccatggtccttggtccaacgacgccgccggtccgccgatctggtggagagatctcctcgatcctctcctccatgcagtgacctcgtcaagctagaccactcagcaacgatggaggagggcctcaagatggcaacaggtgcatactatcgggttcctttgctccatacccacactcacgatgactaaatattttcacttaaatacccacatccggcgggtacaaaatcatcctcatacccacacccgtgcggataacgggtacccatacacatataattgacttgtagcatatatagttttgtactgtaattagccatattagaactgtaagttatcaatattttctctggcaacaatgctattaacattagcgttcaaaaggcaaataaaaaaactctacaacaacattacataatcaaaaaatcaaaataatttcatataatagactggaagaatgcttaagatgtgaaatgagttttatgctatgatttagtagtcgttaggacttttactcatagttttaggcttaatctacgggtttttttcacccacggattggtgggtacaggtgggtaaagagcggactatacctaggtacccaacgaataggagttttcgtccgtcaataggtctatgggtataagagttagaatataattagcttttaatagagtaaaaatccatcgggtgtggggttacatgtccccattgccatctcggaggggacgcgagtggtccgatggagttcccagactgacgtaacgtgcacgaggctcctgttggtgttcgagacttccatcgagccgcccatcgtggcggcgttgctgcaaacggcgtgggacgcgctgtggcctcgccgtccaactcctcttgcgaaccgctcgaccttcatccctcgtcgttggcctccccatcctccggccatacatgccgcagtgccgcagcctcgatcaaccggtgccaccatgattcgtcctcctcgtcggcagcgatcgtgtcctcgtctccggatgccgacgaccccctgacatgtgtcttttcaatgtgaccatctccggatgctccacggcggtgaggaggggaggcaaagctcatgctcagtacaacaaggattaggttgtgttcttcacttgaagttttcaacctcacttcctcgtttaccatacgctttccaaactattttcttacaaaaaaatctacaaaataaagttgcgaggcgcctataaatcggatgcccgattttttttcaaaaatcgaacgatgttccaccaagtagatcggaattgtttcactaagtagatcgaaaatgttttaattgtttataaagctaaaatacaaccaaatcatctcatgaaacattttgctacaacgtataaaacaacgccttttgaaactgtttcaccatatataaaaacaatttttcagcaaatagcgaaagaatgtttcaattcacagaaacatttgatctatatatagtgaaacaatacgagtatacttggtgaaacattattggtggaaaaaatgaaacgaattcccttaatagagcatttccgtaatatgtgagtgatttattacaacggcccatgtggtggggcgcgtggtggggatggtgcggaggcgctaggggcacgggcggaggcgggcgcctgaattttctgccgctgatcggacgcccgatcgctggcattttctaaaaaattgctataaaaattatattaatatattttaagtttttaaagttgatacttaattaatcatgcgttaatctgttgctctgttttacgtgtggagaggaggggttaccgacccctgcaaaaacacaggcttagtgtataggtcgagctaaacatgattagtgctctttcacggaggccattagagtcatcgctttgagcgacacatgcaccaactagaagttgttgttgctgctgctcgaaacatgcatgagctcgtccttagtacagcgaggccggccggttgcctgcaagactgcacgtctgcaaacatgaaccatgccgccggccgattcggcgggggtcggcagccacatgtcagtgacccatgcgagcgtcgttgggcacgccgaggccaccgtccgaccgtcggcgtggagagagaagatgcgagagagctagaaaggcatagaggagaaagaaagggtcacatatatttttcatttctttttctgactgtatctgagcgatgtttcgcttattcgcgcggtatatttgtaaacggaaagtaatttataaataaaacttttatatatgtattattagcgatctaaaaggaaaagctgaaaaataaatttcgatgaaaaaaatttaaaatcaactctaagtttaaggataaaaggatcttatttaatccgattttgcaagatggagactaaaaatttatgataatattgcaattaagggatgtaatttaaactcgcttggaaataagggatgtggacttattcctactccgatctggccttggtaacttggtttgtccaagtctccaagagaagagaagcccacttattgtttgggcttacacagcacgccgaattgactcgattaaaacgggtaggctaatcgtggcagcatatgggacacgtcttgcacgtgttgtggggttcgtacccgtaccctgcacgtcgtacaatttcgcacttttttctctctcgctcgtctcctaatcctttcaccaagctaaaagcttcacgatatgtcgtgccggccgccgcaatcacaactcgatgtttccaaccggagtggggaagcagccgagccggacacattttaggcaacatattggacattctgtacacggagacaaaggatttgcccgtacccatgcggcatggttctggtcaagactgatggtgtataccaccaaacagattaactaatcgattactagtagctagtagcctagtactgtagttaactagtcgattactagtttcccggaaactaccatggccaatcggtccataaaaacaaattaagacaagacagacagtagcatgcatgcatgcatgtatcggaaagcttaggctggctaatcatcagttagttactggtttttgttctgttgtgacactgtcaattagttactggctttaattttgttctgttgtgtgacagtgtcagttagttactggttcaaatggcagattggcagccggccggccgtctacgatgaccgtaggcgatcgtcatttcgtatggtctggtactctggttggcgcatgcatatatgctaggctaggctagcgagacttggaaacggtacgtgttaatgtgacagtccaagtagccaaagtaggtttctggagatagagttaggcagccttcttttgggggcttctgatcgatggtgatcgaccagttgctagcttcgtgagaattaatataattgaacaatattttgggatctgttgctcgtgcagcgagtgtttgttcaaactacgtacgctacagttgccgccgggagctagtacgtcgcaggcacatgtttaatgttcatacggattgacatgttccacagagagaaaaaaaaaaacaggctgatcgagggagaaaaacgacagctgctagccagctgagctagaaactaaaatgttattcaagtgcagtagcagatttttttttcaacaagctgtctccagagctcggacaaaaacgtactacatgttcaatggccaccagcaccatcgtacatattacttgtgaacatgcgtttcctagttcctacacgatgttttttttaaatatatatatatatatatatatatatatatatatatatatattaattacttactcccccgtcctaaaatataatcattttttacttcgacacattttttgagatgttactttaacgaaaaataaaaagagtcgtatattacgatggtttgtttaatgataaatatagtaacatcaattttagtagattgattttttttatttttttctattaatagtcaaagtaaaaatatttgatttggcactatactaaaaatgcttatattttaggacggagtgagtagagtatttttaatttttttaactttgtaatatttatttcattcaaaacaatcatactgggctatataagcgtgttttatttcgaccgaacgacgggagttggtctgctaatgaatcaaactagcaggactgacagatacgtactgcgctacggcagttcgtgagctcgcaaatgtagctttcgttcgagttccatcgatctccttcagtcgatcggagtagtgtattgtcaacccactgcatgcctaacatcagttatttttgcaaaacacgtacagcgcgaattttgtgatggccactagctagtcgccagctcacaatttaacaagtgtttcacaggcttacaagaactcctacagaactttacttgatcgaccctgctcattgcaaaatatctgatcttgttttaaatctgaagaacataacactctgaaagcaagcataaactgttccggccggctgaagtatgtataaccgttgctgttacatgtactcgaagcacgacactagctaagccgccaggtactaattatagttccttctttaaactgatctgtttctaattacagtacttaattactactagtgctctagattattaattaccctgcatgccaaatacggagtatggtagcttagcttagcttagctagccgcgctgaccatgcaaatttgtatcacgtccatagctggggctcgccccacgccgccgagtccaggtccgagtcgtagaacggctggtacacggtggcgccgaagcctgcgccgccgctacagtactccgccgggtgcggcagcggcggcgccggcgcctggtattccagctgctggtcgtcgtcccggcggcggtgcgcgagctcgacgcagacgagggcgacgaggttgtcgtgctgcgcccgcgcgttgagcaggtcggcctgcgcgcgcgcgagctgcaccttgagctcgttcgcctccttctgcagccggcacaccgcccccgcgcacccgtacaccgggtcccgcagcctcgcctccgcctcgtacaccatgctgctcaccgcgtccgcccgcgcgctctccggcaattcctgcacgttgccgcacgtcggtcgatcagcaatgtgccacgacgatcgatcgatcgaaatcctcgctcttacgtgcgggcgtactatgtatatacctggaggagcttgatgatgttgctggcgccgaacacgcggtgcgcggtagtgaacttggtcggttcggtaggagggaagtaaggagccagcacgcagccgtcggcgcaccggcggcggagcaccttgcacgcggcgcacgggctcagcacgacggtcgtcgtcggtgacgacgacgacgacgtgttgcccaccagcaaggaggcggtgccgacaggaggtggtggcggcgagcacgacgacaccctcgacggcggcgacacggaccgcccgtaatgcggctgctgcgccaccgtcacgttcgcgaccgtgttgccagcgtgatccattatatgacacagcctagcgcaacacagggctatagcaagcaggagaagtagctagagagactctggtattgacctgctaattaaagatccaaacaggaaggaggtatatatagagagacggggacgacgtgtggagatttttctgcgcgtgcgactttgctgccagaatcgatcgatgctccgtggaatttagaacacgtcggaggacacgatcattcgatcagatcaacatcaaattagttgccagttttttcctaacacagatattatacgtgctttgcttgaccaagtttggcaagttttgaaggcttaattaggtaggtgcttaattatacctgtagtacatgcattattccttccatgcatgcttgcaatcttgcatagctaatagacattaggcatatgctgcattaattgctactattagtttactctatactccagcttgtagcacaattatatatgggagtaccgctatatgtacgatccgttgtacaactcatatacatgtaactatatatcaattaaagtaaaacatatttatatacactgtagccgtttaccaccgttaattaaattttgtcgtacgtgagtcggacaattaagttatatgcatagcaattttctatatatggcatgtcgttgatttaaatatatatgcttgcagttatcatatatcaactagttggttatattttttaaaaaaaacaatagtaagttaaattaatatgtaatactatatcactcaataaacatacgagctcaaatttaacctctagaaattgtaaaaaaaattaaaccctaagtttgtatatccacaatgaaatttattatttttctctaatccgtagaagttgactttgaacttataaatttgtgaagtgatatattacatattaatttatatcactattttataaaaaatatataaatatttagttaatatacactgatcgagtgaacatctgctctagtaactataaacgagtttccctttcttttttctgctcatatttttgcgttgcccaaacggcaggtcgacagcgtacaggacctccttgcgatggaggcgaccctgacgccgactctcaaaccaactgttcatgggggcccaaaaccaagaccaggttgagcggcaggttggaacggaggcgataaaaaccaaagtctgtacacgtttagtcgccgtcgatcgccttgaacgggcatacacttatgacatatgtggccgcccattgatctgtctggatatcgtccataactccatatataggttggaccgttagtatgcaagtcaggctgaattaatatgtgtatgcccttggaaatcaaaggggacatgcataacttgtacgatagggtacagtaatactactccgaagtcgtgctaggattgtgttctttcttggctacagttatatatttgatctttttttttagctgatagctgagtacttttcagcgaaggacacaaccaggacagtcggatgcatgtacgtatttagctagctagtctgtgtttagatctaaagtttggattcaaacttctaactttttccatcacattaatctatcatacacacataacttttcagtcacatcgtaccaatttcaacctaaacttctaactttagaaggaactaaacacagccctactccactagtgattagaggctactaaaattacttgatcactaactgtgcatttaactctatatgctgagtctgaatacacaaagccgcatcgacgagatcagtgactatcatcaccaatgctcttcttatcatcactcggtgtagggctggaaatgagccgagccaagccaggctcggcttgcaatggctcgcaacaagctaggcttgccttggctcggctcgggttgggaaacgagctaaaacatgagctcggctcggctcgtttcctggctcgagccagctcgagctggcttgcgaccttccgttgaagctatataatttgtaatcattaagaaaaacaatgacaaatcattaatatgtaaaattaaaataactttatatattcaattcatcagaatatagataataaattacatattgacaaataataactccactagaaaataaaattatccatataaatacatgatggcctagactcacgagccaaatcaagcggctcgcgagctagctcgggttcggctcatttcaggaacgagctgaaaagtaggcttaggctttcgctcgtttggcattcaagccgatccgagctaagcaagctcgagccaagcccgagttaagctcacgagtccaagctttttttccacccctaactcggtgcgtgcatgtgaggctccgattttgttggagacgtgcatgtgagcctccgattttgctgggagacgatggctcgatcgatcgatcaaacagttcgcaagcagcatgcactccggtgtcaaaggtttctgtctgcttcaggaagcatgacttttccactagagtctgaagatgcagctgaccgacatggacttcgccgcatgctacgcagcctagatttccacatttacacatcttcccgttttgtcatacgcgaggcgcccagtcagagggtaagagcaagttttaagagcaggtacaatagcagtctattagccagttataaatatattttaatgagataaaaaatgagagagaaaagaagcgggctacagatctgtagccagctgcagcacgaactccaggacgcagtgtgtgtatgatatgtaggaccatatattaatagtatagtaagcaactgtggtataaattggctattatattggctatagataaattggagctagtagtgggctatactattaaatttgctctaatagtatatcccgatactaactccaaatcatctatagccaatgtaatagccaattcatacaatagttgcttactatactattatacctggtctcatatgtcatatacacattacgttttggagtccgtggtgcagctggctatagatatgtagcccactgatcttctctctttctttatctttttaaaatatatttatagctgacttatagtctgctattgtacctgctctaagccatatattgtcatgctcgtcgggcacgcgcgagacaggtacgaagcgacgcttcgtgatcgcttttccggtctctgccaagcgccggtatcaaatcactctgaatttccggtgcacggtttagaaaattgctcccataatcccattgctgttgcctgtaagcccaaagctagctacccgtagtatactagtactatcttccaagagttaacgttcagttgcacctatatttattatttttgttacaatttatagaagttaaatttaactttgcatatttatatgatatattttatattaatatatgttagtcaatttttatggttatttaggtgatatcaaaagagagagagagagacagagtatccgtgaagagagagccatatataacctgcagcactgccggcccagtcaacagttcttgttctcatctttgagttttccaaaaatggccatgctcaggggcggagccagtataattagggggtatccagtaacttggttcaaaaattttttttatctatagtttatctattttcatcatgtatataccccgtcagtttaaatataggcacccgtaccaagctaaatttgattcaaaccagagtaaagcaagtgagtggaacaccccttcattttgttctagctccgcccctggcaatgctgtcttgcaattaggcttgttctcggttaatctctctctgaggattaaaggaaaactagagaaaattaatttcataactatcgagatgttggaattaatccttctcaatcttcttcaatctctttcttaagggaattaaccgaagtgggcaatatttgtagaccgcaggcataaaacaacacttcattgcagctcttcttgctgtcctggagaacacaaggacaaggtggggcaagcagattacacattattcagtacttagggcatgctgttaacatgatgccagggtttatgtactggaaattcggctttgattgacttgattggagcccac

SEQ ID NO: 8503 - DNA, 16315 bp, Oryza sativa
agaataacattagagcaagtataatagtgagctataagcctagtataaacttatatggaggagagatgtgacaaaaagttaagggtgttggctctcatgcaagagctagcttaacataagctcctagacaaatacaattaatgtataagtgagagatagagagaggagaagaaaattgtagccaaccttataactaatctattatatgtgttggctttaagattggctaatagcatgaagtcggctctattattatccttgctcttatggatgcgggccatgcagcatgcagctaaaatgtcgtaaactcgagcgtcctcaactgtcgatgtcacgttgccgttacgataacgcaggcccctgcggactagaatgtcgcgaaatcgattactcgattgttcaactgtcatgagttagttttcgatcgagctgcattttgaagaaacggcgaagggcactaactggttagcatgatagcacctaattaagtagtactatgtggcacggataggaaaaggaaaaaacataaacggaggggccaaagctaagttaaatacgctcaattcagaatttctgtagcgttaggaatgctgaaatttaagggtttgttcttttctgattaagattcagattttttttacctaattacctaaacctcatcttgaaaagggtaccactaactgaacaatcttcaagaacaccgaagtggttgatgagactaccctgtcacgagccaaatgaacctaacacaatccagagcgccgcattggttgatgaaactgccctatcacgtaccaaaacgaacctaacacgatccgctgaaaatcactggcgatgtattatgcgccagccagccacacatccctgcaggatgcagcagcaagagccccgtgcacgtactgagaccgccttcccttttccctcccagcaaaccgaacaaagaaaaccatacgcagattcgccctgcggctcatgcaacggcccgcaacttgcagagatcgacgcacgcacgctcgctgctgctgctgctgaactcgtgattcaagttgacagtagtacgaacacgcgagcccaatctgcagggacggcttatgcagcatcagccagcgaccgaccacgcattgtgctatcgcctcggggtcctggagaaaggacagccgcgacggcctcccctcttccgttagttgaggggtgccaatcatttctgccgacacatttggacatctgctacgctaaacaccgccacggcggcgccacaccaacttaatgctattggctgagtacacatgatagtagcagcagcagcagtcagttctaaacttgtactagtactagtatcagtaaaaacatggccccaaaaggaaaaaatgagcggctgcaagaaaccaaagcagagaactgctgctgcttcagcggtccaggctgcctgctttgcctttcgtccctaagatctggcaggcgcggcagggaggataaaagaaggaaaaaaaaaaggaccatggaatggcggatgcggggggagcgcgacctcctcgcgtcacatggcttggattctcctcgccggttaaactagcgcggcgcagcgaccaccaggtggtgcatgagctgtagctgccaaggcaacctgacaaagttgcttgcaagtagcctcgcttgtgtgctttgggcgctaacgttgtttactggctagcgtttagtgtgtgcgcgctacttgcttgcatcaggagagatggttaaagaagagaactttgcattgtttaactcggcgaaagattgcgagagagagaattgtttttttactttgggggtggtttggatggttacctgatctgccggagctggtcgaagaagcggaggtcgaacgtgtcaccgaggccggcgaagaggacgacgccggcgaggcggtggtgctcgatgtgtccgagcgcgacgttgcgctggtggtggcgctccttgcccgcggcggcgtcggcgacggtgaagttgtccttgtacgtcaggtggcggtacatgagccccgtggtgcggagcagccgcgcggtggccgccacgtccgggttggcctccaccaccacccacagcaacggcggcggcaccagccgcagcgtgtgcgccatcctcgtcagcgccgccgcgcgctgcccggccgccgagggcgtcgactccgtcgtcgtgaccaccaccagcagcggctgcggcccggcgtccaccgcgccggcggcggcctgcgccagaaggctccggttgacggccgcccggcccgtggcgtgcagcgacctcaccacgtggctgctccccaccccgcccgccgacacggctgcggacgtccagtccgacacggacgacggcgcgaaccccgtgaagaagcccatgacgaagcacaggctggaatgcagcagcgccttcttccacagctgcgaccccgaccccttcttgcccctcccgccggcgccgccgtgctccgtggaccaacccatcgcccaagagacgacccccccccccccccaccgcctcccttcctccggcgccgccgccctgcttgcagtagtactcctccctgaaacaacgcgtggcgcggcgtctcgcgtcgcaccgtgccgtagcgaggtaagctagctccgctgctcacctgagcgcgcgtggccgtgttaggcgggggagcggcggcggtggtgttggcgttggtggtggtggggaggcgaaattgcgagtggtggtgggtttaaaaagggcgggaggtggcgagcgagcgagcggcgcgcggcgcgaccgcgcgcgagagagcggaaggcgatctggctcgttggttgtcacgtacgcttttgcccctcttttcccgggacgcagcaatcattaggtggcgctcgagctagtgacgcactaatgactcgcgcacgcacacacgatcggctgcgtgcttgtactttgtacccgtaacccgtatagtaaacagcaatagtggtggtaggaggagtagaatatcgtatctactatattggtatcagtacgtgtgtgtcgtcgcggtggactcgccgcgtggtgttcccagttggctcgggttgaatgaatggctagtggggtgccattcatgtcccctcgctccccggagtgctccaccgagcacaaaaaaaacgtcgggactcgggatcgatcgatcggtcgaccactgtgcggtgcacacatttaggagtagtccgttttctcgacctgtgtgtgtttaccctgcacactagcgttgcgtgggtccagcgtttggtactttggtgcgtttattactacagactgcagtggcggccacaccagtgtgtttggttgggtggatgaatctggatgggagatggccgcttgatttttctgtgttgtttggttggagggcaggatgaatggggcggcccagaatagggaatattctctctatatgctggatgagtgcatccggccgatttggctggatgaagccatccagttttggtctgggtgatgtgtcctgttctgattggctgtggttggtttgattttctgttaagtaagctccaaatgactttttctcctaaaccgtttatctaatttatgattgattacaccattatatttgttacaattaaatctttaaaacaagatctcagatgattatattttgataaaaaaatatatatgacaaatgggtcgcactaacttttggctttttccatccatgctatatccctccaatcaaataaaaaattggattgtcatatctatacaaaccaaacaaaaaactggatcgtcatatccaacaaaatataaaatatagatggtcatatcccgtttatgcatgaccgtgaaccaaacacaccctaagctgccgcgctgacgggcgccgggcggttcgcttgggccatcgcgggtagtggaatcgagaagcctctctctctggcgctcggtggttgcgcgttgagttgcatgcggcgctcggtctttttccggcgcgggccggggtgatgggttccagttggtggtggctggcgcgcgtacgtacgcgcgcgtcaccgagctactcctattcaattccggtgagagcaacacgacaccgggcagagatcgcggtgggcagctgttctcgctcatctgacctcacaaaacagccgccgccgaagccccgaagctgcacctgcatgcctgccacggcgtcagaaagtcagagcgttcgaactcgatctgttctgtcgtggcgttcgttcgaagaaggtgattggcagccaccgactcctcctgggtgctggtgaattggagatgttctgagcaagtgggcccggactggcagtcggtcttggtttaagcggcacgtgcggttatatttaggtgaaagctattaatctcgtgcttaatttagcgcgacaggatgggtctctagcttgttttgtttatttattgttcgtagtatgcctcactattgagttgtaagaatcttttgtgattacatgtcggacgctcacacattcacgcatatgtccctaccacacgtttaaagagataaaaaccactgcgaatcaaatttctggactcactattgaaaactcacccgtgtgaatcttctccgttagaaacttgtgcatatatcgggaccggattgactttggtattgtaggatttattcactttgttgctattttcaaacttatcaattttgggtaaactataaaaaaatacacatgcattgcaacgggtaaatgctattgtaattttattattgttatacagtttagttagggtaaaattcactataggaattcgcttggatttttttttcagaaatcatgagctgcaataagaagtctgtattttatctcaagttagcatgcgagttttttcaaaagatttcttatacgactccttttatacttccaaaaggaaacaagcttaaaatccaactcaaacacatatatgtattttcaaaagcgaatgcttaaaaaccgactcaaatacggatgacgtacaaaaatactggaaaaacatcttcaatttttatttttggtaaatttagaagttcccactctaaaactcaactaacatttgatttgaattaaacccaaccaacctcccttttacctttttttttaaccttcaaagactagattgatatactatgagcatctctgaaaactgtttctgcatagcttgagttctataagttcacactcaaaactcaactaaaatttggtttgaaattgaacaccacctaaacttgctttaacttgcccatttttgacctctaacgattagaatgatacattttaaaattaacggagtcaccaccgttagattatatggtagttagatatatattgagatatgattaatttgtgtggactcaatccttatctactctacatgtattcctatatattctctccatcctaatatgagtacaccctaatacaaatgtgacatggcggatggagtatatacttttttttaacgaatcggcaccagactgtgcccatttcattgaatatagtgggaaaaaactgtacaaagctaaaactttggaaatttacataggaaaaggagaaaaaaattaagggtttatctcggatagcctttttgtgatggctagggtccaggtcttggtctcctcctttatctttgcgcagagcgatagtgttgagagttcactgggttggaaaattctttgatttctctcttttcaaatctcccatgtcactagcaacaaaagggtgcaaattccttttctcggtgtccctgggtgtgttgctattacagtccaccagtcttggggcgacataggctgagcccaattgcccgatttgacgtgctcttgcgacgtccaggatgccagattctcctaaatcctcctagagtatctgaggtttactaggaggtggaacaccgtttcccgagtatgtctacaaagcgcgcagaaagtgttgttcggacatccacatgtagtcagtcagtctgccgtccattgaaagaataatgagctataaatatgagcagccatgtaagtctagaacttaaatccggatggatatgttccaccacaataaaccttatcagtactacgatcacttgtttgttagtttgacgtacccattttagcaataccaaagtttcaacaaagtgaaaatgccataaatacaacaaatttattttttgcgggtatgcgtgccattttaatcaggctcaaacgagcaccggttctttccctcaataactcaatccataggtcaatactcaatatagtcatatcacacacccgatgctccattgctgtgtcttggaaacgaagcaagtaattggttaggatggaacccatcacctaaacagccacttttcacccaaaaagagccacaagaaaagaaccgagccaacaaacaaataaccaaagaacaaacgcaacaacatataatttccacggatcgaattcattcacccatacggccctacgcttagccgtgttttaggattcaggcactgtaggccggccccactgggtagtgacctgtgtgaggtcaattccgataaagcacatggatgcaccaaccagttcgtcctttttccatctgcccaaaattaaagaagaaaatagaaagtgaaacagtccggctggccatgcaacacgttaagagaaacgttcctttcgcagcttctctcgctgcagaatttttccccccttctctcttcagtttctgtcggtcgcgaccaccagcagcaggcagagagagagagagagagagagagagagagagagagagagagagagagagagagagatagatcgatagacgatgccatcgtagtagtattatactgctacacaagttatataatttgacttgtgtggtttgtttttttctcaaagacctcaacgacttcgaaaaccttttctcttggatcgcaacgcgtgtgtgtatgcatatatatgtacgcacatgtgcccgagagcttagctgttgtttatgaggtttcgtgctggtttggcctcgcgggcggactcaccgacgccgccgcaagttaattagctggtttaagcacacgcaaatgatgcccggtttttgggattaaattaccggtttcgtctaagcttaatctgctcctgcagccagccagacagccggtgagccggccatgccagtacgccgtacgcgcacacatgagcggattactgcataattctcgcagatcacacggcgggtacagcgttttcctgtacgcgtatgagtacgtgtcacgtgtgacaacttgtcccccttgcgagaattctctctcgagattattggcattttgcgaaggaaaattggatgctcataattatatatttgtttggtgatcagcgagatattagtggtggtcgttcacacgaagcggtcgatctattctaagcatcttgacttctgcattggcgagacgatgtgatgtgaacagcggcgaggggtttggagcaaattaagctaagctctccgtcgttgggccatcaattttgtgatttgtttgtccgcactatgccgtggcaagggtcgtaaattagcgtaagcgtcgttaggtgctgcaccttcacgcacgctacgttttacctactggtttctccgtaggttattactgaactgttgtgttgtgggcgatggtattgataaaaatttgttgcagattaggtccaaagtttttatgccttgtttattcatgtgtgtatgatgctctaacgaatacagggacacttgaagaggtctttaggaaaagaaaagactactacttttgcagaacttttcttttttagaaaaaaaaagatcggtcgttgaacaaattgatgcggcactgtctcatgtaacaattgaatgatgtaatactgtaccattagtaaagttatatctccgtttgtcaattgccaaagagagttctactaagggactacaataatcacttgacacctctatttgttatataaacgttttatctatttataagttggctaggagaaaatattattgttaggatcaaacagaggaaagtcgtgatgctgcaggtgaaagagtgatcactgaaattaaatctgtagatcgaaacaaaaatgtcctcggcatcatatgccaacatcacaaccagtattgattccacatcaaaaccagcaggcattcggcatattactctcaacaaattgacagtgacaacttccttaatatttgataaaataaaatgaagcaatcaaataatgactaaatagtacttaatacgataatacaactaaaaaaatactcctggttactccagagcgaaatattagagaagatacacagcgcaaactaggacaaatatatgtgaagttacaaggcatgaaaatacgttagtagtacatcctaaggtaaaagaaaaattcccatcatgtagcaaatcaatgcaacctagctaatgacgcaggattaaaaattgctttttactggcaatttggtgcacttatgcattgtgccgtagcttttacatctattcgccatacttacatcaaacatgacagcaaagcaccctgaaaaactcatttgggtaaaaatgaggggaaaaaacacgtcagttcttcacctattctcctgtttaaatattttgcgattgcagattacatactgaacaaattacaagacttcagatgttagtttactctaaaatgtgctacacatttgccttaagatttttgaacagtttgaaaccccgataacaagcaaagatatcctaaaagatcacatttctacacacgtcaaggtatgtgcatacatcttttgtcccttcagaccctgtatattaaggccccaaggtgtaatgaaatgtcaaacagagcctctatcatatggaccagaaaagggcaacatatgtgcactttgaaacgctgttactggcaccgaacaatgtggttcaagtttcttcaggcaaaactctggctttgcagtaatgccattgaactcgagtactgttagtattgatgtagcacgaagtagaaactaattttcctcatgaagcaacacatcctgagaggaactccaatataatttcatccaagagatcaccatgtaacatcttggctatctgctttcccaccgtattgatgtcctcaccaacttccagccattctggatcaagaactttgtcatcaggatgtcctactgcaagctcttcctgccgcctgaccattgtttgccaaaccacctcaacaggcccttcagggccccaaacaggacaacaccgtctactggatttccatggtgcaaggatctcagaaagaacagtatttgcaagatcaaacagaagcctcctttctggtcttggccatgcagatatcttattgtacttcctctcaagcctgtcgaagacctgaggtccaacagggcaaccaggcgagtgccatgacttgcacaagagctgtgagtcagcgactatcataccagagtttataagcatgtcaaggagatacgagaagcccctttcctcctcaacctgaaaagcttccagagaccggtaagaagaaccactgtcatcatcacttgacaaggatacttgttcatatcggagctcacagtcatcaattagtttctcgacatctgaggtcaacacagaagattcagttattttaagcagactcaatctgaatatttccaaatattaaatggttaatccagcattgaacattccaagtgaaactctcaacttaaaattttgaaacacaaacaagaactttaaaagttttgattcaaacttttaactaaactttactatcagtttagtgctctgaaagttcattgattagagggcaataaacatttcatagcatgttgagccttcagctggatgattgaaaagttagactaaaaggatgaattttcaaatttgtagcttttagcttagtgacttgcaaaagaaaccggccattagttagttaactagtcatgattgctagacagcaaatgcctttttagtgtatgctaattacgcatgatgctccagtcaggtgctatagtgatggtttagcttgagttcataaatatttgcatatttgggacaattgcttatttaaccctattttaaagtctaactaccaatttgaccctactttttctagtttgcttattttgaccttgcttttcaaaaatgaatatcccgtctgaccctgtttccactgcaccgttaaggtttcattttaaataagaaaataaatatatttacttttcataatgaccaaaataccctcaaagaaaccctatccattcagatccggtctcctctcatatcccgtctctcttctggtgagtggcggcggcgacggtggggcccagaggaagggatccgcgccagcgccggctcgtggagggagggcgcggcaacagcgccggggcacggagcgatttgcggcggcgccatggatgccggcctctcttgactcgcaaccatcgtcgtcgagacgcggcgcacgcggttcgagatggttcggctagtcgccgtcccggcggccttgcgtgtcctcgccacggagtagcacgccgtgggcggcgctcacgcccaggagctccgcgagctggaggctgcggtgggctccactggggtgctgcggtgtgcgaggaggcggaggcggcaatattttagcaactctataggagattactgggtatgcaggatctagtatgcaaatcaacaatgattcaaatacatcagtgaactctaggcttcgtgatgaatctccagttacccttgagcagcatttggaaaatgtcaaaaccttttgccaacattgtaaaagatatgggatcttcaacacgtaatacatcaagctctaaagtacttggtaggagcaggggctgtaggtcttttactggatctagtttgtttgaagatttggagaaggacgattgcaccccaccagccaccaaacagaagtttcatagatttcgctgtgagacctcaaaattgtcaaaggggatctgcactgaactagtatgatgcagagagtgagaccctatcaagggcagggttctgttgcaggcgacacagaatttactgtcataggtgaatttgttgctgaactgaaagaaatgtcacaggttcagtatcggaaggtcatgtgagtcattggaaatgttatcttattcctgttgaggccgcccattctacttgtttgaaaacagcacacggttatggtgcttcacatttttaatagctcaggagggcttattataaactaaatatactcattgcactactttaagatatcattgacatttaattatgattttgttctttgttttgattgccagagtggaaatggagacttagtgtcaattaaataagcaagatataagggtcaaataagcaagggcaaaagggactatttgccccttacttaacaccgttaactccctttaatggaatagggtcagataatagattcatttttgaaaagcagggtcaaataagcaaactacaaaaagtagggtcatattggtagttattcttcgaaatagggtcagataagcaattgtccctaaatatttgtatcaacttctacattgttagggtagctggtaatgcagttcagacctctttgaaacaagtaaattcctctatgaataacagaatactccagtgttccaaatggggccagtttgtctcacttactaggcatgtcttgtaagttacacttgaagtatccggaacaacaactgtcttcatcagttggaggctcaagaatggacactgggcttggttgcccaacctctttcaagcttttatgagactttgccacataactatgatcagaaacagttattgattcataatcacggcaattgaaaggtgatgctgaaacctaaaaaagggaacacttgagtgagtggtacaccagaaactaatgcatgaaaattgattctctcccagtgcgtcattatattgataaatgaaggcaaagtaaagcatcctagtactacataaaccaggtactctaacatactggaacagtacacttctggactcaagaaaaggctaaagaaagagaacctactattttcaaagaaaaaaaaatcaggaaaagagcaattagaggctggatttatttccatataattatcaaaaaaagaaggaaaagagcaatttcgatttctgggttctcattagaataccttcttaaatgcttaacactttgagatatataagaaataaatgctcaaacattaaacaaaaaaccataaaataagaatacgattcaggaacagtaattgaaacatttaagtttcttaactttgtagtagagaactgcatcatttagaaattcatgttcacagtatgcaacatttgagcaaatttcctcaattaactctgtttctgttttgaattacagaagttgttaatataagggcctactgaccttttcttccccacatgattcaaatgaagaatgtacagtttcagcaggttttttcaccaagtcctcatctgttgtgaacaatattttctcatttatgcagtcaaacgttgaaaagttgtcagttgaacaccgcgaatggtttcgattatcatgagaaggggaagcagatctatgttgccgcaaggtctgatgtttcgcacaagcattcctcaagttatcttggctgggacttccaatttgctgcagtcttgatatatcgcagaaagagttgaagtgagactgaccactgtggtaagtatttgatgtatttgggataaaattactgtgaggggaattcttgtccaatgaactgtgaggatgcaatcgaggtgcatgctttggcaaaactatgaagcatccttccttgccattgctgttgccccggttaagtttattgtgtcgaatctgcgcatgtgagtcggaatctctctttagcctctctgaatcagataaggcaaacatctctgcaagagttttcgaaccaacactgccttcctcatacttctgacggtttttcctgggtgagctatttgatgatggcctgttgctttgtctggagttaacttcaccactaacacagttctgagatgatccagaactactcgtatccggtacgttatgatgatcaaatgatgactcctttccttctaacagtgaatctacggcattcctactcaagtatctttctcgttttattctagacacatcaacatcttcagtgtctaaaagatttggtgaaaccctccctctattctgcaaagaaaaatcagcctgctgcatctctctcctgaaattcttattgatgtgagaggggtctggcgtacaaaaggctttccccgactcttggactttccctaagcctggctccaaaacaacaatgctattgaaatcttcaagctttcctcttgatgaatttctaatatctttaagtgaagtattacctaagccagcagggtacttcctgaaagtacttgaagtctctttctcatattgatgctttgcggaataattcatgtcatgggggcgcttctcaaacaaaggattgtttatctctagcgagtttaggcgatcaaagccatctcggcacactacattgttatcgaatggtccatcgccatagggagacatcgatggcataagcttctttaactttaatgcacttcgtttcaagcttggcaatcctttagggaaatgatgggacctctctttcacgatagcctcctgtggttcctctgacacttcaaagacgtccttgaaatcttggtgccgattgtgggttacataagcaggtggcaatacatcaattcccatcagttttgcaatcacactaggtgacgatctcctgtgctccaattccttcaatagatccttcccaacaagaattttggttgggctgttatttcttcgtggcctgcactccttgtaccgatgcccaagctatagaagttgtccaaaacaaaaaaggaagcatatttctcaatcttaacttttgacttttggtcataaggtaactgatttgaagaacaatacaatgaacagaaggaattaactcactgaaatctgttccatcttgaagattactgtatagagaatcagttgagatgagaggttgctacatcatctcaggtgaagtgctttatgcctacatatatccacagaacatttgtaaagttatgttagttctatgtagagcagatagaaaatcagcacaacgccactcaaagtagatggtttagtacaatgtcactcagttctccaatatattagttgacttaggctgcactggtattgtaggggtggtgctcggcctatcaactatgtggaacaagttgagagaaaaaaaaaagacccaacagctgctggtcaggatgaagtgatgaacatgagagcaggctgattaacacaacactaaaaatgcagcaagcctgcatatggtgtattttccattatgaactatatgtgatggctcaaacaaggacagcttgcgattcccgctactaatagactcaaggagccgagcagtctgtcctgtagaatctcaatagtaagtggaggcgcatcaagaaaagcccaataaatttaacaaaaaaaaatgatccttcctgtggcatttcctcaaatttatacttgtttacaaacctatcatttttctcccttaacaagtactccagtatgctaaatgaaaggatgtctccaccccaaggtttgatcttggtgtccacaaatacagttgtgtgcaagtgcgcaagcctggttggtgcagaagaaaatgaaaggggtgactcgcagagtaagccaggggcggatccaacttgggacatggggggttcagttgaacccccaaacttttgggggaacaaacaaaactgttacaatctgtattaagggttaagagcttcttccagatctagaagagaagctagggttaacgcaagcaaattcccagacaaaactactcccggtgggagagagatgaatcagaaagagaatgtgaatgctcaccaagatcccctcccctccccagctctcctccccggatggagatcggcgcctctcgtcttggcgcaaggagcggacacgacgacgggaacgggacgggagattttctttttcttttatacgcatgtacctttagctaatctagttctaaacaaataaaatcaccatgtagaacaagaataaactacgcaaacctatacacacgaacaaaccaactaacctcctgtcaccttcaccgtcctgaactcctgatctgaactctgaaactcctttgaaccaacagcagggagagagggagagcgagagctgcagcatcagggattcgctcgcagctgaaaaggaaaaccacccagaaaaccaaaccgtcgccgccgccagaaacgcccagcgcgtggaggccaggagcagcacaggtacaacggaaaaatgcaatgcggtgcgaagcgcgcgcggtggagttgctcctctcctcctcccacgaaatcgcagtctttttctccctacttttctatgccctttcctctcttctcactgcccactgttcggttttttggaggaagaagacgagctcagagcacaacaatggtttgggacctccacgcgactccgctacacggccaccgctcgcgcctccccacccgcacgcggcacgtcaccgacatgtgggtcccgtaaaaggtgtgacccacatgtcggtctgtgagacaagtggcaacgcggggtacacgccctcgcaggttgcgagtacttcgccggatgaggaattaaatggcggcgtttagatgaaactgattaaataccgggggtggcgcccgcgtgcgtccctatgcccacccggaaacgtatacagatctgtggaacactgacactgggcaagcgggcccgagagatccgagccatttcgcggtacggcctcgccttgggccatgaggcgcaatggtggaggtggtgataccgtgctaggagtgctaatcgtacccactcccgtgctcccctgcgtgctacgcgatgtgtcgtactgctgtgcatgagagggaatcttgctgtgggcagtgggcacaccagagtgcaccccgtcagtccccgtgccgggtgtatttacatgtatgggtggatggagtagggaaagtaagtaggattggagtgctagatggatcggtataccgatctgaatcattctccagaacggctttaatttgcggtgaggttgatgaggttggggggccgatttccaggtcagttttatttgtctaattatgtttatggtgttttgtcaggtctccagtggaccagttaagtgcagtacagtgctgttggctgctgctgcctgctggtggtccccattcagcaagtggaggaatggatggagtcttgttgccgcaa

SEQ ID NO: 8504 - DNA, 6396 bp, Oryza sativa
ttttttgttagaataagttcaccgtaggtccctcaacttaacagcgagatttttttaaggtccctaaaccataaaaccagaaatgttcacccctaaactcactcaaaccattcacctgaggtccctcggcagtatttttgtccggttttactgatgtggcatcctagtcaacaaaaaataaaaaaataaatatgtggagcccacatgtaagtgacacaaaaaatgtggggccaacaatcctagtcagcaatctcttctcaatcaccttttcctttgccgcagatggggagcggcagcggcgcacggctggaggcaggcgcagcggcaggcgagcgcggctacggagcatcggtgttggcgggcgagcggcggagagcggagcaggcaggcggcgacgtgcgaacgtggagggagacaaggtcaccgccgccgctcggagggaggggcgctgcggacgtcgtcgctatgggtgtgggaccacgccgtggagctgcccgagatgatggcacgggcggagaggcggcggaggaagccgcatcaacatcagcaacaatagcagcaggggagcgcgcggagggacgccattgccaccgacaaactcgcgagtgaagctcggccggctcggccccctctctctcctctcccgctgctgctccgcccgctgccgccgcctgcctgctccgccctccgccgctcgcccgccgacgccgccactccgcctgcctctagccgcgcgctgctgccgctccccactgcgtcgccgcgcaccccgcctgctgcagccgcgcgctgtcacccgctgccgctcgccctctgcggccgtgcgcgtccaccgctttccactgcctgcagccgccgacgtcgcccctccacttgctccggccgcacgccgccgctcgccctttgtggccgccgactgccgccaccaacgccgcccctctgcctgctctggccgcgcgccgccgcctgctgccgctcactctctgtggccgagctcacccgtagtcggaatggctccggccgcctgctgccgctcgctctctttggccgagctcacccgcagtcggaatggctccggtcgcacgcccgctgccgcccgccgactgcagccgtcgagccattcctcctcctcccccgtgccattcctcctcctcctccgcttccttcctctctgctcgcccgctcgcctgccggccgcgctcgcctgccgcctttcgcctgctgtgtcgcgcgacctgccgcccgcccatcgccgctctgccggcctcactcacattgaagacgggagagaagagagaaaagagaagagaaggagaagaaaagaaaagaaaagaaaagaaaaaaagatgtgcaactgacatgtgggccccaagtatttttattaaaaaaatttgctgactaggatgccacgtcagcgaaaccacccacgtatactgccaagggacctcgggtgagcggtttgagtgagtttaggggtgaacatttctggttttgtggttgagggaccttaaaaaatctcgctgttaagttgagggacttccggtgaacttattccctttttgtttggacaattgtttaggtcatggatatagatggccataaggcccgcccggcacggcacggcccagacacggcccaccagccatcgggccggcacggcccctcccttatttttggctgttacatatgtatagcttaaacaagtctatttttcgtccctcttctttgggctgacatatatatagctaaattaagtctattttatgtccctattctttcgactatggcatatgatgtctattttactccctattctttgtgtgttggacctggttgccgggccggcccaacgtgctagtggggagtgggggccaggcacggcctagcggtcgggcggggcaggcatggccccgacccccgtcggccggaccggcatgggcccgacccctgtcaggctgtgccgtgcttgggtcgggccaaaacgtcgtgccgtgggccaggccgtcgggtctcggcccttatggccatctatagtcatggaccacgtagacgcaggagactaggttcgtgcttggggactcgtgaaaagcaatgacagtatgctgggactgcttgggtattactacggtttttctttggaataagttcaatttaggtcccttaatttgtcgcttagtctgaaatttgtccccaaaccacaatactccctccgttttaggttacaagactttctagcattattctcacacacacacacacacacacacacacacacatatatatatatatatatatatatatatatatatatatatatatatatatatatatatatattaatgaatctaaacacacatatatatctaaatttattaacatatatatcaatgtgggcaatgctagaaagtcttataatatgaaacggaggaagtaccgaatataatacatcccctaacttacagtaccgtattaattttggtcatttggcagtatagtggccggttttggttgacgtggcgagtgggacccatgtggaccctacatgccagctgccaactcttcttcctcccaacatattctctctccctccctcacttttctccacacacatcacctgctcgagagaatgtctgtgaagaaaaatctccctaaccgctgaaaaatatcttcttcatgtcttacccgtgttcggccgtcacccgcatccttgccagtcgttgcaccgcccgctccatcgccatcatgcacctttccacacagcatcgtgccgcatgaactccgtgtctatcgtcaacttcctctcgttcgcttctccccactgccgcacgagggacgatgatgacgacacccacagcgacgaccgtagcgattgttaacaaccaaatttggtaatatcggcatcgggaaagaagattagatcgaagcaaagtcggaggcggagatcgagttcggaaacagggcaggaatcggctggagtccagatcggctacgattaggatcggctgggtctgagtcgggctaggtaagccgatgcagccgattccgacaatgcaacttggtgtatgacgtcgggttgagttgaggtgtttcaaggtgattgccgcacatggatagagtcctgagaaggcaattgtatctattaattaggatgttttagataatttccttagagatatgcttgggcaaaagtctgccgcaaagacttatggtatcttagagtttgttagagatagtagtcgtgtccgttatggacatatcttgtaattttcgggtataaataggcccgagccctatgtaacttttaaacacacatgttcaatacaatctcggcgcatcgccacccttttttgctttagttttatttcgacgagttcttgctttcgggttgagctgaatcagtttcgatcttcaacaagaggtaaaacttgttatggcggcttgcgttctcgggattagtgcttccatctttatgacactctaatcttgttgatgtaatttgttgagttatcatatatcctacataatccttggcaatatcgatatccagcctacaatcgggtaacatccgtcaatagaaggcagccgattaggttaaataccgatgttgacttagattatataggatatctaccactctatgacacatccaacggcttgattgtctagatattgtccttcttttcatacttatagctgcatcagttaagtttgatcttatgagtcgtgattagaatctcaatctctagcccgcttcttggttgctgattagggtagtatcggagtttcagccgatcttacctgatttaactactttttatcctatatgcttgattgacatgttaaatctgccctttacgttaagatcttgctgcatttaagtatattatgcttttgtttagtatattatacttactttaatatcttaacatagagtggtatcagagtattagccgatacatgctagatctatctgatcggctatgttatgaacgtatatagtctcattattaatatatatttcgatctaagtgatttatactgtctccgcatggtgaccgatctatcccaatcacttgatttaagtatatattgatataaagattatatattggtaatatctacagccgatcaagtagattcagtccttccttatttattaatgactgctgatcgatgcatatatgacgtcggctcaaaaataaatgatatgtcatcggcacctagccgatcggctatcatttatagatttaactgcggtttctttgcttctatttcttgttgattacaggatcaaatcaactggcacgctcatacatttgaaggcgagctttggacctgcactggagttaagcagatctcccaggcctcgtgttttctgtcaacagcgatgtgtcgcgtcggccagccgcgccacgcccgcgccttcaccccgctgttgtggtgtcgttccctcaccaccgccgcactatgcttcggccgccgtcgtcaatccttcgccatcagtccccagtccactagcagcggaagcctggatgtcgagggcatggcgctggctgactacttcttcggccccgagttggacgacttgatgcagtggctgggcgacggcgacgtcggccggaagggcacgctgccaactaagaaggaggccagggagacgatgccgacggtggaggtgaccgccggccactccgcatccgccttcgcaactgcctcaaccgtctgtcgtgaggactacgccgttggcgagcacgccacggggacgccctacaggcacaggttccacgcaagtgcattgtgccatggctgaagatgcacagctcgtgccacgtcttccgcttccaactcccaaccgacgacgacgaccctaaggccgcacgcggcaacaacgacgcccacaccggtgagaagtcgtcacggttctccagttcgccgccatacaccatcggccgtcgcttccaaccagggtcaatcccctccggtcaaaatccgacgtggcgccacccaattagacgttgtttcaatgatacgtaaggcccacaagggttattattattatttttcctttgcgccatgtcaccaccacttcagccaaaaccaccattcaaaaccgccctgggaccttatttggattggttttagaagttaagggacgcgtcatatctagtattatggttcagggacgaatttcagactcggtgacaaattgagagacctcaagtaaacttattcctttttctttttcggccgtaaatgaaaccgctttgtaactttggttaccaaagataccggtgaaagagaaatgccgtaaccgagctgtttcctgtttgctataagaaacatttgagaggagaaaaagaacatgttgctgccgaaaatgaaaggtttctttctcgtcaaagagtgaccataaacatttcatagtacatatatatgtcagatttttcttttaggaaaagggagatatattactcatggggaacatccacatctaaaagatgtgaaatgaaattacaattgttatctggccagaaagcggttaaagactcgcttatacctttattagctaaaaaatgactaacaatgttctgatcacaacgaacttttgtgagtttaatatcccttcgtccagtcacgaggctctgcacctcctcgactagaaatcccatctccgagagcactctctgcttggatcgtattagattcatcgcctcatggcaatcggtttcaaccaacaccggtagcagcgtccactgtaacgccatacaaatcccttccctgcaagccaatatctctgcttccagcggttctccacatctatctagcttcccacaagctacaaagataaccttcccagcaccgtccataagaacagcaccaataccacctttgccatctctttcctcaaaagatccatccacgtttagcttcatccaacccgcaggtggcttctcccatcgttgtttcttcgcagcctgttgggactgaggtttccttcttctattatgtctagctaactatacatttagctacgcaaaatctatttcgagaggcatctcgatttagacttaactagcgacgcggacaattacgtgagaagtactagtagcgttacagacatgcatacaagtagtttttctattaggttgtgtatttttttttcttacgaaattttctcttaaattacttatccgatctataatccgattacaccgttgtgttcgtaacaattaaatctttacaacaagatctcacatgattatattttgatgaaaaattacaaattactcttataatatgtctaaattacttttagattccactaagttacttcttagacataccaaagtaaattcagtaaagcctaaaagtaatttacatataatatattataga

SEQ ID NO: 8505 - DNA, 10580 bp, Oryza sativa
gtcttcggtgcgcagatgggcttgagtgatcaggacattgttgccctctctggcggtcacaccctggttagtttggctattaaccattgtatgcctctgcagtatgtaggagtacatgttctaatgtcggatttctgtgctttgttctgcagggaaggtgccacaaggaaagatctggttttgagggaccttggacaagaaaccctctgcagtttgacaactcttacttcacgtaagcgatgttacgagtggttgaattttgttcttatgctgaacaaagttggtaacaaaaatgttgaactcatctctccgcgacgattttaatagggagcttctgagtggtgacaaggagggccttcttcagcttcctagtgacaaagccctgctgagtgaccctgccttccgcccactcgtcgagaaatatgctgcagtatgtctcctatcaatcatcatcttgtgttccacgttttgcatcttgtgttcctcgttttgcagagatatgccagaacatgatactgattgtgttttttttccccaattctgctaggatgagaaggctttctttgaagactacaaggaggcccacctcaagctctccgaactggggtgagtaatggtttgtcaatccatttatcgtgttatctttcatgacaacaaggtcatggtagctaattgtactcttgtgatttcaggttcgctgatgcttaagaggtttctagtctactactgctagtacattgcccgtggtactcttgttttgcatctaggctagggccagtgtgaaccagcagactaccactgtgagtcgcctctgtaataaaatttgttcggcctatggccatcctcagtacgttgtcaatgtctcggtgggctgttatgctcaactgcaatgctgcatccactgaaacctctttctagatgtgttggtatgaaatgcggtattgcgttcccgatttcccctgctactgtcttgaacctgccgtggtacaatccttgtttgctgcacttcatttttagttcgttctaattccgcctggaatgacttttgagtgcttcacgggctgactgcctgaccgtgttgctgtacatgcctaccccatcagttcaaaaaaaaacaatcctacctacgaaattcgttttttattgggacaggacatcggctgagtttaatttcaaaatttttcaacaaactttcaacttttccatcacatcaaaactttccctatacacgtaaactttcaacttttctgtcatatcgtttcaatttcaaccaaacttttaattttgatgtgaactaaacccacccatcattggatggacttggcaaaacatggcttgaccattgagatcgttttggggattttgttcagtcagctcttccatggtgtctatcagaagagttggggccgtacaacgcaaattatttcccagatggtgttgatatcatcaatgatcatggcaatttggcaaaccatttcttatttcccagatggggttggtataataattaatcatggcaaccccatttgtttggtgctaacttgatgaaacatgaatgccctcaacctcaacagatgggctccagtccggccggcgccggccagcactcggtcaacacaatatgggcacgagtggggctcaaggaagtgtggggcgcagcacaaggagccaagagacaaggagtcatgttggtcctttcagtttcaggcaaaaaaggaaccgaaaggagccaaggatcggaccctttcgaagcttttttgaccatttcgtccgacttgcaaggcaggcccagaaacaaaaataacccaactgtctagtggtaatatcatttgggatctgttaggattttcagttcgaagaaactgtcctgattcagagttcagacaaaatacgccttcagtagttggtcctgccgcccctcgtagtttcactatcgaaagggatcgctgctgtcgtaatacgtttggttttggcaatacagaaatcaatctgctcgcaaagtataatatcataatccaaagttccaaacccttttattcgaacatagtaccatatatcatacaaagcagccacaacttgcagagaatgtgggtttcgaacatcaacaaacaaacaaatgcaatgttcagtctacccggctctcaatcttgatcatatgtacaaagcaggtatagacgggatctcatttccatggtgattcaatctagtaccggatgtttgggttcatctcgatcgcttcgttgaagatcagctgcttcatttggtcctcgtttagagccttctgctcgaagtcgaaggagaagggctccaggcagatgggctcatcggcgatgtcgtgcaatctctctaggtaaggatgatcgagcgcctcctcaactgcatgtcaagaacgatgtcagtgagatatagttcttaagcacaaatcttctgtcatccttctaaaccactctgctattgtctagtgtttcaaaactaaggtctactgaactctaaccgacagaggctgcaaacgtgctacctattctacttctgcactactacacagtaaagtaacacagtcttttatcgtcacttgagcaacatgcaaaatcgttggtagccccaaagacagctaaaagacgggttccctttaaagtgacgagatcaagagaccgactgttcacggcaagtaaacataaaaatagttggggatgggtcaaacaccggcggctatatacgccagtcaaagaagcagtgcgatagaaaatactagtgctatactagcacacatgcagtagcatactgaacagggtactgtacacagtacacactcagctagtaaattagtacttgtaattttgggtactaattttagtagtttagaagcagagcagcaagcacgagttgggttagccctctgcacgcacctgtgattctctgcagcgggttgaaggtgagcatcctctcgatgaggtcgagcgcggcgggctgcacccgcgggaacatgctcgcgaacgtccggcgcgggtactgcggcaggtgcctcatgtacttcctcgcgtcctcgttccgtatgaaccccagctcgtcgtccgtcggcgtcccgatcacctgatcatggacccaacacgatgagacccaagaacaggtagcataattcagcgtgtgagtgtctacgctgattaattcactcacctcggtgatgaggcgcatctggtgcatgtggtccctgccggggaagagcggctggcggttgatgagctccatgaagatgcagccgacggaccagacgtcgatggcggcggagtagtcggtggagttgagcagcagctccggcgcgcggtaccaccgggtgaccacgtactccgtcatcatgtcgctctccgacgacggccgcgccagcccgaagtcgcagatcttgaggtcgcagttggcgttcagcagcaggttgctcggcttcaggtcgcggtggatcacgttcgccgagtggatgtacttgagcccccgcaggatctggtacaggaaatactgcaacaacacggccgcaatcatacatacgtgacatgaggaagatcgaattgatgtttctgcagctatcgattgattgtgtgattgatcgatatatgaaaaaaaaaatcattcgctcacagttcactcacctggcagtgctcttctgacagttcttggttggagcggatgatgtgatggaggtcggtgtccatgagctccgtggcgatgtagacgtcgttgaacgcctgagggatcggcggcgggatcacatccctgatgcctatgatctgcgtgttgttgtagcagttagtgacagattaccaaattcaggtacacgccgctgcgtaattaaccacgtagtcttcagttccactactagttatagcctaataggagcttacgttctcgtggtcgaggtgcctgaggagcttgatctcccggagcgtgcgcttggcgtccatgtcgttgttgaacgcgttggcgatcttctttatcgccaccatctccctcgtctcaaagttcatcacggagctgtaggcaccagcacacggaattcagaagagaaattagaaaaacaaagcaccaaaaagtactccgaatagacatgccaaccagtcaaccactacgctgataataactaactaaaaacctgctcagctcagctgcagaatcaaattaatcatccctgctctaaaaacaggggattagtaattggtcccaattactccatcctctcaaccactcatcgacgcgtatcaatcaatcaaaaggaactgacgaaggatcgattaacatggcaagaaatctagggcaggcagggaaaagaggaatcggcgtgtgcgtaccagacgatcccgtaggcgccgcggccaatgggcatgatgggcggctggtacttgttcgtcacctcgaacttgttcccgaagatgtcgtagagcaggtaccggccgccgtgcgtcatcgtcggcctgaactccgccaccggcgccccgtccatccctaatccctcctcctcttctctcgccgcaagcagccgaattgacaaacctaattaacgaccttatctgactctctctcgattcgcagagacagcaaggcgatgagggagaggggacgagaggcgaaggcagctattaaaaagggaagggggcggcggtttgtgaattggcacaatttgtgatcgctgctgctgctagtggctctctccccgatcgagcacggagtcctcggtccggatgaggaaggaaggtggcaagaaagccagcgaagcccccgtagactctgcaccaccctgtacccgttttcgcgcgtgcgtttcgtcggcgggtacagcggacggcgaggatggggggagcccgtggcgatcggacggcgggggagggcgttttcaacggtcaaacggcacatgcggcagccacgccacgcaccaaccgtgaaactgattggcgacgcgggggggtcacgggctcacgcgtgtcaacgggggggaagagatgctagtggtgtactgggtgtggtgcgtggatttccggggtgggcgatggggacggaccgacggaggcggacgaagccggacgcggtgcggtccgtcgggttgggttgggggccggccgatcccccggtgttcagctggtgggttatgggtaaaaatgttcgtggaaatttccgatcaaccgaacatcttttctgtataagaggtgtcacatttgattgtatcgtttttagctatttataattttttgtttcttttatttttttacatcaatactaaatagtttaaatgataagtataattaattactagtcgatcgagaggatcaattttttaaaggagatgctaccattccgaccgttttcactccccggtgatacgccgtccgtttgccgcgcgactgctttggtgcggacgcgcgcgttggtgtcgtttgattgaccggtcgcgtatgcgcccgtgtgtccacagcgggttgagaacctggcgtgatgctgcgtgtcgcgtgagcgtgactcgtgccgtggaataacctttccgtcgggttgtgcagggtgtcgtgagcgattcgttgccctgctagtacttcaacgtgtagttttcgccgtttttattggagttgagaataccctgaaaaaggttggtaagtcgtgagtcgtgaccaaagtagtaacaacagcatcaagtataacgccttttaggttaaaaagggaacggcaaaagtggatggagaactgacgtgttaagtaaaaacagactgacgctttactgaaagttacccactgattgttattgactcgtggctcctatttaaccatagaaacgaaacggtcataacgtaagatttcaggtggaagcgaagcacaacatcctcctttcttccacagtgaaaacgatcgatttgatatccacagtgagcgcttggtccgtaagaccgtaaactctggacttccacgaggaaatgagtcgtccccgtccagtcctccacggaccacggcgacgcaacgcacgccacgcacccttttccactgaagctgctgcgtaagttcagaagaacaaattcagaagaaacactaggcagtgtggtaagcagatgatgtcatcaggatcaagtgccaataataaaaaccagagaaagcacagttttaattcacagtcgatacgaagcaccgaggatgatacttatcactggtaactctgtgaggagtttgcgagagaaagcgacagggcggctcgatgcagatttgtttttcaaggagttgatggtgcagtgcccccaatttggcacttcattatcccaagtaattaagaagaataagagggctcggtcgatgagcaatcgtgtactactaaccaattgatgtgtactagactactaatggcccagatgattggaacaaggagggcttagaaaccgaggtcacatgattgcgagccgagccttttgctatgctttgttacgaacaatcatacatgcctggcattcttatttggtagattatgatattcttattgagtagtaatagacttataagagatgtgacacccgtctgagttaagaatccgtgaaacgcgacaacatcgaggcccacggagaatgatttgcttgatcgatagtaaattatcaattcgcatcataatgctcagtatttttcaggggagtgtttaatgttcttaaggggataatgttttgtattagcagcgtgtaggatgaaccttttcttttctgaaacgccctaaaatatgctgctccgcagacgggattattccccaataggatactgggccaatgaagttgacgggatactccggctcccggcgatattgtgtagggatagattccaggcttgtttctcaccaatagaaaaccacactctcatttcgtgtaaaagaacagaaacacgagaaaaaaacgtgtctgttaacatggatgcacgcatgcgttgccacgagggaacatgatatgcaaacttcaaggcagcttctgagcgctacaccagcaacatttagcaacaaagatgaaagagaactgtctccaggaacatttagcaacaaagatgaaagagaactgtcgtcaacgttgttcagcgaccaaagcaacaaaagttgcaatctcagggtgataccagaccgcaaaaacaatgcaggctaatagaaagttcatcgatccattacacaccaatagcaatatagcatagccccaagggcaccaaatcctttcaggtgttaagactccttgatctcgtcttaaaccggaaatataactattacaaccatagcatgaccatccacaagatgaacgccagagactgggattaaatttcaagcttcaggggactcgcttgctctgggcgagcgtgagccgccacggctaccaccatcaccatttccatccctagggctcgggctgccgttgtcccttgggcttcggctattgttgtccattggactagggcttccattgttccttgggcttgggctgcgcccattggcagccacagggctacggtagccgtcagatgggctcctgctgttctccctgccccaggggctgtcaccattgcgctcatcattatccttgggtggtgggcttacccgatcctgtggactccttggactccgcctaccattcgggctggggttgcgctcctttccatttgctgctggggagatggatcgcctgggacttctgctgtagctaagactccttgatctcctatcatcacgatctctgcgtcccctgggagatccagatagggatctggacctagatcggctgatagtaacaaaaagattgtaaaacaatcaggccaagggaaaacaagtaccaggtcaacaatagcatatctgcgatttgaacagacagcatggagagtaataatttgagcaggtggcttttgaagcatacctgtaactcctgctccggctccggctatagctacgactacgaccatgaccacgtccacggcgtggcgatggggagcgcgaataacttctctctcgcctggaaaaccaagtacgtattggagaagtcttgagtaattcaaacatagtaccttagaacagagtgctacagtgtatctgaccaacggtatcaatcaatacctgagatttcttggactgttttggcagtttctttctatgtgacctctttctccacaacggtaacatttgttcttccagtcaccagccttgcagtctcttgcccagtgaccatcaatcccacagttaaaacagcgacctgttcctggaggaggtcctctccccatatattcacgtgaaccaccagcagcaccacgtggaacctgcatgcacaattttttgaaaagaacatcagagccaacaaaagtacagataatcaattcagcagcagcatgacatgaaggaagaaaataaattagtatcaggatgtgcttaggaatgcaaccaaagaactgcttactcctttagcaaactcaacaagaatgcggcttccatcaacatccctgccatctaggttataccgcgcttcatcagcatcacggggatcactgaattcctgtttggtaaaatagatgtcgcaaaatataggactcatatgtgaacaaaatacacctcataagaacttaaaaagagagaagttacgcaataaaaaaatgagggaagtattcacatacaataaacgcgtagtcgcgcttcaactccacttcacgtattctgcaccaatggttgccaaacagtaagccatcatgactcaagtactcaaatgcatcaccgacttgcaacttccactaaaacagtcaataacattacaccaagggcacccttcaccaaagtcctcgacaaactttggaagaatggtcaccaattccggagaaaaaagaatggccaccaattccaccaagggcaccccttccaccagaccaccacagacctcccgggttgtgtaaaaaaccgaaaaaccttcaacaagatcattcaagtcaaacacacaagacctggggggtcaaacttctacagcatacttaaagaaataacagaaaatgtcacactgaatggcttgaaggaactctgtccacaaagtagctgaaaagagacggtatggtaccactgaacccaagacctgccatgagctggccaatgggaaagggtaggaaggatatggtgctttactggcctatgctgagcacaaccgaagatttgcacccacattttggaaaggtcacaattttaataggaaacagcttgatttgtttggtgaaatttgaacgtaccaacaagttgtaatgtcaactgttaagcaagcgttagcgcagcactagtgttttacacttacaccaaatgaaagtgacttatcataattttaccagaaaaatccattatacttcagaaaataagctctcttaatgcccattgttctgttcttaccttccatatctgccgaaaagatattctaggtcacgagaacgagtgcgcgaagacagtctaccaacatacaagcgtgtgcttccataatgatcatcatagcgaggcatctcctgaaaacaaaagcaaagaaacatcagtacttttcaaaatctaatgaatatgaatgactgaaaagagcatgaatacttgcgcagaaatgcattgtacagttagggaatatttttttcatgcaggaaaaacttacaaaacaaaagttcttggtaagtacaacgcacacatacagtatagacccaaatttaggggtaatcagattagaggatgaggtaagacatgattggataggccttgtcactcatagcagcatagacaatatcaacaagcatatatgcaaccactaaagttcacaaagaaccagttcagccaagtctagccagtaatcttagaactgactcgtcgtatctacatacaattctatataacttcaaagaatcaaaataatgcaattatagaatcctataggttgcatgagcatcaacatatagcagatattaaaaaccggagcccaagcaccatgtgactatacaatcacgcaggggcggatctaaagtgcgacatgggggagttcagttgaaaccccaaatcctcttcaggaacaaacaaactgttattagtactagtgataacaaggttaaggcaaagagaaacgcctccagatctagcagagaagctagggttaacgcgaattcgagaaaaagaaaaaggtgttggcagggagggatggcgaagaggatggacgctcaccagagatagaggatgcggcggaagcagcggtacgccggcgccggcgccgctgctcgctggatggagatcgccgcaggcggcgggcgggtgaactcgcgaggagacgggagagtcggtcgaggccgaggcaagagtcggaggccagttaatacgctgggattttttttgttagaataagttcaccgtaggtccctcaacttaacagcgagatttttttaaggtccctaaaccataaaaccagaaatgttcacccctaaactcactcaaaccattcacctgaggtccctcggcagtatttttgtccggttttactgatgtggcatcctagtcaacaaaaaataaaaaaataaatatgtggagcccacatgtaagtgacacaaaaaatgtgggg

SEQ ID NO: 8506 - DNA, 35329 bp, Oryza sativa
tccattataaatacaattcttatttttaaatctatgtatacaaaataatcgtatctatggaaacaggagctaagatttgagtatcaaatccaattcgacttttagagtctaactccgtggaaaattcgctagtcataattcataaataagctgacattgtttgttgagggaactgatttgatttgtctgtaatgcaggattaccagggatggattgagcgtgggctgtcaatttcacagcgagttgggaagtcatcaataatttctagactgatgctaatttgaagagcaataaagcatatccatgtattatcggcaaggaagctgcatgtgacttggttagaagatggaaaagaacaaaatagtgggttttacgttttactaagagctttatagtgatatacttaccaccatccatgccctatagtccttatgttgtaacttatgttcttctaagcaatcatgttcaacagaggtagagctcaaagggttgaatgtttggtaggtgccggtggttataggtagtggtgtagaacaatttcgctcgttcccaggggatgcgctgtcaaacccttcagtcggcttgccacccaactgttgtattttcttgtcctgtatgtgctcatggactcttagtcgtgagctcgtagcagatagttcaatcatgtttccctcgtgccaacatggcacagtacctcaaaattatttgctgtgtctttgaaattcttatggcggtattggaaggacaaatgtgggggttcggtttgtactggtttggccaaacctaagccaaactttctgcctaaggcagaaaatttgcagtcctttgttacattttacttcggattggcaggtcaacgagttgcatttttgtagtaagctacttggttaattgctgagttgtttaactgtatactagtcgtattttccaggacgaatatgcttgttaatcaatatactctctctctctctctctctctctctctctctctggacaagtggtgagtaggtgatattctctctctggctgcgctggaagaaacattccagctgccagggcatgtgcttccggactaacacgattctgcactgggatctttgttatttcatccaagttgccaaaaaatatctcaggaattaccaattccctatggttgcatgttttcagaggcgatctttgcagctccggagctacactgccatcagatgcgactgataactgtcacaagcaacttgccattttagtactgctgggtcttaacccttccggccctgttaggaatggagtagttctcctgaaatttcatattcccactctcaaaatatgttcatttttaatccatctcatatactaccaatacaaaataaaaagaactaaaatacatttactttattaaattccaatataactattctccactttatctattctcaacgcaagtttttttttactctcaccaactccgatggaatgataacaaaaaaataaacttattttgggacaaggcagatgagccaaaattgaacttagtatgggacggtaggaaattaataattttgtactgaattatcgtagacttcatatgttcgaaataagtactcccttttataaacacaagtcaacatgacaagatttggtaaatacttcctccgtactataaaaaccaacttcacgttacgtccaggttcgtaactagaagttgatttttatgggacaaagggagtagtgttgtaacgggatgaaatctgatgaagatggtttattttatctctcttctccattatttatctctggacggatcgggcgaacatggttgaaaaatttctcttctcccatatatacctcttctctcggttggttttttctaaccgttttttagcggtttttagtggaatagggtgaaaagcaaaggagaatgattatgtattactacatccgtctccaaatataacaacttttagctatgaatctgaacacagttgttgagatttatagctacaaatgcttatattttaagacagggggagtaacatggtagagatattttcttttgctatttgtttccagtgaactctcgttccctgcttgttctctgtaaactctctctctctctctcgccgattttgaagaaagaaaaaagaaacaaaaacatggtcaatggttcgttggctcatctcgacgccactaatcacacactcacacgtgacttgagttcggatcgcgtgaaacggtctccctcgccgtcgaccgatgcagcccattcgcgtgcagtttctgcgatcgtcttcatttctgagaaccgtacaccgcactgcaaaagcctgcacctttttctaccttcctttgcgctactgcgtttttagtcaagccgattccatgattccatttgcacactacaaaaatcgtctaattatatcatcagccgcgccatgggagtatgggggacgaggtcacgaggaagagaagcgcgattccctccctgcgggagcatccggaatatgccaatctctctcacctgcttttcgcctgcgaggctcgccgcttttctgctggcaaaaagcgaaccgatctcatctctcgtctcgagaccggttttctcctcgctttccaccccccctgatcatctacagttcagctgtacatttcgtggtttggtacggagagtctgtcgctggtgacgaccgcgccaacgcagaaatttacaggtgactgctactactagccaccactactagtaccacgaagcacaaatatccgggacacgtcacgtcgctgtttgataacgttaacacgagggcttcgtctgtgctggaagcggctcgctcacgcgctctaccaaacgcaaacggggcacgcggcgaccgcttcgccgccacaaccaggtagtagtgtgctcgccatcgctatcggggtggcaatttgctttgctccatcggtggagcaagcgaccgagtccgcaccgcaggggccacgaattaggcaggcaatcactcgatcggtttttgccgcgggcgcacgtccaccatggcgaagtttaggtaggagtaattggggacttggggggttttggtgttttttgtcatgctctgctgccgaacataataaggtcatcgccaactggggtttgctgccaaacttctgacctgttgatccagtaccggcggtaggattggtagtgatcactgagaggctaagctataccgttggtggtgcagtacgaccaagcacactagtactatcgtgaggcatatatacctttgctacgattacaatggggttttgctacgattacaatggggttgcaaggagaaagtggatttcgaccagatcgtatgtgttttgaggggggaaaagagctaggttttggtcctcgaaactttagcttaaaagaaaaactaaatgaagatataagtatataacattacttaaagataggtatacagcttagctataaagaataatccttttagtttagataactaataaagacgaatatcactatagatgcattttagatctcaggtatatataaacttaccctatgacaacttactattacctttgttttttaataacaccattgacttttcatataacattggtccattcgttttattaaaataaataaatttggtatacacatgtaaaagtataagttaagactatagtttctttgatgataaaataagtcacaacaaaataaatgatatttacatatttcttttttaataagatgaatgatcaaacatcacatcaaaagtgaacggtgccacacattataaaaccataggtaatttgttgcaggttatttttgactcgattagagcgaaaaattctttaaaaagacaaaaatactcctacggtcaaaagcttttgagctaagcctaaagtgaacatggaatacgatgtatgcataatttataaattttcactctaacaccatgtctgaagcatgtggtgggcattttcgtctttctcgaattcatttctctaattgagtcaaaagtgtcatttgtcgttttgtcgtgacatattttttcgatgtctatcagtaaattatataaattttaaatgttatgtagcaaaattcgcaggatacgaaggaccaaacaatgtacatttaggctgggaaggtatatacgcatgactacgtctaatctaaacagcagcattgaaaaattactccgtctagtacattatctactccagtgcctactactactactggtcaataataaataaacctaagccaaaaccagccttaaaaagccttatataattaaaaaaacaggtaaaaaggaagcgagaaagaaatctcgctctcgcctcctcgccaccgttctccgtccatccaccgagtcaccgacaggaggcgcgtctcctccctcctcacctccatctccataaacacagcaggctcacgcacacgcctccgccccggaggaaggaaggaaggaaggcaaggaagccaagcccgcgaccccgacctacccccaccaattcaaccctccctcctcagatccaccaccaccgagcgcccgcgatgacggccaagggcggcgccgcgccgtcgccgggcggcgcgggcggcctcccgaacggccgcttcttcaccgtggggctcgtcaccgcctggtactcctccaacatcggcgtcctcctcctcaacaagtacctcctcagcaactacggcttcaagtacccaatcttcctcaccatgtgccacatgtccgcctgcgccctcctctcctacgccgccatcgcctggctccgcgtcgtccccatgcagctcgtccgctcccgcgtccagctcgccaagatcgccgccctcagcctcgtcttctgcggctccgtcgtctccggcaacgtctcgctccgctacctccccgtctccttcaaccaggccgtcggcgccaccacccccttcttcaccgccgtcttcgcctacatcatgaccgtcaagagggagtcctgggtcacctacctcaccctcgtccccgtcgtcaccggcgtcatgatcgccagcggagtgagttgttgctctgcctacctctccctatctatccccttttttggtagatctggtgccgctgctgttggatctgagggggaatccggccatggctggatgatgatggggggctcagttctcgtgagatctagcagctgagaaggctaacaaacaggaggatctgtttattgtgccttatgggaatccctttattacgttagtggcttgcttcagatgatctgaagtgctgatggttccttttctactactccttatgttggaaatttgggttatgattttttttgggaccaattcattagtatttactaaattcctgacacaaatgcacccaccaatttgagaaaattgctcttttgacacatggttagattttttttcctcaccagtttgtaggggtagctgatacagctcttttcagtatccttcttgttttattggccggagcccagagcaacatccaaataattgtttgcttggtgataacccacaggccagagtcattgagggagataggttcctctgtaggtagacttgttctactgtaaaacttcaccggtgaagttgtggacgtccaagccattttttttgctctgtagtaccaaccttattggttgagttacaatgcgttgggatttgggagatatattgtgatattccagtgtaggtgatggaaatagccatcggtttcgattgccatgaaattgatacgtggaatctcgttagattgacacatgaagaattgtgttcttcaaagtgttcttgaaccttgtgacgttaattgtggtgctcttacattgagttccatgcaataggtattatgctgccagctgattagaaacaattgttgtgcttctaggcactctaataatcttaaaatcaggtaatctaagaaaataggagaatcctatatcattaattgaatgagaacaaaaaatatcacttattgtgatgggcctacatcatgaagtcatcatagattaattagagttgtcatagatgtataacaaatggcgcaagtatacaacacaatttttataacacatattatgagttgtatagcgaatacaagtttagctgcgcagttgtatggtgcctactgcttttaaattaaatacagcatccaaggctagcaaatttgtgggttggctagcagcattgcaccccatagaattgtgggaagctctgtgtaccttcttgtttaattatctgcttaagggtatacattgcttctgtcatcaactaattaatatggatcatgcaaactgaacttacagggagagcctagctttcatctgtttggattcatcatgtgcattggggccactgctgcaagggcattgaagacggtgttgcaaggaatcctcctttcatccgaggggtaaacctcttttcttttcattttatgtacagatcataactgatatgcatggtctggattcaaactattgctttcatgaaagtgatattcctgttgagtaatgtgcagattttgagggtttatctttttcagggtaaaatttgacgatgcatattctgccattttgcagggagaagcttaattctatgaatttgcttttatacatggctccaattgctgttattctcttgctccctgctaccatcttcatggaggacaacgttgttggcattacaatagaactggccaaaaaggacaccacgattgtttggttgctgctgttcaattcctgtttggcatattttgtcaatttgaccaatttcttggtgactaagcatactagtgcattgactctacaggtatggcatggagtctcactctttaattcatctcttgttactggagtagaatttagcagtgttcaagaaattgttttagatttcaaatttgttgctgacatgttagtacagtgtacccactcacttccatacatgattttagaatggcgtttgattgattggtaatacataattacacagcaatattcgcattccacagttaacaaatttagcttctataagtttaactgtagaattttgaggtggcccagggaatgacatcaaatcaaagttttaaacttatcggccagccagctactgagcttggaaatatgtttactatgtccattgatttgaactaaaagtgcttagcttagttccctcttaaaatttccgtaattccattgggttaccttaagattgttagcatattttggttctatttgtcccactgctcagttgagtaaataagttctattttaataatattgggatgtggacaagtaattcgcaaatagtagcattagtcttcagtaactagcatacagcttgacacattgttcaagttatctatcaaacctgatgagaagattgtctgttgcactgctatcattgacaatcttgtggaggactgaagcccatttgataatacaaaaggagaatgcaacttaattgacccgccaacaactattgccctattaagatagtgatatagatagtgtttactatctagtattgttattacggcactgtctaggtctctaggctacgcgttggcatctaggcaatccaggtaggatgctgcagaggcttacctctcaatggtgctttactcctctgcctgccactggccaagcccccctctatcgtgctccctctgagactccaatctatctaagtgcctgtcaggattcctcatcttgtgcctggccaagctctaggtctgagtaggcatgtgcattcttacccagtttgcttggctctgctgtagagctcccccaatctgctttgctctgcctccctcccaatccctgatttttgttgctcaccatctctgctctgctttacacttctctgcgactctgcctccttggtgccttgatggtcgacttgtacacaatgacgatcattgtatcatctgtgctattattcatattttttatgcacaaaacatgatctgttatgatttgtaaccacttgctgaaacaccactaatttgttcaagtagttgctattagatcattggttcatttatgatcatttaaccgtagcagactgaattgtaattttgtgtttataagtttttaacatccactgttgtttccaggtcctaggtaacgcgaaaggtgctgtggcagttgttgtctcaattctaatattcaggaatcccgtatctgtaaccggaatgctcggttacactcttacagttataggcgtaattctttacagtgaatccaaaaaacgcaacaagccctgaatattttagaatgccgtaaatatggctgtcctttctcattccggtggatgcccagggctaatatatgacggggaactacatcggggacaattgcaacaaatcctgcactgtatggagcctgattggatagcaaggatagaagtccaataatacatgtagtttgcccatgggatctgggaggcattttgttttgctaatggaaatgatcaatagaatattttttttttgtgtttagagaactgtggctcacgttgccaacattggttaatacggttagttcgtggaaattgtttgagtcattcatcggttattgtaagttcatgttcccccattttgttttttctctgaagattgcctgtaccaaactttgctccaggaccccctaatatattatgacagtgaatttaatcccacagtgagctgttgttacactgatgctgttctgcttcattgtagtttaccttaccttatgaaatagagtctacataaaagtaaatttactggaaacttaagattacaccatgaataggagtagctattttttttaagataataacactatggcttttactcaacgagctacaactaattattacaaagttcacacatggacaaactcagcacacactgacataatgtaaagaaaacacaaactaaaaagacaccaacactgcaacacaagataaaagaacctatatccgaaattgacaaaaaatatatatataatcgttgactcaagtttatgacatgcattttgtggttgggtccaaccccgaaactaatatgttgtcctgaatagtacatttgacattctgattttcaaggttcctccttgccttcatcttttctgccctttgcagtgtgaagctagtctatcacttgcccttctcttgatctgtctggttggggctattaacgcctctggaacaacatgtagctttagagctaaactgtcctgggactggactgactccaccacagttgtgtcctgtgctaatccatcatactctcataagatgttgtaagccctttgattcaggcaacaacattacctgggtagatggagtagaagaagcccctttctctgaaaatagaaccactgttctggccaccattgtccattatagaaccatccttaagattggatatgtcttcacccttacccttgccatgcacgttacttccatcttcctcttttccatcttccttatcacctccactgtccatgtggaggggtagctattgatggtcaaggttatatatagcgtgaacacataacgtcatcctctcaaacatgtgattttcatcgcagagtaggccaggtttacaaaatgctgataaggtaaggtaagctaatgaaaactccgtgtctactgtattggtagctatgtacgatagtggctaaatgcgcgtcaaattgcagaagagaatgagcagtagcgctatcgtattatgttcttgtggattgaggtaaacaacgtgtggaagtaggcgaagtgtcgataattcgagattttgccaattaaacgggagtaattagacgtgtggtttccagcgtctattcatttgaagtccagcaaacttgcgcatttagactctcgcggaatccatcaaaagctctgttttctctgacgataggcactaagtaccgagctgaacaatggacagtttagcaatgtagaactgataattcagtccgtgaaaataaccgcaacgtgggaaccaataattgagctcacatatgtgcaccaaacttagttgtttttttcatctaaaagaaaaacctgagttactactgcagtaaaacaaggggcataatagtttgcagagctggttgaagtgggaaccaaacaagagtcatagcgagtgatactgtagtaggagtatcatatttcatcagattcatcatatggttccagacagaattttcagagaatatatgacgagagattatgacgatttattcaggttcactgtcccctgcagcgactggactacagacacttggaaaaagaaggggtttaccattgaaaaatacgctggtaaacgagagacgaattgaatctttcttgttacagatttttgatgggcgtgcgcccccatggacgcacgagttagagcgaattaaacgaatcgaataggcagcctagtccgacaaccggacgaacccttcatgtgcagcttgttaatcgccagagcacctttggcctcctcttaattcctcgcactgtcgccgtgccccttcaactgcatcccgtcacctgctccactgcagtacatgtacatcacaaacatgcaggcaccagagttagatcggtgtactcggtagatcctgcgaactggttacatcatgtgtagctagctggagatctgcaaagctttgggcagcaaaagacagtgcacatgcgaaagctgtactaactgatggtagttaaggtgattagtagtatcttcgtagctgtctctctttgattgaagttcaagttcagattcagaaaagtttgtcgacataggtaacgggtttaactccttcctttgcaatgcaactaccgactaaaaaatgcagctacattgatcctctagtgcaattgttcatcgcaatgttcctaaacaggagtctgtccatggaattaagaacttgtagtgctcgtgaatcagtagcatgttttacctttgggaggggccatgacggtgggcttggagatgatggcgggcacggtggtgacggctgcggccgagaccggcgggaagaagtgggcggcggggacgcccaggccctgcgcgccatggtagtggtactggtagtacgggtacacgggcatcatcccgttcgccgcgagcatgcctccctgcgccgccgccgggtacgagaagtgcccctgcaggtaggccccgttcgtgccatgcgccgctgccgcctggcctagcttctgctcccgcgtcacaaagcaaaattattctcagttcatatgaaaccgtacatggctgcaaggcaacatttaggacgttttggtgcatcagggagaggagaattgggtagatcaagaaggcttaccgcgttgtagctcaggtcagcgacgtagttcggggagtacctgatcgagccaaaccaatcaatcagtgcaacgaattatcgctggtgtaacacttggttataataatagggcacctaaaagtcagatcgcgtaatcaattgacaactatgggcgctgctttaactgcgtgcgcagccgttaattttttctttttttgccctcccctgttcttctgcgttctttccctgcatcccgtgcaggccggcacgtgggcacgtgagagcacgacgaggcagctggtccggtccatgtccagcctgtgcctgcgcgctccttgtcgcgtcgcgtgcccccctagccagccactgcctcgcatgtgccccaccccatgcaccggtccccccctccgccccgtccgggcgcgcaccggacacggatcctcgtacgcgcgcgagcgcggagatactagctagcgagaagagagaattcacgcgcgccgcccctccgaaacgtcgcgccatggcggcgcaaaattctcgtccgtttttttttcttctttttttggagccgtttgggttcgaaacgttgtgcgcgcgaagagatcgagtagaattgtagtacggtagaaggggaggagagcacgtacccgtaggtggtggcggcggggtagaaggggagaacgccgtggtattgctggtggtggccgccatgggcggcgtagtgcgcggccggcggcggcggcggaggcggcgtcgtggaggggtggtagtaccacggcaccggcgacacgcccctggaccccaccgcgatggctgctcgccaaaggcatgtgatctcactcgtcagtacgaccgtggacgacgcacgttaattaacaaacagctgtaactagcgttggttaaaaactgcaccgggtgcgtacctggcgcgggctggtggtggtgaggggagggaagcgcgggggcgtgcggccccggggttgccggcggcgaggggcggaggaggtgcggcggctgggcgcgcggcttggcgccgagggacgcgaggttgcagttggcgcggcggccgttgatgaccggtgtggcgtcctcgcacgccttcttggccgcgtccgcctccttgaacgtcacctgcagccacaccaccgtaagaaaaccgaacctcgcgcacgtcgcgacacgaaagcgagaatgagagcgtggagtggtggaactgacgaatccgtagcccttggagcggccggtgagcttgtcggagatgatgacggcctcgaggatgtcgccgaagcgctcgaagtgctcgcggagcgtgtccttgtgcgtctcccacgccagtcctcccacgaacaccttggtcagtgtcgtgtcaccgaacgccgccgccggctgctgcacctgcaccacctgcggcggcggcggtgtctgctgcggctgcccgcccatcatcgtcatctctcttcgtggccggggccgcgcgcgcctagctacctagctaccgaccacctcaacgacaccacgccgagctgagacgacccgctagctgcgacgtgcgttcgtgcgcggtgatatgcgaagggggaggcgagcgagagcgagctatgtggtgcgctactgcggctgcttatatagaccggagtttataaattcttggggggaaggagggagagtggtggttgggtgggctggataacggaaacaggagagctgctactactagcctgtcgcactgctcctctagcctggcaactctgtcctgtgcctcacttggcctctctctctctctcctctccgactagtgtaactaacagaaaattcctgcaggctgcaacacacattcactctccggctaagatctctacacaccactctgattattctgcgtagtcaggtttcggacacaaatgaaataaccaattttataactcgactaaaaacttgcgagacgaatcttttaagcctaattaaaccgtcattagcatggtagcatttatggttaattatgaactaattaagctcaaaagattcgtctcgcgattttcatgtaaactgtgcaattagtttttattttatctatttttaatattttatacatgtgtcaaaagatttgatgtgatgtttttggaaaataaaattaggaactaaaccccgccttagtaaccaaaattaatcttcctgaagaagagttgtctttggggtggtttaattaatttgacagttcatattggtagtaactcgcgtgtgtccgtacaatgtattaggctgtgagatgattcgattacaagtttatttacctggctggagaaaacgagagatggacgagtggccatatggggagctgtacgagaagatggaaccagctggctttgcagtttcgcctttaccacacaacgtgctcgcgcctttgatttgcttagctagctcgctcgctcgctctcagctgcgtgatcatgttgccctatatattactgtagtctttagctgtttttaattaagaaccatgttaatcttgacgattgatcagggcgattgtgattctcagaaaagaagcttttcctgtttcctttcctcgtattgtatagtagtgctgtttagggttgcaaatcaggcactggggaatgcatacagttgctgcatgtgagtgtatttttaagttgacagaaaatacagtcatacggtacacctgaaaacacatctaaagctagctagctagcacgtgagggtatccggtagggatcgtcattttgctggcaggaaaacataagactcagaccccaaaagtatatatacactagatgcagagtatactattcctatattactagtactcctaactgctactcatcgtaacaaaaacaacgtccctgccgccccttatccagttgttgtctcacgtaaaatctgcttctaacctaagatgaagcagatcgatcgactgagggtattgcacattaaacctacaagctagggctacaaattccctcacatacacatcattgtgttccataaagagcagcacgacggcatgggcaaactgagactgtgaccccaacccaaatataatggacgcggcatttgcacggaggggatcgggcagatctcgcgttaattcgccggcatcgcaaaaccaaagcatacactcgcagtgtagcagtatttccggtgacgtacgccaccgcgggaccggcggactatgcgccgcggtcccgcccggctccctccctcccctcacgtgaggaggggccgcgcgcccctgcgcccgcacggcgcgacgagctagcgactgcacgcatgcgcccgatcgatcgcgcgatcccggtgggttggtgtctcggcgatgatgagtgggcgacccatgcatcgccagtttaatttgccacttgctccccggccacccagcccgcgagccccgcgaccgatcgatcgggagatgggatgggagaacgtacgtctctcctctttttgctcgtgaaacaccatgatttcgccgcggaatcgcgtagaggcgcagtcagccgcgcgcgcacacctccggctgcatgcgcgccttgctggatcggtcgatcggcagatctagtgtccggtcagtcgcctgcggcattgccttgggtagaactggaactttgttcggagatactaggaggcatgcacatggatatggtgtactggggggacgatccgacgatgacgagatgcgtacgtgtgtgtccctgagatcccacggagaaggtagaaaaagagtgacttgaaacctggcgagtactcctcatgtgagacacagctagaaatggaaggacatgtacgagtaagtgactgtttcacgtactatactgatcccgcaatcgagcaatattcttgtccatcttcatcagggtgctttactagtgtttgagaagtgcttcgaacatcacgtctaccgatactcaaaagcgaaaggcagaaatagatagacgtacggatgcaaatatctatactcgtggacagagagaatctatatgacgcccggcctgtacatgctcgtccgctggctgatctcgctgttccaaacaaaaggtctagcaaagcattttccatcatctgcgtcagctataccacattattctaaccattccccatatagagtagccgcgaccaacccaaacccacagtccagaagcgtcagtctagccagcgtccttaaaatagcgagtccctcgttagtcgtcagagcgctaatcatgcagtttgcatgcaccgtatacaggggcggatccacagtacatttactggggtcatctgaccccgatgacatccagctatctaaggtaatgtcttatattttgccacatgtgaccccattagctaaagactaatgaccccagccaatcacttcagctctcacgctctcacagggcagtaaaacagtttacttgtttcactgcctcctaccaagcccattaaagtcaactttgtttggttgatatactttggtctaataagcatttactatagttctgatctttgcatgaggaaacgaaaacctctcttatcatagtctaattagcattacaaataaacaaatacctttatacaaaaaaaaacgattgtagattatataatgtatacatgtttaactaatgtgcctaagtagaaaagaagttaacttttttaaaatacaaccatttctcaaccatatatatccatattggagttgtatataacaaataaatatgtgatgttataatctatgctcacagatagggatgtaaatggagcagacaagcgggtttttcttacttgcttatcacacttctagtttattttttctacaaaattttgtactgaaataaactagcaaatgaatatttatgcggatagtgagactacccactttgcatccctacaaatagaccccggcatgtacgtctctccgtcggcgctgaataaaacgaacggttaaatatgtttgaaaaatttaatggcgtcaaatatttaaggacggagggattagtacattggtgactccggtggttcagctccgcccccgaccgtataccatatcgatgagtacagtcacacacatcgatcgtcacatgcccgtcgagcccacccgtaccatcgagcatcgaccagcgcagcgattaccggtgcgcgacactgtttccgctgtcctcgattcagcggtggcagctacgaccagatcgtcgtacgagaccctgacgccgcacgtacacgtttccgatggtggcagcaattaacggcgccgcgccgcgacacgacgaagaggcagcctcgcgcccgcagtgcagcaggacgtacgcgctcatgctgtcatgcatactgtcatacgcgcgcgcgcgcacacgcgagtctccgatgaggcgagacgacggtcggatctcgcggtggatacgagctgatgcatggggccgggccggagcacaccgcatgcaagacggcagaggaggggcgcaggcacatgcgcccacgtcagaacagcgagaatctccctcctcctctcctcacccactgcaccagctgctgcctcgctgcgtgcccgtaacgtggacaactgttactcctgtctacatgcccggatgccacacacgcattacacaggctcacgccgcattgcactgccacggtatgagagagagaatttagtcttggtttgactggaccgagaggaggggagaagactagtagcaagtagcaagggacaagagtgggctgggagttagctgtaagaccagaagagtgagctggcttgcatgcctctcaaaggggcaaaggggggagaaaaaggatggagaaaacaaccgcggtgtaatcatcatcagatgcaatatggggttagaaaggctggccgggttttgcagagagccagcagcaggtgggcatattggcagtgctggtttggggttggctttgtttttctagatcggattagattagacggacagttgatggcccatgcatgttgtcatctgggcagccttttctcatctttatttttttattgctttgcccttttcatcaaatcgctctcagttactaactgctaagcaaccttatggatgaatgtcagctactccagacagacaaaagattggcatttctgaattccaaacatgtatagcagttgatactagctccaaactgaacattatgtttagtcaaatttgatcctctagactgcagccggttctcactcatcagtatacttttcctagtcaaattatgttcagtgcacctagctagcttgaggagcaagggtggacggatgtgtgtcacgcacccgagaatgtgttaaatatgatgatccccatggccatgggcaccgcacacgacgcaatgttctgtccacctttttaatccccatgacaccaggtggtgcacatgtgtgggcgagctggccggccggcagcacgcaggcataatgcgggtagggagagagatcgagtcgactggcgatttcagcgtcgacgatctgtcaccgcttagcttcgattcccctcctctttcatctccgcatgtcgcgcatgtctgcgagaccgtgactatctgcgtgtgtgtgttgaatgaaaatcatggactcatgcaggcagccatgttggatttgagcgtcgatttgaggccacccacctaggttagtacccgctgccacgttcgatcctgtacttcctgcacgctcctaaccgggagagagaaaaaaaactagagaagaataaataagcagtagtatagtacgacatgtctgcgtgcacgttcatggcagagagcttagaacgacagcttgagagagaagagaagagaagtagaaaacagctagtgcctggcagcctcttgtgtgtttgcgttattttctcgccacttgctcgcgtcaatttgttcaccgctttaatttcgtgggtgaaatgatgaacatcggcgtcgtagatcgatccagcgtgagagatttatcctggtctgttacaataatatcaggatttttatctgtaatgctgcagtggtaccgattatatatggtccaaaaactctgagctgatcgatgcgtcccaattgcactcggagcatgtacctgtacgtaccaacagtgtgttgtcagttcgactggaagccagcaaggccggtgggagaacagtggaacacgaccaaaagggaccaacttgatcgacgacgtaagcaaggccccggcctgtctgcctgatagatggctcgctccctagtccctactgtgcgttctaataattgggcttagatcgatcgatcgatgagagagaccccggccggccgctcgcgtcagcatgtatgcatgatatgcaccaatatgcaccgcacggctgtaaacagaggcttcttgcgtgcgtgagcgacgcgatggtacaggccagctagaggaattagcggcagcaccgtacatgccaccgtcgcctctcgcctaatcgccttcgagatcacggcgtggctagcggctagaaaattggctggaaactagtccgctagctagcttatcagaccacagatgcgcgatccgggtgctcggctaggacaggctgttcgatcgattcgtcgcgtggatggatggagccatgcattgaggaggaataaccgaggtggtgctctgaattgttagtcgcgtgctcgacgcggcgccgagattgcggctcagagctgagaattgctcggggagataagcaggcagggtgggctgccgcctgccggtgaacggagctccgccggtgtgcgatttagatccgaagctttccgatgtcgatcgaataacaagattgtagtgtgtcggtcgttatgattgaattatttctccccattaaggtcctaatttgattccggttcgtacaatacaaagcacgcagttgggctgaattagtaactaactgggtggcccgcacaattgtgcggctagcacccaaataaaatcatatattttttagtatgattttacttaaaatttattaaatagctatctcatgtcttaagagtttgaaagattaaaccttatcatccccgtgtttctaattatatatattttttaaaagtcacaccagttgctaccccttatgacatctgcttctttatttgcttgctcgatctaccactatttctattcattctccttgaaacctttaaaaattggatcttatagtttttagagtttattgtcacgttgggtttcgtttttataatttctagatgcctcgtcaaacgttgtcattatactcctctatggcccgtccactgtctcttttcttaattgtcactgagattttaaaaatcgaacataattatcgtttcggttcatttttactttctagaaatcccgccaaaccgtcagcggctttgacattgtacttctctacggctcgcccactgcgtcccttctttattgtcattgagattttaaaatcgaacatgattatcattgtttttttactttttcaaagttcggaacctttaaaaattaaaccttgtagtttttagagtttattgtctcgttgggtttcattttttataattttttagaagcctcgtcaaacgatgccactatgctcctctatagcccgtccgccgcctactctttctttattatcattgtgattctaaaaattgagcataactatcgctagaattcattttttattttctagaaatcacgtcaaacatcagcggctctgaaactatactactatacaccccgcccactacttctcctttttattgtcattgagattttaaaaattgaatatgattgtcaatggggtttatttttttttactttctagtagtcccggtaattgcattgctcgtttgcttcacggcctgcctgtcgtccctccttttaatcgtcattgggattctatttggtgttttattaacagtttttatatgtcgtatcaaccgccaccactctactcctttaaaggcctgttacttaatttatctcgtcatgtgttttagatggtcttttctttcaatagtctttatttttatcacaagttttagttatttataaattgtattcctaattgaaatcttatttttctttttctaatttcagaatttattttttttttcaaattttaattaatatcgtattgtgttcttttaatatttttattttttatttttaatttcagttgtttcaaaattgtattcctacttgaattctcttttaatttttctaattttgaatattattttattttttattcttaattttaattaatctcgtattggattcttatatggattcttatttgaatattgcttatttttaattccaaatttcagctaattttaaattgtattcctacttgaactcttttttttttgctaatttcagattttattttttttattccaaattttaattaatctcgtaattgggttcttatatggactctttttttaatattccttattttaattctgattttcagctattttaaaattgtattcctacttggactatccttttcttttctaatttttattttattttatttttattttgaatttttattaatctcgtattgggttcttatatggaaacttctttcaatattgcttatttttatttccgaatttcagctattttaaaattgtatttctacttgggtctcttttttttctttctaattttggattttattttatttttatttcgaattttgattaatcttgtattggattattatatggaaacttctttcaatattacttatttttaattccgaatttcagctatttttagattgtatttctacttggactctccttttcttttttttctttttctccgattaatgtggaaatttctagcccccacagtgaacgtggtgccttctttcaaagctgtattttattataaattaaattttagttgttaaaaataatatcattggatattcatttaaatttaattttatataattatgattttgttgctacaatgaaaaatttaaagttaaagtttagtttttaagactgtactaaatttggacacgccttagcgagttggacggagagatgtatctctaccaatgcataagttttctggtctatttactctttttttttcatccataggtaaaaaaaatatcacattttaattctaattataccggctccaaaatatatatgcacgcactgtgtttgaatcctaatcacctgatctgttgattgatccttagtatccatataggataaggaaagaatcaaagcaggagtacgtccacctatttggacttgtattctattacttaatcagtgttgtccgtttgatctagcagttgttttctattcagacttctattatcaaagttaatctacaccatcaaagtttagtcccagtataatctaatagtatagatttttcttttttctccgattaacgtgggaatttctagcccccacagcgaacatggtgcctcatttcaaagctgttttaataatataatagatagatagatagatagatagatagatggatggatggatggttctcacagaacacgggccggtggtgtacactcgtttaggcccaaaacaggcttccaagcaggcctggtagggtcggacgtgagtcgtggcacaaccttctaaaactaacgcgcacctgacttctacgaatgtagggcctgttcacttttataccattttcaatcttactaaattttaataaaattgttaaaaaaatggctatatttaatttgctgccaaattttaataactatataagaaatcctataaaaattttggcaagccaaaatttgataatgttttttttcatcaaagtgaacaggccctttaactcctatgagtatttgttacatttctgtttataaatggatcatttttcatttgtcacttttacgtttatttatattgcctaaaagagatttgtaactacatttcgcgaacgtgaaaaaagagacaaatttttctataggacatcgcgacttcgtggtattagctgtgggacaccgcacaaagttatttttggaggaagacactcttaaaatgtggtaattttctagtggacaccgcactcattaaaataataatttccgatagaaggggagaaaaaaatcatgtgaaatgtcataaatacccctaggcccacttgttatattcttccccgaactccctctcacaatcctgcatatcctccggtcaccgacgtcatggacggcgcctcttctccatcaagcagctcaactcgttcggcgccacggccgtgctcgtcttttccagcatccagctccgcgctgccgtcggggagaagacgtcgtcgccgacaccgctccatctccacccccaccgaactgttgctccgctcggcgcttgccggagccgagccgcgccgctgccttccccaccgccagccgtctcccctcgacggtcgccgcggcggccatggcggcgacggacagcgtcatgccggcaccgatgcgctgcatctcggtcagccccctcttgttgctggtgagccgccgcaccgcgggcactaccgcggcatcgtagagcggcacgaggatgagcatggcggcggcgtagacagagtggagcgacgccgccgggatggcaaacgcgccagctccgaacccgaggcggcggcgcatggcgcggccctgcaccgtgaagagcggctgctggacgagcaccatgcagtagacgatcccggtggccctggtccacaccggcagcatccgcacgatcaccttcagctcatccacctgcgtcactgtgcacagcctccacggctgcgccgctgccgccgcagcctcgcccccccccccaccaacgatgacaccgccaccgccgccgcagcctcgccgcgttgtccaagaacctgaactggtcggtgtgcgccagcttctgcccgcactttggcggaccgtcgtagaggacgaagctgtcgtgaggcagcgcgacgttcctcttactgatggcggcgacgacgacctggcaagctcgcaccacagttctgccatgaggctggtgcctggtggtacctgtacatggcggagccgaggaggaagctggccatggcgaggacggtgcagagagccgggacgccgaagccgacgagccagccgaagttgtcctgcagccacaccatggcggagccggagacgagggcgccgacgaggaagcgaaggcggcgaggaggaggaagcaggccacggccagcgccgccgcgaaggacttgccgcgccacctgccatggttgggtgagagataagagatgggagagctgacaactgggtccaggggtatttttgacatttcacgtgatttctctcttccctcctaccggaaattattattttaatgggtgcggtgtccgctagcaaattaccacattttgagagtgtcttcctccaaaagtgactttgtgcggtgtcctatgcctaaaaccgcaaagtcactgtgtcctgtagcaaaatttgccaaaaaaaatatatatgtcaatacattagaagagcatagttaaaacaattatgttttcttaactactccctccgttccaaaatataacaacttttggatagataagatatatcatcatactatgaatcgagacatgcaagcgagctcactagtcaatcttacgtatatgggtaagtatacattatacctatgagagacgaaattcctccatcttcaaataaatcaattacaggctatgaatctgaataacttgtaattgttttattttgagatggatgatatacacagtattgtggcagtacaactcgcagggcacgacaccatccctacctcctgtttgggggagtttttggcagtggcatcttatagaatcttcagttgtcagaagctttgtcaaatagttcatattttcacttaaattctataaaattgtagttgtgtaatttagaaaacaaactagaagacaaaaactggattttccagcttttccatatatattctcaccagctgtttctcgaaaccttaatctctcaaaaaaaaaaaaaagatcttagtcacgacatagatggtcgtgactcagcaagggtgagattaatacgcatatatcttggccgatatatggttttaggccccgttcgatctctctttgggagatagtttttttttcacgcaaaacaagaaatatcattagcatatgattaattaaatattaactattataaatttaaaaaatggatttatttgctttcttaaaacaactttctatatcgaattttttttaaaaacacaccatttaacatattaaaaaaacgtgcaaatgaaaaaacgagaaagttagaatttggagttgaagaatataactgagcctaagtaccattcaactcaagtacggatgcaggctgcttgtagatacacatatagatatagtgcgtgtctctgcttccttgttaaaatcgtggtgtatggtatcgtcacatatgctaccacgttttaaaatataatatttttaacgctcaaaattaattttaagtatggggttgatcggaagtgctggctgtcagtcagccccaatccaaaccaaagagtatttgctgcagctgtgaatgggcagccaacacaaccgatcaagcactatagctatatctccatctagtctttccaaatttatttaagataataataacaattacatctcggtcactgttaaacagcacacattcaacgagccaaagaaaaaaaaacaaaaatatttgagattatatgacaaatccctgtccccctcccaatgacatccaactaaaataccgaatagaggacatgtaacatttataacaatgctggagattattactccctccgtccccataatacaagggattttgagcttttgcttgaactgtttaacgactcgtcttattaaaaaattttggaattattatttattttttatgacttaatttattatctaaagtactttttattttcctatatttgcataaattttttaaataagacgagtggtcaaacagttcaaataaaaactcaaaacagttcaaataaaaactcaaaatcgcttgtattatgggacggagggagtacctttactcccaaccgcagatgcgtttcaggcaacccaatcctcagtagatgaaaaaggaaaaagaaaaacaaaacaggcaataactaaagtgaaaaaaaaaaacaaagcaaaagtatgtgactcgatgagacgaggggtccaaatcccaggaacatcttcgagaaagcacaagctcgacgccggctaaacccgcggaaatccccttccgctttgtctcgtttcctcctcctgccccctcggcactgcaccgccgcagcttccaccatggccgtcgccagcgaggccgcttgtcgtcgggcggctagctgcttctttgaggtcggcaggcaagagatcggctcctccaccccgcgcgcctcctcgcgccgaatcagcggctccgaggtgcccctttctcggtttttaatcccatatgatcctggtgtctgatttcttggaaccttctaggtgttgatcttgtagagttcgcaagtcactaaggaagtaataaggccgcgtatttttgcccgtaagggaggatggatcatgatggccgtattcgtgaatcgtgaagtactatttgatactacttgttcttgttcgtaacagttcagtttgcataggcattatggagttaatgctgtaaaattcatatcttacgactttatgagtccgccgatacgaattgagtactgtcagggtccatggattaggcacacttaaattgataatattgtttggataaattttgattatactaccgtttcatttgtttgtaacttgtagaacattttctggatgtttcattgaagtctgatcatactagtttattgtgattgttattgttgttcaagaatgtgtatatgtatgattggagtacttcctgagataaattactaaagtcatgtgacaacctttctgatttttttttttttgtaattgcttctttctataacaccgaatatctcattgtcatgttggactagttacaattcttctttcctccaattgtttagggcctagtgatgcggatgcatcagtatggaaagttgcgaggccatgatggttgtgttaatactgtcagcttcaatcctgctggtaacctccttgtgtctggttcggacgacatggacatcatattatgggattggcttgctaaaacacaaaggctcatttacccttctggccatcaagaaaatgttttccatgctcgtgtaatgccatttacagatgatagcgccattgtaactgttgctgctgatggtcaggtttgtatctatcaacatctgagttgtgttctaatagtaatactaatttaataccaccatgttattcgcaattattcccataagcatgttgtgcggttacttttgtgttctccacaagtcgtagcaatcagcttcatgttgcatggaacattataataattgtattcgtttactggtacatgcactatttggaaagagacttagatctctgaattgcatgcaattactaagagaaagactaggtttttttttgcgtataacatagtaagtttgcaacaaaaaaaaccatagatatatctaacccttttacttgtagtttattttcttattttgtttgcaatggatgtagttttgaagtaaacctatatctctgtttttacacttgttggttatattggaaatgacttctctaccaatcaactgaaaatattagtagataaagtgataaacacattagcatattttacttttctgttatttgcaatccgatataatttttgataacatgccatatacccaggttagagtgggacaactgaacgagggtggtgaagtcacaaccaaacaaattggggtgcacgatgatcgtgcacataagttggccattgaaccaggaagtccttacatattttacagttgcggggaagatggtttggtacaacatgtatgtcactcaaaacaattttctgcaattgtggcaactgttttgtgatagcatgtacattgaacatttatttctttacagtttgacttgcggaatgattcaccaatgaagctcttcagctgctattcattctcaaatagcaggcgtcgtgtaaggcttaataccattgccattgacccttggaaccctaattatctttcaattggtggttctgatgagtatgtgcgggtatatgatttgaggagaatccagttgggtgcttcaaatgacatgaaccaacctgtagataccttctgccctaagcaccttatgggtgggaaggtccacataactggtattgcatactcctacgcaagggagatacttgtctcttacaatgatgaacatatctatttattccaaaacaatatgggtcttggtccaaatcctgaatcagcgcaagcagagttcttggacaggcttgagcagccacaggcatacacaggccacagaaatttccgaactgttaagggagtcagtttttttggaccgaacgatgaatatgtcttgagtggatcggattgtgggaatgtatttgtatggagaaagaagggaggtgaactattgaggatgatgcatggtgacaaaagtgtagttaattgcattgaaccccatccacattttccgttcctagctactagtgggattgacaaaactgtcaagatttggacaccttcagcaaataaagtgatgtcgctgcctaaaaacgcaaagcaagtaagttgtattgacataagtaatgttggacttgtatttatccatttccttttttttatgttttacgttatttttattttgtcccttaatagataatagcttccaacaagcgggcgagagaaattgatgcatctcgaccggagctgacgctttcatccgacctcatcatgcatgttttgaggttgcagaggagacagtctgaattgtacagggagcatgaaccagctactgcagatttggcaagtgatgatgatgagtctttcttcgctgggtttgatgatgccaataggaatgtaagatctaactctgatccaagggaatgcattgtgacatgaaaggaactgaagatttacagcctgccccttatacttttagcctgcagcctgatgccctgatataccatgctatgctgcatatgcagggcttagcaaacgatgcaacaagaggaacacagatactcatgatacgtgccggcaagattaaacggttaggacttaagagtgtgacgacctaccttgatagtgttgtaaaccaggagtgttactgggtgttttcatctcatgtacttagtctagtattagtaaaaaataatcactttgctggcaaggaaatgcgcatgtaattatggagtactccgtatatttgagaatttctatggcgatgctaagcgtgcaacattcacagaggtttcccttgtcgcggaaaccagctgcctcagactcttatcgtatgcatgtatactgaatgcttatcgtgttggctcctgtttcgacgtttgattttgatcactcgtccatcttcgtgttccacgtgagcatttgcaaactggaatcaaatttcccctgtatccttgtggtatacgcctctcagaagtgaacgtctgggacagacctgtgcccgtgttgttcttatttcgacgttgacaatagaatcgagaaacctgtcgtgcgaatactgtggttaaacctgatatataataggcaaattttactatagtacactgaaattgtgttgttttaggtctaagacaccgcaaaaactaacttttgggagaaaacactttataatcgtggtattttgccattggacaccgagccgactaaaacaataatttccatgtgcccacatggcagtgactttagcatgaggaggagcagaggcagcggcggtcgacgagcttgtcgctggcaccggcggtgaacgaaggggtttcgcgaggtgcggccaaaagaggatttgtagagtggagaattgcaaagctaatggtggtggtctcgtgcacagtagtgaccaaaatcagtgtcagcggcggtgcgagcggcggtgagctttggcatgctagtgcatgtcgagatctagcttgttttagtgcaaacccgtgcatgcatatgtgcctacatggtgcttggatactcacctgatgtcgtgcgcgggctggcgaagattggacaacagcggcgacgggagtaatggctccggcaccggcagaaatgacagaacgacgtcgatagcgataagcggcccaaggtctaccaaggaagcgtgcgcacaagattagtagagctagtaggaaggctcacgcccaaggaattggacggaatcagaaaggggaatcggaatcggaaaggggaagcggcggccaaaggtgaggaagacgatgtcaatctcccacctcggtgcatgattcttggggatttttgggggtcttcgagagaaagctgtggtggtcacgatggcatggtggcccggtctggggtggttcacaacggccggaaacagcggcaacatcatggtggtagcgctcggtgcgtgctctagagccgacaatggcatggcggcattctcatcgctgcagtagatgaaataagacggtatcaaaagaagaattgtttggcatgatgaggagaatagggaatgcataagagatggggatggcgacggcttggcgatgaatgaggacgtcatcttcttcgctgcagattttagctgctccttccaccaacggagctgccgagcgcacgaagtagccacggcagcacccccgccgtcacctgcagcgtgccctcaactcgaacctcagcagccgcggcgaggctgcaacgtgacgccggccaggttccccatatcgtttggcccggggttaccaccaccccgtggcagcgcggctaccacggttttcacgcgataaccacgaaaaaccgcacaaaaatcgtattaaaaaaataacagttttgcggttttaccgtggttaccgcgcagtatacaacgataaccgcactttatcgccgacaatgaagaatacaaattggaaaaaaaatcaaaaaatacggttaaatatgtgtagaaattagagataattggaagaatatataggatacttagaaatctaacttttaagtgttaaattaaaaaattaggcatgacccattatcattaaaaataaatttacatcactagacataaatatatataacacccaataaataacatcactagacatggagagaggactcgagagatattttctccactaaagggccttaatggccgcatgaacaatccgagatcaggcccattccatttcttctttttttttctattttctaattgacattcggtttagccctcaaatttgaatttatcgaactctttttcaaaaaacttcttcaccatatgacactacaattcaagagctacattcatgttttttttctaatttgttttgattttttttagaaaatttaaatttgctcaaaattcatcaaaccctaatagccgataaccgatctcatagtgtggttactgcacgataacgtgaaccctgacgccagcgtgcgccgcaacgcggcagagcagagtagggaggggatgaggtcccataggtatttcggtcacaccgcgtaaaaaatgggacccctagcgcctcgtcaacacaaaattatattttagtcggcgcggtgcccactatcaaaataccactattatgaagtgttttcctctaaaggttggtttatgaagtgttttcctctaaaagttagttttttcggtgtcttacgattaataccacacaatttcagtatcttttagcaagatttgccaatgtaataacaggtcggttttgtccggagccggattcaaagtctcaaagatcgtgaatccaaaatggataatgccaaatgtcacctgcaagatcatctccaaggatttgctgatgcggttttgggtaatgggtttggcttcccagaaaaaacccatgatcatctcccaagaagtggctatataccagctaaaattaatactcgtcggttgctggcgacgtgccagttgccacaacgccgcggcctccccgatggcatccaacaaggtttggcaaaggcgtacacggcgttctgggtgggcaccgccgtgggtgaaatacgttgccgccttgccgcgtggatcacatgaacgaccgaacaaatcgaaccatgggcaaatgcagcatcgcagtaacaaatgcacaatcaggactgcactagggagaatggatcttctctctctcagtgacctctaggagagggtgaagggcttggagccgcagggctaatggcgtccagccacgtatagcgtgcgtcaggttggtgctaagttcgtctttggtatgtaagcccgtggtgcgtgtttttgtctcttttttctagctataatcttgacgtgttttcctttcttttttctagctataatcttttaggattgtaatttgtgatttcttattagtacgtataaaacttcacatcgtttggtaccgtttggtgtgtgtgtgtattgtttcttttaaaaaaaatgataacaatgctagtaccttagataagagttctcaaaaaagtatcttagataagagaaacaagcaacatgacacccaattacagtctctaaaatagcataaagactctcatcacaagacgtcaagaccctaatctcatcgcataaatcacattttcacacatacaaatgtactcttaacaccacagcacagcatcagttgctattgcaccgttgcacgatcgctcgatcacccgacgctggctctgctcgaactctttcgatcaggccaccagcacatacaccgcgtagatgatccccgggatgtatcccagtatggtcagcaagagatcgatccagaactcaatctgcaaacagtaccccaaatcagaaacaggatccaaatcaaacggcatcaaacacacacacaagcacatactgcaacaagaactatatcagttaagaattaagtgtgcctcgcatgcaacttacacccaagccgtagcgcaggaagacgccgaccggcggcaggaagatggctaggagcacctccaggaacgtcgccgacgccattctccctcttctcagaatttcttgtcaggcagaaggctctctctcctcttctcagacctctctctctccctcactgacgaaatggctggaactgaggccgatccacgagaccacacgtccgtttatatcctgtatttttcagtaaccatgcggttctggagatcgggcgtacgtgtcaggcgatggcatgaggccgtcgcggttgcacgccacgcatggcggttcgttgcgtactgaagtggattactctatctagtacttaaattctggggcttctggctttccagcgtcgttttctcccggtggctggtgagttgtttggagaaaagaactaaagaaggcaatggctatctgccttttggcttgccctgcttgtttgcacctgtactgtgtatcttcgaggctcttttgtgatgcgtgttgatgatggtagatacgaccatgctgcatggacactgggcaccagttgtcagtttgttttctttatcataacaacgtgtggtagaagttgaactaatgactcggataaattggcttttgttacgcgggtgttcggacttcggagtttgcgtgtacaagtgtactccccaggtaaaaaaaaaaaaaaaaaagacaaaccctagtttctatgtttgaccgtccgtcttatttgaaaaaattataaaaaaaattaaaaagaaaagtcacgcataaagtattaatcatgttttatcatctaacaacaatgaaaatactaattataaaaaaatctattatattattaaaggaatagaaaaaggagcctccgcgttcgctctcatggcctagaaattctcacattaatcggagagaaaaagaaaagacagagtccatatagaaatacaatttagaaatagttgaaattcgaaattaaaaaaaataaggaatattagaagaggagactagagtccatatagaaatacaatttagaaatagttgaaattcggaattaaaaaataaggaatattagaagaggaggctaggaaaaaaataaaatagaaattcggaattaaaaaataagaaatattagaagtagagtatagagtccatataggaatttaaaactaactaaaatttggaataaacataataaaattaaaagtagagtttagagtccatataaaaatataatttataaataaaaaaaatcaaaattaagaaaaacatgggaagaagagtttaaggtcaatataggaatacaatttagaagtaactgaaattcgaaattaaaagttaaagaatattgaaagatgagtttagagtccacgtagaaatacaattagaaataataaaaaaatcataaataaaaataaataatattagaagaagagcatagagtctatatagaaatacaatttacagaaaattcggaattaaaaaaatatattaaaagacgagtctagagtccatatagaaatatatataatttacaaataactaaaatttgatattaaaaataattaataactaacacgtatataaaatataatataaaaattcagaaataaaaatatataatattggaagaagagcatagagtatgtatagaaatacaacttacagaaaattcggaattaaaaaaatattataagacgagtctagagtccatataggaatatatataatttacaaataactaaaatctgatattaaaaataattaataattaacacgtatataaaatataatatgaatattacacattagtagttttgtaaagttattacaaaatttaaaattatattgtcattttaatatatttgaataatataatgagaaaacatatatacaattatatgagagaaaatataatgatgctagccgcgcaatctgcgcgagccaccatactagtttcatataagacgatagtcaaacgttggcacggaaatctaaagtttgtcttttttggggacggagggagtaaccctcagctagcacgttaatcaggactacagcaagttcatgaaagaaaggttttcagttcatgacagttctacaaaaggttttccgttcatgacagagagaaatatctgagtaaaacgtactggtttccttgttttgctccttgatctgaagtctgaaagatcgggcgaaatataattgtagtactacggaaaaccttaccgagtctctaatgacagtagtcagtaggaggttttttttccccgtttgggatttgagatgattcacagtacaagcttgatgcgaacgaccgtgggtcatcggtggcgcaggtaggccgtgggtgctcagactgcacaagattggcatccggtagtttgtaacgggccggccaaattttaaacaaaggttgtgtatttggcggtggaataagttcacctttgaatctttgatcactcagcttgacgttgagtttttattacaacattgaactgcaattacagatataatacgtccctcaaatctcaaaatcattgcaaacaagattcctatacagtttttactgatgtggctgattcgagttagtcgtcgtcctacgtggtgttgacatggcactagaagcaagattttaaaaatataaaaagttagtcaaacaaaaaaaaaataaaaatagtggaacccacgtcgatgagtcccactctcctctctacctctcacacgaagacgggaagccgcagtgcgagggtgcggtgtcggccagtgcaccgcccaccttcgtcttgaagcagcgttggtgacgagctgtcgtgggaggaggcgtccgagatgaactatcattgtcatgccacgacatccgagatgagctatcattgttgtgctcctccccctagtcactaggttctgcttaggtgggcgatagccaccttcgccctgtgcacagaggaggagaagtggatgaggtgtcgatggtggagagaggcaagaagagatgtagggacgagatgatggggagaagtc

SEQ ID NO: 8507 - DNA, 8782 bp, Oryza sativa
caaatcctgtataatgactaatcctgctttgatctaatggaaagctaccattatcctaaagaatgcctatacagtagcatctacaatatggctcaacatagtgcgcaataaaattaaggcactttagattctcccgttcctaggcagatcttttatctgcatgatggtagctaatcctaacagaccgatgctcaatcaaatctccgcttggaatttaacacaaacactcagcatgtgaattcaacaaatgttaggaataaaacaggaacagagaatacatgaaacagtaacaacactcagctaaccaattgaatttcgtatacatggcagaaatgaacataattaagcaaccgacaagatctacgttcagtaaaaacacacaccaaacaccagaaatggtatattcatggcacactaattataagtgccatcaaatgctagagattaactagatggagtctagaactcaagatgttagctatctcatcagttttctgcttgaaatgcacaataagcttctggtcaacatcacccgtactgatgctatcctagatttacacaataagcattcttcattcacatttagtcaaaagttctaatttagttccacacaattctctacaaaatcagttctgtgcagctgctatttgtaatcaatacatctgctatcctccccttctcttgtcaccagttggatcagagttaattgaaagtaagctaagaatccagaacaactagtagttattttgccacaagcgtaaaactccaccatcccatcccgcgtgtacagtttgcatagatcaatcagttcatctacaccagcggcagcgtctattcaatcaatagaaccctaaaccaaaaaaacaaaacgccccctaaaaaaaaatcgacagccatatctaggtcacgcagcgggggagccaaggggggatagataatccgcgattaccgtctccgggagcggcgcggggctcccgtcgtcgccggcgccccccttgtcggacccttccatccccttccgctcctcctcccgctgcttcccctccggctgcctcgcgtccgctgggcccgtcggcggcggcggcggctgctgctgcttccgctttccacggcctcggcgcgctggcatgcttcagcggcgcacgcccatcggctcgccgggggatcgaggcgatcggccgcgctggggctagggcttggcctccgcgccggcggcgacgggtggggggtgagccggcggcggtgacgacgacgagacgggaggagggggagattgcgaggtagggcgcgtggtgaaaaaaatcctggtaccacagccgtgttgtgtagtaagtggggattacgccgccgactcgagcttacgtactgtgtagaatacgccttctctcgaacacatgcggatcataccacactggcgtgtagttgtaagtatgatggcttcagaagttcagattcgtcctatcaaaaaaggaaaaaaaataaaaagaagttcagattcgtttcaagaaagatcatatactactcgtcatgtttgggttagcttgtatccatgtggggattttgtttcttacatctcttgccactaaagattatactcatattccttcgagaaagattatattcctacttgagttcttttttcgaaggaccaaaaatcttttgtgactcatcattttaatctctagtatactgcatcattggtttcatattataacccttggccctgttcctttctccaacaaaagtcggataaaattttaaatactcgtgtcacatttttcaaaccgctaaatgatatgtttcatgcgaaatctttatatacgaaatttgctttaaaatatcatattaatctatttttcaagtttgtaataattaaaactcaattaactatacattaatatcaccttattttacgaaaaaaaacttaatcttcatcttcatgagaaaataacaccaccctagtactttgattattttcctattgaagcccttttatgttctaatattttttaaaaaaacaatttaacaacatctacaataccaaattaatttcattatatgtaacattaaatgtattttgataggatgtttgttttgtattgaaaacaatttgatcaaagttataaaagtttaactaacaggaagttaaagcgatttataatataaaccgaaggagtatgtactacagtggcgaattggatcgacttcaataaccaaggtatcatctacatttgggagaaaacaaaatttagtttactcgcatgctcaattgttgtgaaatatcgcgaaaagaaaaaatctttatgaactagagtcccgctccggtgcttttctacttagagtagaaattaatccgaaccgttgatcgtatttaatcatatggttgagatcgagttctactcccaccaaattttatgggagtagaaatgtggagggatatatttgtccaaaggtaataattcgcgtagggtattatcgtaatttgtttttatctaactcttcaccctctctctctatcctatcctaatcgatgccattctcctccatccccgcctccgtcggtgtccatctccttcgccgcctccgtcgccggtccttctccctctccacctccgtcgcctccagcgccatcggcatctccttcccctccagcaccgtcgcctcccccggcctcaccgccttctccgccccctccatcgccgtccgtatcccccgccgtcgccgccttgtccgcctcctctttcaccgtccgtctcctccgcccgcgtcgccttcttcggccccctctgtcgccgtccgcctcccccgccctcgccgcctcctttgacgccattctgggcctcccgttcacctctatcgtcgcctccgtcgcccgtccatctccctcgccgcgttcatcgcctccagcgccctcgcggccctctgccccatccaccttctctacctccagcgacctgtggcggctgcggcgtacgtgctcggcgcctcggcaagggcggcggatccacgatgtgctgcttgtatggcagtccggcggaggagaggctgatgatgcaacgtcgccctcatcttgatgttgccgttgattgttcatcccatctcttcggctgctactggttcgagaacaggtaacgtcctgtcccattttctcccatcacttcctgataaatgatacagtaatgttgtaggatcactattagatcctccaaaagtagcagcctgacgcgagcaaaattcagttttaacaccaagtagtacttcataagcacaacctgctagatttctactgaggttgttgtcccaactatacaaatttgaaatgtgtctgacaaatgttatcaaatcaccacatagataattcttctgtgaccattagcgagagatgatttccgcttgtgcttcattctattttagttgatgagcagccgacaacggtttaaatggttatgattttgcttcagtaaaattctagtactaattctggagttctctatacttcgtaaattacacacagatcgatttttatttgattcgttgcttgtagaaatagttccactccctgtgctacatcacataagtcaaatttcagaagatactactagtttatagtggttacggccagcatggaacagttaaggtccataattttgtaaggctctgcagatcattttattttggaggctttccaatgtgtataattttcttttcattttttcagccatgcagtggagctccaatggtgagtttgcctttcattgtcttgttggagattgcacgttggaattactggcaaaagtcatgcttcttgcattcaagagttgtatcctgttctgcgagtatgatctagcagcatggtatggggctgatattttataaaggacaacgaccaatgtctgaattgatatatatatatatatatatatatatatatatatatatatatatatatatatatatatatatatatatatatatatatatatatatatatatatatattgtactcgccataatttaatgtctatcacagaagcagtaatatactcccttgcgatatatcccacgtggttttctttggtagacagtgttcgtgttttaaaacaaatgaataggcaaagatgatatatatttgcacttgggagttgccgtggatggttactgcaagatgctttaattttgtccatgtcgcgaggggtcaatcccagtaccacaccacttctttttttcaatcatctaacataactgcaactatcttttttatcttcacctaacagaaattaatctgcaatcaccacggttaatatatcctgaaacttggcttgatagagctttattttttgctaattacacccctgacctccacatttacatgcatatcacttaagaagtatataatcatctgaacaaagtctctgatacaacaaaataaaaggctgaagaaacgtcagtggtccatccccaaccttcaattgtgttgatgcttcttacatgctccctctcatagctccggcttgaggattacttcacaagttgcaaacatgttcaggaaagtgaacaattctgtgatacaagtgaatctgacagtcgcggctgctttaaaatctcatctcataatgaaaatattctagcagttaaagaatatatatcatgatgatttatgagaatgcttgtggacatacatggacaaattagtaattaacactataagttagtaactatatggaactgctccctaaaaaaacaactcaggaactgagtttctaattcagaaatgttccctcagataaaaactcaggaactgtgtcaacgatcctaaaattgtgagtattttcttttcaaacaatacttttagatttttagaaatataccataacagaaattaacagtcaaaatagtattttatacatactcaagttcagagattcagttgaattgtattttattcaaataatattataatagctagcacattacatcttcagaattaatatatactccaatatattgcatccagcccgaatcaaaattcagcatccatccatatcaaagtcacatccgataaatcgaattggaacttgtatacaacgctatacatgcaatctagtagcaatagcattagcatgttcctcttcttgtgcggttcgtttcaaaaaagcaggttcctcttcttatcaacaacgaagaaatcaaattcgattgagagcaaacgcacaagtaccatgataatcgaaaataaatactagctgttagcttgttcagtgggaggaggagatcaacgcggatgtgaacgcggtcgtcagggccgaagaaatcggcatggccgtggtcgatagggaggagatcggtgcagtgcagatgcgcgtggtcgccagcaacggaggttggcacggccgtggtggctagacagggatcagcgacatcgacggcgggaataccaggggtggaggatggcaggataatcgaggtcaccgacggggagataaaacggcggcggcaggatgaacgccggctgatcgaaatgggcgccaccaccggaatcgagctgtgcaggaacggacggcggatggatgcggcgagacggtcggagcaatacgagacttaaaagaaaaggaaaacacaaatacccaaattacccttaagcacataattagtaagtactaatatacccttccaaacagatggttcagatcatttctactggtagtagaatactacgagtagaaagcaccgtagtcaagctcaatgaactaacgttcaaagttataagactgtccgggtaaccaacaaaaacagtttggggaacctgactgcccatgctcctccccttcgtgcaaataccggctcactctttgaaggatctttggttttacagtacagtacagttttaccataagtaatgcaaatgctactaagatagttagctgtagctacctgtggaactccaaggtagttcaggtgagggctccaataaaaatcatcaaataagtgagaactcatgaaaatcatatttaaaagtcttataaatttatgaaaaaaaatttaaagataaatataccaaatcttaagtccaaactcaactttatttgagaaaaacaaaaaagacaaatttcagatgaatagtgttatattactattcgagtaaaatgcgttgcaggtactacaacttgcaaggtgggtacaatttagtcacccatcttgtaatttgctcaaataaatcactcaacttgtttggaggtgcaaatataataaaaaacgtgtcacgcgtattatttttgccaaggtggacgatacgatggcagacgtgacgatgagttggcgaaagtaatacagttttgtagaaaaacccttctactatattactctttgctaatttaattggtctatttagatatgttatgcccgtgtgctaagccatgatcgtaggtttttttgttggcgtgcgcacgggataggacggcgccagatctagcgagtcgcggtgatagcctgcgtggctgcgtatgaatccatcatcggcgaaattatcaacgctagccacgagcgctcctatttaatccatgaatatgatgtcaaattaccacattgaagagtgcatataaaaattggttttagcacaaggaacaaaccgctttatttcccaatataaagacaaacatatatccttgtacatcaggcaagattcagtactggcagcaaatcacgtattgaagatttggagtatcaaacaaacatatgtactcaaacgaaaaattgaaacaatataagggctaatttgcatctttgttccttgcatacaaggtgaacctgtcatgctgacgtggcgtccaccttggtacaaataatattgcacctctaaacaagttgagtgactttttttttagataatggaagttgagtgacttatttgagcaaattacaagatgggtgactaaattgcacacaccttgcaagttgtggtacctgcaacgcattttactcttactattcactcaaaagttatctcttttttccctctataatagagttgagtctaaacttaaaatttagtgagaatgtatttcatacttgcatctatctacagtattcttctcatgaatttatacactttttaggtctagtctcatgggttttcacttatctaatagtcttcattggatatgtcgccgttctgattagctcacatcaacttctcctttctgcaaagctaaaaaaaaagggacctatcaagtcttgattataactttgtacagcaacctgtggcggtgcgtacgatgatcacatcatcgcgattcactcatctttttccgtatagccatattccttggatgttgtcacgatagcacgagtgacaaaacaaactcggcaaaaaaaaaaaaagttcccattttagttcaccatcgatttcgaccgtggattttcttcgtgggtcatgacacacatcataaaaaaagaaaagaaaaagaaaaagatgaggtcgtatgcgtaatgcgttcactaatcactcgtcgaaatcaatggctagtggtaacaggctaacagatagtgccggccgctatctgaaaagattatagaagaaaagctttagcttaatgctaagcgtgtgactggccggaccggaggaatgacaggtttttgggctggttgggctcaaagtttagaagaaaagggtcgcgtcatgggccaagtcagcagcccggcccacctgcagccgaagcaaaagcaaagccagctgccgagctgcgtcgtaaaggcgaaagcgaggcaccagctaacccctctctgccttttggttttgtgtttttttcaccttttgcatgcgtttttgcctgcctttttccacatgctttggagcttggaaggcgcgcgccttcgcgctagtggcaacgtaaaaactattgcaacggagacgctcccacattggcctcgtgccaggttagccggacggtcgtagaaccaccacatccacaggtctgtcaacgagttttctctttcttaaaaaaaaaatcataatgtctgcatactcactgaaaaaatcaccaccgacgacgttcgacagatatatcacctactacttaaaaaaacaattatctataatgtttcatacataaatctggatgaattggcttgacgataagaaacctagggttaagctacgctcacttcggatgtcaacgatttttctaacgcaaaatagagggagaaaatcaccagaaaataaagtgtcgccggatttgctcgatttcctcgtgctcttgcctctccttcctgcgcccttggcgtgtcaaagcagccggtcactcaggacgatgggcgcacgcgcacggtgtgccaactgccaaagccaaagcagcagcaaaagcattatcaaaagcgcacgagcccgcgccaaataggcgccctgcatgagcaaacgtgcatatggttgatttctacgtgaattgagtgaatattagtggagaacgtttgatttgattaacaagcgaggatgggttttaattgcgatggtgttatgataaagttgtaggtgtatgactctactcagatcaaatattgttctttataaattttggccgtatagtactctgagtgtatccataaataatgagaagaagaacttatattcttttttctccttcagcccgtacgcagagtgccagggctatccatggccatgtgccacctgatcaaccgcacaactttcccctcccaaaaaaaaaaaaagaaaatagaggccccacattcttatatttcaatacaagccactaatttccaatatattatt

SEQ ID NO: 8508 - DNA, 4522 bp, Oryza sativa
ctcagccacgacgactgtggcggtgaccgcgagcccgttggcatggaggacaccgtccacgccgcgtccctcatcgtaccggggcgcccactcgcgtccgtgacaagttacctggcggcgcggtcgaggcaggaggtgcgggagatggtggccgcgctggagagccacggcgccgagcagctgaagcagctgtaggttcccgggctggccaccgccatggagcaggcgcagcggctgttggagatgttcgccgccgacgaggaggaggtgaccaggaagaagctgaagcgcgcgagcgactcgccgccgggaggcgcggatgaacagcacacgaagcagagcaaggtggtcggggttgatggcgtcgtcaaggcttcttgacgcattgtcccctgcttctgatctctattctcactgatcaatgtgttattactagttgtcatcaactgtaaacctctgattttgtcatcaattgtaaatctcttttgtaaacctctgatcaatgtgttgtcaaatttgtaaaccaccgacagcgtcatcgtggccatgtcgaacttgacgatgctggtgttgttgtcgcagaggaagtagagcgcgttctccacgaggacgcttggccttcttgcctggatgaagtcgtcggggtggtgatcaatggaggccgggctgctccatgcctcggtctccgacgagtaaagggcggcgtgcgtggttcccgcggcgtcgatgtccaccagcgccacgcggaaggggttgccgccgtggcagtcgagatggttgcagccgtccacggcgcagagcaccgtcgcgctccacggcgtgaacatccagtgctgcggcgcgctcgagttgatgttcctccagcactccgccgccgccgctggcccccgtctctcagtcgccgctcgccgaagagaaaaaagagagggaggatgaggagaacatggtttatgtgggcctcacatgttactgggtcccatccatactaaaatgacaaatgggtcccacacattttttttatttctaatgccacctaagcgccacatcaacgccacgtgcaaaaaaaaaaaacctagtcaatactgccacgtaggcgccacgtcagcgaaaccgcactctaaaatcactgaggaagttaaattgcaccggttttaagagttgggggattgagatatccggttttgtggtttagagtcacgggttagatttcaatcacatttaaaggtcacagagtgaacttattccccagcaaataatcgctctcggccttcgtagttcgtagttggccttgtgacttttcctcacttctcgatcacacggcccatctgtaaatgcttttgagtttggtaggaagaataataatagcagcagcagcatcaacaatcatactcgtaaatcgtactaataagcataaacagcaataagttgatatgacacgttatatattgattcatactccctccgtttcagtcactcggtttgaggttacaaggcgtttgacattggacaaagttaaattgctttaagtttataatactatattaatttcgtcaaatcaataattacatatatttttatcataaatttattttgggttaaaaatattattacttttctttataaacttagtcaaactttaaacagttagtcaagacgtcctatgacctggaacggaggaagcagttaagatacgtaacttttcacgttaagatttgggacataaggagtactctttttttttttatgttgcaagcttacaatcgaccagccgcaatttgctgtagtttttaaacttcatgtaaactttgcgcaagcatgtatggatcgttcattcgttttatgtgtccgaggcattattggctgtggcatagtttagttcctaattttttcttcgaactttcaatttttccatcacatcaaaacttttctacgcacaaacttacaacttttccgttacatcgttccaatttcaattaaactttcaattttggcgttaactaaacacaccctgtgtttctatgagtgagttggaaacatagtgattaattagcacataattaattaagtattagctattttttaaaaaataaattaatatgatttttcagaaaatacatggtttaataatttaagaaaggtgaatgtggaaaatgagtgaagttgaaaagattgagtaaagaagacagcctgtgtgtacaggtacaatactatccagcaaataaaaaaatatatttttaaaaaggagaaaatctccaaagaaaaaagcagagatgcctttagcacagcgctagagtagacagacgcgtcgctttcctccgccgccgccgcctcctcctccgctccgcgcggccgtctcccacctctcgcgcctcacctcctcctcctcctaaaccctcgctaaaccctagcctcccacccccccaccccaccggggagcatgcactccaggctcctcagcgccccctcccacgcctccgccgcctcctcctcccccctccccttcgccgccgcccacccttgccgcgcctcctggacgccgcggcccacctccccgctgccgcctctatcgctgctgcgcgccaccgcctccatgcatccttctcctcctcccgaggggtaagggcccgtttctccctgctggtcttcgagttcgttgcgatttctgtatcattcgttggcgccgccgcaggattttcacctgattggattttttttttttggtgtgtggtgcttgtaggcatagcgaccagcctgtgcatggcgtcaccaacacggtcgtcggcgtgctggggggaggccagctggggaagatgctgtgccaggcggccagccagatgggggtcaggatggccatacttgatcccctcgaggactgcccggcgagctcggtttgccacgagcatgtcgtcgggagcttcaatgatggcgccacggttagcgagttcgcaaagaggtggtggcccctagttgcaaagctcttatcaagcttcattcggagaacacttgtttactttcaagctcttatggtttacaaactgttgtaaaaaattcctttggttgctgttaggtgcggggttttgacggtggaaattgagcatgtcgacgctgtaacactcgagaagcttgagaaacagggcatcgattgtgagcccaaagcctccaccatcatgattattcaagtaaactttcacttcttgttctaaccatctctatatttcgttgttgctaaattttagtacaagttatctttagtacctttttactgtgaagatgaaaccttgaattacagttagcacttgtgctatctaactagcgttatgcatactgttaacattctgagcacttttgctaactaggttaattagttgtggccatatctattgttcctacttcctccaaatagattgctactgtgcattttagttatttataaattttatggcattcataccatgtgtcacctggaaattgtatttgtggcgacacctcttttttagtacagtttgcatacaaaatcttcatgctacggcttgctgcttcatatgccattttatccttatctacttcatttgatgcatccatgttttatttcaggacaagtacaggcagaaaactcatttctcaaaatttggaattccgttacctgactttgtggaagtaaggcactaatttctatcttgttagaaactaattgagtgtctgatataaataaagtaatacattccaggtagatactttaagtagcatagagaaagctggggaaatgtttggttatcctctaatggtcaaaagcaagagattagcatatgatggccgtggaaatgctgttgctcacgacaaaaaagagctatcttctgttgttgcttgtaagttgataaaaattaatggagctgctttctttatttgaattcctaaaattatactctctcaaggatgctgttacttggtttacagtagtatttgacatttttttcagctgttaatttgtggcttatacttttgaacagatgatgagctgatccactcagctgtacaagtaaatgagctgatgaggattttttttttcatttttcccttgtagctcttggtgggtttgagcatggcttgtatgttgagaggtggacatcttttgtaaaggttagtatcaatttaatttttttgggtcaaattggcagctagtaatttaaatttctcttggtcaagtagacaactaacgctctttaagtgtctcattagattgatcaccaaacactatagctaatttaacacatttgtttcataattcagatatttttgaattttctaggccctttttttttgtaatttaaatcatcttcagtatcatggttcacatggcagtagatttaaggtcatatgcctgtgtagtcactaggtcatcgtgtaaattatgctacatcctggtacccctatggctctacagtcatgccgcattccttgttttctgttgattttaggatatcttctgcaagttcgttacatgataatccctatgggctgcagg

SEQ ID NO: 8509 - DNA, 9264 bp, Oryza sativa
ccgcgtatttatagggaggtgggcgcaagcgacgacgtggctgacaggtggggcccacgctccgagccgacggggggctgacaggtggggccatcgctcccagcggcagtgctacagctgccggctcattcatgtggtccccaccatccaccgtccactgtatcatggagaacgggacagccatgctccattctttagggggctcgtctcgcccgttggatctagtgtgctgtttgggaagtttacggaggttgtttcagattaattacattttaaactatattatttttaaaaaaatatcaaatatatacatacatttagttttttttcactaaactctattaaatccataagaaatccagccaaaatttagaaatattgttaaattgccaaaattttggctaaagtttatttcgactataatctgaacaggccctaagatttcgagaatatgctagttggtagctaacttctgataatttagagaagttgtaaaccagcttctgaattctaagggcccctttgattgataggattggcaaagaattttcatatgattcaaatttctatggatttttttctacatatccctttgattcattggaaagaaaggcaattttccataggattgtattcctatgcttcacattttataggaaaaatagcaagaggtgtgatttctttgtgaactttcctttgtttatcccatagcattatcgaaggactcgtatttgtctttcttgtgtttgttaattcctgtaggatttgagcaacgtactacttcaattcctgcgttttttctattcatgtgttttttctatcctgctaatcaaagggcccctaattcattttctggattctataactacatattctcagaatttatgtgacaatctgaactgtttaggaagctgaagattctgtgaaaagttacagctactaaaagctccctaaacaggcactaggttgtgtttgattaccggttacattttatcacaactatactttgttagctaagttatagtagataaaaatatggtagatagattactagctataatatgtggtaaagttaataaaaatataactatgataatgaaccgaactcaactatggtagcttaaaaaatggtgtagtaaaacgtgataatgaatcaaacacctctttaatccgtccagatcaccggcagtcggtgagattgcactcgatcatcgagactgtaggacatggccattttgttgactatcagcgaggaccctggaccctaaccaataaccatctagatgatggacaattacattgattaatcaactacagaaaaaaaatagatggaaaattctactttcttttctgacacaagcgtggctaagacactgtcgagaggacatacatcgtccgcattaatactgttgatgtaataacaatcacttgggtgatctactccagttttatacaaggggcggatccaacgtggatgcaggggggattcgattccccccctacacccacaagacccatggatacctccggagcaatcctttcaattttctcgccataaatgataaactaatggtccctaaatagctgtaggttaaagaaactatataattaagtccatcattttttttttattcctggatccgccctgtttatacacatacaatcaaccaaacgcatcgctggctgcacgagggatacgagccaccccaatgcagccaatcaaacatacccatactacatcagcagtaatgcattgaagctgtttgctagtgaaaggtcattgtcaggtagctactgattgttattgctgcatggcacggtcgatgcagagagagagagagaatgcgacccatacatgtgtgcagatgtgctcatcgatcgtcgtctccttgcaagcgacctgtcggttgcggcaaaaccaaccacatccacatgaacacacagtcagtaacattaacagtaaaattaattttctctgtacctttgatatataatgcttcctccgtcctacgataacttcacttttcactcatcacacatatcaataaaagggaaaaaagctagaatatcttctaatttaacatatcccaaaacaatcgcccccaccactttaataagtctcattatatttgcgatctactttcacaaactctaataaagtgataatctaaaagtatttgaggacagattagatggtgaaaaataaaattattttagaaatgtacgacctgatcgtgcctgaggagtaaacaaatatactacggctgtacggcatatatggctcgttgcgtccctatcgaaccaatgctattttccaagcaaagaactatgaggcatctagcaaatccacagcatcgacgtgaacgaatatgcggccatggaattacagtactaattgccctaattttttttcctgtagaaaggagtataaatgtataattaataagatgatataaacgagctgtggaagttgcgacaaagagaacaagggagccaagagccaaggatttatttatttatttctcctttttaacttgggagtcttttgctattttcgtcttaattaagccgtcgatatatatcttcctgatacttctgatgatactccttgaaatctttgtgataccttcgatatactcgttaatatacggtgatacttgctggcaagtacactatgatagttgttgatattcgtatgtactatcttaaaataaaccatatgagaaaaaaaagggggatacatagtaggattatatcctgccataatgggtcttaaaaaacataatgagtgacaaaaagataagcgtggtcccctgtttttgctagccgagcacatttttgtgggcctaaagttcacaggccttgttattaacaacaaagttatccaggcttggaataagttcactttgggcccctctatttgtcgcttagtccgattttcgtcccttggtcgcaaaaccgggtacgacaagtcccccaactttcgaaaccgtttaaatgttgtccctcggcagtattgcatctggtttttgctgaggtggcgcctacgtggctaggtctttgtccaatgtgtcaatgtggcggttacgtggcaattagatccgaaaaaataatagtacacgtgggacccacatgttagtcgcacacaacttaaaaaaatggtgggcccatgaggacccagacgtcatcctctctatcctctctctccctgttctatcgctctccagccggcggaacgggatgggcggcggccggagcgggcgacggcggggcggagcggcggcggaggcagagcggggcggagccgaagggcgaagcggggcgggcggctgccgaagcggggtggagcgggggcgagcggatgtcgtcgagccgtcgccatcctcgccgcggcggacaccgtgaacgacgacgtgctcgcgcgcgggtggtcttcaactcgggggtgtccaacccggggaagggaggggggggggagctcctggcgccgtggttggaggacgccgaccgcgcccaacgacgacgagcgcgcggagaaggatgaggcggcggaggctgtggtgttcatcaacggggaggacgatgaggcgacgatctgtccgggttcaggggcctggttcttgatctctcttataggtgacctcaacgacctcaacttgatctgacgatatcatccaaagttgcaaactattttgtttatgatagaccaaattttgcagtgatcgtgttagaaagagataaaaacaatttgaaggaattttgcatttttacctcgaaatataaccaggcctgtgaacgttgtctgctggaagcgcgcaatttgtttggaattcatggcgaaggttagcttctctgcttccaaaatcatttttaacttcaccatcagttattcaaagttcattatttgatccaaaaacatgcaacagcagcgctcagaggggcagagcacacggcggcgatggcaggagcttggcgcttcgacggcgtcggttcttgaccccgtagccgacgacggcgaggagcgcgacggcggtgaggaagacgtagacgtcgtcgtcagcagtagcctccgccgccgcccacggccgtgctgccccgcgtccccctcgaggaggggaccgacctcgccgctgccgtcgcgcacgagggctccggctgctacgtcctcaccgtcctccgccgcgccctccgtcctcgccggaagcaggaagggtgccgcccgggtcgtcacgcgcgccgcccattctccccgtcggccgctgctcgtcggtcgtcctccccattggtcgccgcccgtcctggtgccccttctccccgccggtcaccgcccatcccggcgccccttctccccgccagtcgccgcccgtcgcgccattctcctcgccgacagtcacccatctcttcgttgcctgtcacgccgtccaccccgccggccgctgctcgtctcggcgccctagctgcatctcctcctcctccggcggccaccgccggacactgccccttctccccgccggccaccgcccgtcggccgtcgcgcccgagagaggagaggagggagagagacgaagagaggggagatggggagtgaggaggaagaagaggggagtgagattgacatgtgggcccatgtgggctccatcttttttaattattgttttgtgtaactgacatgtgggtctcacgtgtattattttttttccaaatcaaattgccacgtaagtgccatgtcaatgccacgtgggacggagacctagtcaaaccagtcacgtaggcgccacgtcagccaaaaccactacccaaaccgctttaggaccttatgtgtccggttttcgtaagttgggggccggttcgtacccggttttgtggttcaagacgaaaatcggactcggcgacaaatagagggacctcaagtgaacttattcctccaggcttgtctatacatactgggctgatacagtaaggtgtacagggagtagcctaatgacacgataaggaaagggagaaaaacccagcccatatgaagaggaggccgcggcccacggcctcttgactcggataacgggctcaccttgccataatggaccaactttatggcctaacgggcctgtgtagtaatgaacgaaggagaaggcaagatgaaccgtgctcgtccatacaaaacgttcagaatcgctttcaacaaaggaagttcagaatcgttttgtttcttggttttttatgtgacctagttttgatgctccggttagcatccatgctaatagttcagttagtgtgaagtgaattgtttcggtgaaccccgcaaaaaaaaaaagaattgtttcggtgaagatggtagattcagtcatgaattgtttcggtgaaccccgcaaaaaaaaagaattgtttcggtgaagatggtagattcagtcatccagacagtggtcctgtttggatccaaaggatattttttaggcctccctcaaatagtccaaatagctcaaaaagatccaaaagggtgagctatttgagggctatttggaaatagcccacccaaaaaaactatcccacccaaagagtgctaattggggctatttcaggtggggttcattgaaaaagtgtcttttatctctatctctctccatgagaaggtacattaaaagccaaatagctcttaaaatagcccttgaatccaaacaacttagggctattttattggaggactattttttttgctaaaaaatagctctcaaaataactctagactagttctccaaatagggccagtgtttgtttacaagtgttttgcactactgcaatgagatacagtacaacatgagctggttttagatgggtctactgaagtgcctgaaagataagacatttttattcttgagtaaagtgtactggcgttgtgtgggtgtgtcaactagttccctgaactctcaaaatgaatttttaggtccctcaacttgtcttgggtgtcacgtaggtccaaatgtgtttcaacctgctccgtgtgctgacgtggcatgccatggtggcgcctacgtgtaagtagaacccatatatcagccacatatagaaaaaaaataagaacatatttttttctcctctcttttttcatttatttttcaaaattaacacatcattttctcctctctttttaaattttattttttttctacatgattgacatgtggatcgcactgacatgtaagcgtcgctgtggcatgccacgtcatctcacggagcgggttggagcccgtttggacctatatgacacacatgacaagtttggggaccaaaaaatatattttgagagtttaaggatctagataacacatttgtacaagtttaagaaccgtccgtacacttcactctttattcttgcttactgtttggttttcttccctatggatgtaatgacacgctgacaggaatgaagacagtatatgatacctagcctctgtgttttcaacttctgcttgtggcagctgctaaattttcattcatctgactgtgtgaaggtaacagcttaaataaactccatttcacctgatatacagaaaaaacgtagcaaccagcaaaacagatgggcgggtaaaatgggagtagttaagtaaatcaatacatttgtcaatacacatgcacatttctagatatcaaagaagccaagacttcaaaggagacaaactttaagtaattactctaataattaacgatgaattacaatctttaagtaactacaagagctcgcatggaattcatgaaaattctacaccaatagtttcatttcagtacaatcaattttttgaaaaggctttcagtagtatcaatagtactaatcacttttgttgcaacaagtttcttgattatcactcgcaatcagacactaattaatcaacctagaggcttaattaatttttaaattttggcgggctttgcacccgaagaaggtgaaggatttcatttgttgggggcagctgatcagtccttggtaatggcggggatgcagctggagctcctggtgaggccgccatggccgtggtccctcgggctgttggacctcgacctcttgcggaggatctccctcatggcctccgtctgcatcagcaccgggttggcgcgccccacgcggttgaaccgcccgcacaccgccatgtgcgccgccagcgcctcctccgccgtcgccgtcgtccacccggtgccgccgtggcggcatctcctgtcggcctcggcgctcgccgcggcggcgcacaggccgcacacccaccgcccgcagtagcgctcccggacgcggcgcgcgtactccggcgtgcactcctcctgcatgccgcagcactcgcaccgcgcctcctccaccaccacctgctgctgctccgtgatctccggcagcttctcgccgccgccgccgccgccggctgccgcgtccgccacctgctgcttcttggtgagctccagggccaggtcggacatggcgcgctggagcccctccatcgagatcctccgcggcttctccgcccgcttccccctcgccaccgccggcgccggcgccggcgccgccgcagccgccgccactgcgccttccccgtttggcgccatcatccactaccactagtatgatttctagctgcaaaacgaatgctcaatttgctactcgatcagatgctgatgagctgactgattactaccgacgagtgagtatgaaccgaattcaatgtggagaagaaggtgatatcgatgagctatatatacactggccgtgcacgggaaagcgagcgagcgcggatcagattgcgtacgtcggcgtggatgatgagcccgtgacatgatcgacgaggaacggagcgagctggaaaaagaagggaggggaaagagggagaggtcgcttgaatgccctagattactctcactctcaggctctcagcatccattggctaattaagatcatatcgaacaatgggcaatgactaactcaattggccatgcagtgtcaccgagattgctgcgtgtttggacgcctagctcgtgctcgtgagctagatgctaaagtagatgctcgagttttcttggccacgagtaatcagaagaactcctgtgtccatcgatctgtgtggttacaaccttgattaattaattaattgcgtaaattaatggagtacaaaattaatcggtcactgcaaaattttagttgtgtgtcatactctcatcttctttcttcccacggtatatatatatagatctatctggccgattgtgttgtataaaaaaaaactctttttcttctaatatattggcgtgcaatatttttgcgcgttaaaaaaaatgtgccacactatcgtctctatgatcattcatggatagatgaatatatagatggcgcacgcgtgaaccacgttgtgtgtcaatctcgatctctaaacagcgagcgagcatgcaggtgccgtgtccatccatatgccgcgcgcgacgccgtccacaactccacaagcttccgctactacgatacccatcaagtccatcaccacctcgcgcgctgcgcgcatgtgtccgtcgtccgtccactcccaactcccaaccagctagcggccgccgcgcccgcgcgcgccggacgtccgcttcgccgcgtgattgcgtcaatgattattgcgccgcgcgcgcgcgcgctttccctggctgcacgagcgccgcgcgccgggcggggcggtcacgagatgtctgggcgagggcgagggcgagacgcgctggcttttcgattgtacctgccgccgatggcctcgatcgcacgcggaggtgcgatgcctttggctgggccgtgttcaatgagccgttctcttggcccagcaaaggaataagttcactttgtgacccttaaaaatgatcgaaatctaaaccgtgaccctaaaccataaaaccagatatctcaacccccaactcttaaaaccggtgcaatttgactccctcggtggttttggagggcggtttcgctgacgtggcgcatacgtggcattattgactcggtcttctttgcacgtagcgttgaagtggcgcttaggtggcattagaaataaaaaaatgtgtgggacccatttgtcatccactaaaagtatgggtgggacccactgacatgtggggcccacataaaccatgttctcctcatcctccctctctttctttctcttcggcgagcggcggctgagggacaggggccggcggcggcgggagggcacgcgggcaacggtggctgcggctcgcggcagtgggaggactaggggaacgacggcg

SEQ ID NO: 8510 - DNA, 5834 bp, Oryza sativa
gcaatcaagtctatccaagtacagtaaccagttagccttgctgtttctacattatactataataagagtatatctgaatagtatatctagtgcagtttgctttctgtctccttcgatagtaaactaatttccatgaaaccctctcctgttcttggtttgatcgaaccttcctgtcaacctgcatatgcagaaatcctgtcttttttcagatagctccaatgactaaacaaatcatctcaacaacagtatcacaattcacaagtggtgaacaacattaatgccaggaaaattgaaaaaaaagttttttcccctcaaaaacacaaagttacagcttgattcttcaggcaaattaaatttaaaaaaacaaaacaagaaactaatgtttggtcgcgggctaaacgtgggcattgctggatggatagatcatagatggatctttccgtggtacgttcgtcgttggctggctgcgcggcggctggaaaacggaaaggaggagcaaaggtaggaggagagacgcctgaaaaagatcaaaaaaaaggaggaaaaagaaaaagaaaaaagctcgagctaagctaggcgacgcccatggcgagttggcgaacagcttgcagcgagctttgctttgctttgctttaatccaataatgccggtggtttcagatctcgcagccgcccctccccagagctcagagctctcacgtgtgtacgcgatgatcgtacgcgcgtactcatcacgtacgtgttcacctccatctccatggaaacgcagagagagaggagaagaagagagagaagattcagaaaagaaagtggaaaaggctatggtctggtctggttaggcatgcagtctcctcctttcttcttcctcgtcgatctctccgtcttttctttgtgtttgtggagaaagagagtgccatccatggcggctcgtgtccttctccttccttggtagtagtacacagtgcagtgcagaggtgtgggatattcggtgtagaggaatattctcgtgctagaatgtgattttcctataaatcatagtattaattccatattcccattaatcaccctgcaactgcaagtatgcaatcataagaaaacgggagatgggtaagaattctcaaaggtgtttctgcttgaccagcactgcaaaacggacacttcgtataagcccaatgatcacgcaatgtaccttttagaaaaagtccaccttgactcccttaaatatcggccgaatctaatctacaaccctgaaccgcaaaaccggataggacaactcccaaactattaaaaccggtgcaatttgactccctcgacggatttggagggcggtttcgctgacgtgccacatacgtgacgatattgacctggtcttcttccacgtggcgttgacgtggcggttaggtggcactcgaatttaaaaaatacgtgtgggacccatttgtcattgacaaaaaaaaatgtggggcccacgtgtcaccctctctcttccctccttcctcatccctctcccttctctctctttctctcctcacgccggcgacatggagccccgactccacctcgccaccgtcgatgccccggcgtcatctaccaccgaagccgccgtcttcatccgcccaagccgtcgtcatcaccacacccgagcccagctcgagctcgtcgccgaaccgccgccgccacgcacaaccaagtcggctgcgcgggcgccgcctccgcgcacgaccgagccggccgcacgagcacgacccgcagcggccaccttcccgtgtcgcctcttcccctcccgtcgtgcaccatccggccgggccacccgacaccgcctgggccgcctccagggcgccttcgcgttgcatcaaccgccgcctagcctcagcgccgcgctgcgccgtcgccggcgaactaggcggatgaggggcggagggccgtcctctctcccccttttctatctctctttctcctccctttctcttcttctgcggggagggccgggggatggggtggtggaaagggaggcgccgccggggggagggaggtgacgctgaggctgggcgatggttggccctgcgcgacggcccgggcggcgtcgggtggaggcggtccgccgctgcgctttgcgtacgcctctcaacctcaaccgccggcgccaacatctctcagcaagggcgcggcagcaagggcccgacggcgagggcgttggctctcgggccgcctcctccgttgccgtcctcctcgtcgaccaccccgccgccggcgccaacatctctgccccaccacacgccgtcctccttgtcgtccatggccgccgggagagaggggggagaggagacaggccttcacgccgcctccggatctccgtgccctacctccgcaccgccgccgggagagagagtggggaagttgccgccggatgaggagaatgggagaagggaagagtagttggagagagggggatgacatgtgggtcccaaaataatatttttgtgtgttaataacatatggtcccactgatttttttaattcctatgccacataagcgccacgtgggactaagaccaggtcaacaccgccacgtcagtaaaaccaccctccaaaatcactggaggagtcaaattgcactggtttcaatagttcaggagtcattctatccgatttttttttgttgaggggtacaaattagatttcgccgatatttaagggagtcaaggtggactttctccgtaccttttcccctgctcaagttggactccattcttgtgaggttctttgggccttaaccatcaaagcccattcctggaaaactgggcctctccctttaaggcccacttgaacggtacacacttccgttctccaattcgttctcaaatctcctttatatgtgtacttcctgagtttaaaatagaagatgacaaatgcaattgcattcgatctagaacagtggacgccgaagaaatgcaagattttcgccaaatagggtgtggatgtctaataacaaactagcaatctgtggctggccaaataatacctaatgcttgctttgccgtcatatccaaagacgtcctatcacctcctattaaaatgcagatacacgagaaaaatatgggacatgatctcaacatggacctcacttgagcaaatcaaaacgacgatacggtgtacaactacgatggtcatggtgcacgactttggccacctttaagggacaaaaaaaaaaaaagttcgcaccatcgtcctattaacgacgtgataaatttaaaaggagagaaaccatatactccctccatctacttttgatagtcatatttccaaatctaaaaattttatttttgataggcatatttcaatccaacaacttatcatcttaatgactttcttggatttaatgcatgactcttcattcttctacacgtgattggctacatgggcattgagacatgtaaatattaatgaatcgcttgtttacgaggaatgactagtagcatatttaaatggatgataagtagaattacttatccttgttctgtgtgccaagataaaaatataactatcaaaagtagatggagagagtattattctaacacagaactcccgaagatccttagaggtgaaaatcaaggagaccaaaacttgggtattaggagcaaaagacgcataccttatcttttttttttcttattatttgtacaacaacttgtactcctactatttccaatgaaattgacaccctctaattaaataccggttcattaaaaatagttgcttcgaattggtacaatttaagcacgaagagatcgactaaaaggagcatgtagcaactaagattcaacgatcagagggagaaaaaattggtaaaatgtaagagagagagagagagagagaggatgaaatggcagagatgatcaacgtcaaggcaacagggagacctcacctcaccaaatatgtaacgctcctgatcgcacaagattcaacagtttgctcgtttgatttggacgccggcgaaggcgaaatgctttcgaccaagcgtaccatgcatctttcaatcaactcacatatatgtgtcttcgattgctttgattgatatgatgatcaacccggcaattcgacctctaatcctctatattctctttcgttctatttgatcaatttcacttgagaactaattaattttccctcaaaaaaaaattaatttgttaatcaacatgtatatacttcctccatcagataaaaaaaaccaaaagggcattaatgagcaaggacattatcatacgtattgccgaccttgccgttgatgcgtcatttgcatcaagatcctatcgtccttgctgtatagatttagaacaattctatgactcttttccctaattgaagataaacaggcaagttgatcattaacgattaattcgataagacttatcgaaaccaaccagaagtaccaccacaactgcctcttgttttcgatatataatatatctatatagagggagatagggatatcgcaacgtgcgtgacaactgtgttctttaaactcgtaccaagtcatatatatatatgtacttatgttgtacatcagctcaagagaaaaagaagctagcaagcgatcctgtgcatctaagtcaacaaaatatgttgagattgacttatgggaatcactacatcaacttttactcccctatcaacaaatataagcattttttatgttttattagaaattaaattcacttgtaatctattatattattaagagaaccttgaaaagaatcattacttcattgtggagactagaaattcccacgttaaaagaaaaggatcttgtagattgcggtgggttccgataataacgatatagatggattaatatagttatatacaaaatacaattatatctatagagattcaatcctattgaaataaaatctaaaagttgtatataaaatccaaatcttatatatatgaaaatagaatctcggagttgtatatgaattgaactatatttctgcatataatggtttctatagaaataaaatttcagttgtatattaaatctaactctatgtgaattatatagctccgtgcaaaactgcacggggcaatcccctagttactttgatatttcaaaaactttatttgattagaggaattaaatcaagcctggcgatgcagtgttttgattggattggggaatgcattatattttagaaatgcttatatttataaataaattttaagaactataatcaatatatatgtacacttactctgttcatttcaaaataagttcattttccacctatcttacacatcccaataaaaaaactagaatatattctcactttatcaaatctcaacacaattattcctcttattatcaactcctaacatatttattcactacataaattttgatgtaacagttacttaaaaataaattacttttagataaatggaagaagctaaaaataagcgtattctaggggtgtttaggagagatggacctatgaacttattttttggagaccaaacactccctaagactgatcgagtatatctgtggatggaaagataatataccagtacaattgccgacagtagtgctgaaagggaagcacaactgaatgtccggatgtcttccgtctagctagccgtctgtacgtacacggtacaactgcagcgacaaacatctattggtaatttatttgtgcaagtacgatgcatttcaattcgatcggtacgtaatgtacttagtggtgtttagatccagggacttaactttagtccctgtctttagacactaatttagagtattaaatatagactactataaaactaattacataaata

SEQ ID NO: 8511 - DNA, 14564 bp, Oryza sativa
gacgtcgtccccccgccagccgctttgccgccgcctcgcctcgcctggtcgctacctccgccgctgcctcctctgccgcgccgttgtcgccgtttgaaggaggagagagagagatagaagagagagactgacatgtggggtccacctattttttaataaataaattgttgatggactgccacgtagaccaaaaccaccgcggattgggttcaggggggtaattcgtctggtttgcatagttggggatgaagaatgtccgattttgttgttcaggggtgtaattcggacaaccgcgatacttcggggggggggggtaattcgtactttttccttaaaaaaatcaacataggcctcttctcctaaagtgatttgaagggagtattatttggataccctctctagtctttttctttttctaaaaaaataaacgaactggcacacaattgtgataatttctttaaatatattaggagaggaaaacaaaatcacatcaccaccacatgctagcagctccaaacatatctatgaagaaaagagctagcaccaagccgggcgccgctatgcgtgattgatcggtgatagtctacgagggttgcgaacgcactgctgaaccgcagttcctaaacagtagtttctcgatcatcctcgcagagcagggttggaaaagggagagggcaagagagaagacgatccactcaaccctcagccaacccagtggcgacaaccgacaaaacgttgaaaaccacattgagataataccgtgacggcaggaaaacaagatctcaaagatgatgcacccaagatggttatgacgttgaagacgccaccatcatccgtgaaatgactaggctttcacccggagaatcttgttaggagggagagagcatgagctcgacaacacccaaaagggaggaaacaacgcgacacgttatcattgctggcccgaagaactccgatcaaggcttttgcctatggttcccttcccctaacctgttgttagcaaccttgtgtatccaccacccaaaaagcctatgtcaacatgcagtcctgccacgccggccttgtcagccgaacactttcacgttgccggttgtgcctgttggccctggcgaccacgtcctctcagcatcggcttcatgtgctgcgggccttcagctcgtgccgccaacgaccgcctcgctcttctagcctcccggccggtcacattaaccgttctacatgccgctaacctcctcctcgtgtgccacctgtcacggcctcgtgcgcaaccaacctcccttcgcgcttgccgcgccagccacccacatgtgtcattgcctaggacggcgtcctcgcatgtggacctccgtcgatgcttacacgctgccccgtcgccccgggcgttacgtgaccccaacttctccactccttgctgggccaccgtgcatcctccccatcaccaccgcttggtttcactcgctgagccaccagatctgaccatgtgagaactggatccaacgctaacatgcatatctgatcaccgacgaccaccactcaaaacccttcctccgatatttggtagcactcggaccgctgccaccagaaaaggaggtacggtagagagctctgggacccccgcccttcgcccgccgggctttcggtcgggtggcagtgaggcgaaaaggaggagggaagagggtggcagcccgtgccgccctagggccgaacaacacgagggctctccctagcctcaaaggaatggaacaaccaaaccctcatggcgcacatttgcacgcgcttcaccagctgaccctttagcccatatgcttgtagagtagagcgtcataaattctcacctagctagacttggtcctcccactcccactagcgtgctgactacatatatatgatcggtcaatcggtggatgaaatcaaacatgcaacatgtcttcaccgatgctcggcgatcctatatatcgatcctatagacagacatcgatccaaccggtctcgctagccatcctcagcactgtaccatggaatcgtccggtaatactccctccttctaacttttttaaatatgtttgaccgttcgttttattaaaaacttttatgaatattatttaaaaatttgagtagtagtagtatatttaacaatgaatcaaatgatagaaaaataattaattattacttaaattttttaataagacgaacatgtcgatatttgatgtcgcaattccggtatttgcatagtatggggattgttggtactaggatatatgcgagactgaggtaaaagagatggagacagggatttttatacaggttcgggcccctgaattgtcaggtaataaccctacatcctgttggccgaagccggtcgttgctcttattcatcataatcacaccagtacaatatttggggatagtctatctaactgttgtcgacatgacggtctgaagttctgactcgtagtcgacaacagggtagtcttcctcctcgaatccgtgcccgtcgagatcagagatagcgctttcgtctctcctgacagtatctggagacaccgtaggggactagccgtgcttatccctgaagtcgatatccggcgtcttgtcttggcgtatgttggcttctatattgatcttctgtcttgatctattgttccgtgtcttctatggtgggtgtgtcccctctcctcctagagggtcttgtatttatacccataggtgtccccttgtccaagtagaactagggaaaccaatatggatacaatccgagtagtacttgtcgttttcatgtagaactctggttgtctttccttatccggaactctttctatatccgtaggttgtttctgtataggatatgatatatggtgagtcctgtcgagatttagtcgactactattaggtatgtgatagaacagtcaaacatgtttaaaaaaaagttaatggcgtcaaatatttagatatttagagagagggaatacaacatgaggtccggtaggagtcctgtggctggttgccgctgggacgtgctactcatctcggacaaactagctatatttatagcgctaagatatatcccgtcacgtattaaatttatttatttcagaacagagggacggaatagatgacaaactagctcgaccatctagagaacggacctgtttcaccaaccggcttgaccggtatgtaaatatgcatgggctaataggccggaaaaaactccgattcgccgatctcatcggcccttgccaagcagaagcctaaggccgttttctggatgggccgtgatctcgctttcaaaaaggctcgtctgctctgcgacaccatttgacacttccaccggtggccggcggccgccgtccgccgcctcccgcgattcgtgtgtccgacacctgtgccacaaccgcgacgtacgaaagccaagccaccgcccacaagtttttcgtcagagagtgtgtggatgagtacgtgatttccacttgtgtgccactatattttgagcccagtagtgggactctgcggttttaagtactattgctgcgctccagcccatccattgcgtggtcggcgtgggggcaaatttcgtttatatggttatcatgatttttttgtgaacgatgacgttggttatcgagtgatttgttaacgatatgatgatgcactccaccaccaaagactggtcatataaaatcgctgatatcaaagtgtcatactacacttctttgttgcttgatatcaaagtggtgccccgatgactatttattcttgcttcgtccctgctcgattgtaaaagtgaacaagctctaggtgtaactcatttggctatattccttacgatgaaacctgtatattcgacttcaagtcttttactaagcacgaatacttatgtttatgactaatttttttaattatggatggtgcctctgtgattactttgtcatatatgtttgctcaatctactagagacgctcgaaatggaactgcactaatttttttttaagtatagaagtcctataaaaatcatcgcaaacaaattaccaaatcaacctatcatcaccattataatggtaaactacctatgtttcatattatatatcgttctgacttttccatagtcaaacttttctaagtttgacttaaatttatagaaaattatagcaatattatcaacacaaaacaaacatattatcaaaatatattcaatagtaatttaatgaaaccaaattggtgttgtagttatggctgtttttttataaatgatcgaaaaaaagtcaaaaacaacttataatatgaaatagatggagtattaaaatacgtgggcatggttaggatgtgtctacgtatatatggatgagtgcgacacacgtacgtgtgtataagcatacgtgtatactatatcgttttgcgtaataaacttaatgttgatctagatcttgatctttatttttagagaaaagaacaccaactatcaactatgtacgtgtcgagaaaatgaagaaaaaaaatgtgagtacttgtgaccaaagtgacacacacgctcactcagctcgtcagcttcttccacgcacgcgttgacacgtcggcacgggaaccatcctctatatatcgtcaccaacctgctgcacccgagcgtcgcaggtcaacacacgactgtaggcacgtgcaacaagctagatggaggagcagcagcggccggtgcagcccgccggcggcggcggcggcggtggcgcgccgccagaagagcagtggcgcggcgccgtggaggcggcgctcccgggaacgccggcgtccgccgcgtggccgcacgtcgccagcttctacgccgcgcaccgctacctccctggcatcgacgtgtgcgagcgcgtcggcgacggcggcgaggatggtggcctcctcctcgtccccgggtgcgtccggcacgtggcgtcgagcgcggcggggctgtgggcgcgggaggagctcctagaggcgccggaccacgcggcgcggcgcctccggtacgccgtcgtcgacagcaacatggggttcggccgctacgtcgccacgctccgcgtcctcgacggcggcagcgggtgccgcatcgcgtgggcgttcgagtgcgacgccgtgtgcggcgaggggtggagcgaggcggcgctggtggcgcggctcgccgccagcgtggacggcatggccgagagggtgcagcaagccgtggcggcggaggccgaggcgcgcgccggagaagaagaagaagacggagtcgctgggtgacgtcaacgtcgccatggcgggggcggcgtctggttcggcgtgtctttgtcgtgtcaggacgtcgcgcgtgcgttgcgtgcaaggtggctgattgatagagagattttctgtcgcttttttttttttactgtagtgctaccatggatcgatcagcggcggtgatgatctctacatgaaatttatctcgtgccactattaggtcgttttcatttttgcgatagcttttcatggaaaaatattataagaaaaaaattgtgtataaagttttatataactcgcaccgcttaggtagtgtttgggatgggagagatttagttagtgtttgggatgagagagatttattttattccctctcaaaaaaaaacataagtaacatactcgtgacaatctaacataaaagaaacatgcaatgatttatagaaaagtttctctttttttttacgttcttaaataaatattgcaaagtattgttgctcctgggtaagtttatgttgctcctaccttttacttaggctgtgtttggatcaagcggtgaaaatttttgtcgtatcatatcggatatacggacacatattttaagtattaaacgcctgtaaactgccaggcgaatttattgagcctaattaatccatcattagtaaatgtttactgtagcaccacattgtcaaatcatggagcaattaggcttaaaagattcgtctcacaatttacacgcaatctgtataattagttattttttcgtttattttttcacgaacgcgcaaaaggattgcacgtcaatatattagaataaaaagagttttagttacacaccacagttagaagaaaaggattgcacgttattttttcatttatatttaatactccatgcatgtgctcaaatatttgatgtgacatggtgaaaaattttgccaggggatctagacaggcccttatttaatattgtcatcaacatttaccgttcatgataagatatcatcaaacttttgtaaatgttaaataccaataactaactcacatgattatatttttttaaaaaaaatcaacggttggtttgtctccgaagagtattgggaggtgaacccatctcccatgcacggaaaacggagcagtttattagcgcgtaattaattaagtattagccttttttttcaaaaatagatcaatatgatttttttaaaacaacttttgtatagaaactttttataaaaaaaagtaccgtttagcagtttgaaaagcgtgcgcgcggaaaacgagagaatagtgttgggaacttgctcttgcaaacacacccctcacgatattacaaacttgttctaatataaaatcaattactaaaactttaaaagttaatcaagcctggtttcgaacgtcaaatagtacttcttcacggtggaagtatgtacttgcttggtttggcaggaacaaaaggacgtgacaattgcacaaaaccaacaccaaaacccacaaatccacagcgcatcataggtacgaaaatctaatctgatggatccatccgaatatctgacgcacaggcgaggctgaccgaccagcttgtttgatgaggaaatgaaacggtcgcccgactagtgaccgagctttctttcctaggtcaccgcactgcaatgcacatggtgtggagcagtgattttattgttccgaccaaccgttcgtccgttcgccattgctggtccaatccaagaaggcaaaatttgctacaagacattcaaaaaatgtgtaattagctgaagtacactataaaaacgtgtatttactgtagggcatcgtaaaaaagtggtaattggctgctggacacccatagcattattttattatttttggaggaaaaggagagagaaacaacgattaaagacaagtttgcccttggctcaaatgaccccaacgtgggccccacatggaagtcccctctccctctccctctccttcttcccagacaagccaggtggcagagcggcaatccgcggcggcggtggcggcggtgccgaccacgttcgccatcgggaggggggctacgtgcagccacgccgccgtggcctcggccgcgtcgccgcgcgctgccggctgccggcgctcatctacgtgctcgactcggcgatgagcggtgccgtcgcgctcatggcggagcgccgcgacatgagtgggaccgcccggccgggatgttggttgtgttggagtggacgctcaagtgcggcggcggcggcggcccggcgctcatctccctcccggcggcgtcgttcttcgccggcaacctcgctgggagcttcctgctcacgacgctcgccgacactcatctgggacgaaggaagatgctcgtcatgtcgctggcgaacatgtccgtcgccgtcgtgatcacggccttctcaccgaacgtgtgggtgaacgccgccctgaggttcgtgtgcaggttcggcaggtccatggcgggcacatccgcgatggtcctatccacggagctcgtcgggaagtggtggcgcaacacggtgagctttgccgggttcgtcttcttctccgtcgggttcatgtcactcccggcgctcgcgtacatgttccgcgaggcgtcgtggcggaccatgtacatgtgaacgtcgctcccgtccctctgctacaccgtcctgctctacttcctcgtctaggagtcgccgcggtggctgctggtgcacggccggaagcaagaggccatcgaggcgttgcggcagatcgcgtcgctcaacgacggcgaaggcattacaatgtcgagcttcaccatgctggatatgtgcgccgtggaggtgggggacggagtggccggtggcgagggcatgttagccatgctgcggtcgatatgtgagtggtggtgggcactccagaggctggcgacgatcacgacggccagcttcagcatcggcgtggtctactacgggatgccgctcagcgtgggcagcctgagcttcgacctctacagcgtagcgtacaacgcagcggccgagctcccgtcgtctttcctctcgtggctcctcatgggcaggttcaaccagcgcagctcggtggtcgagctcaccgcggtgtccgggctgtgcagcctcgcgtgcgtcgtcatcccggcggacccggaggccggcaccggtggcttgcgcctcgccgccgagctgtcctccttcttcgcgtcgtgcgcgaccacgcgctcgtctaggacaacggcaagccgccgtggcctcggccgcgccgccagcacttgcgctgctgcgcccggtcgtcgccccgcaccgccccgcgccagccgcctcccgctcaggtgtacgctcgcgtggtgaggaaggggatagagagagaagcaagaagaaagaaccgagagaagagagagaatgagaaagaaaagaataaagaaaaagaaaaaaaatcaaagggtaaaaccgtatttacactgttgtttctctcttcttttcctccaaaaataataaaataatgctgcaggtgtccagcagccaattaccagttttttacgatgccctacagcaaatacacgtttttacggtgtcctctaactaattacacgttttttggatgtcctgtagcaaattttgccgtccaagaaactgcacaactccccccacctactccaggagtagtccgcacatgatggtcaggtcactaggtcggcagctgggatgtgccatggttgtacttgtcgttgccggctgctaacatacgattagtcttggactcttggtggttgcattgcactcttgcagaaaggtagactagctgctgcctatcatgaataggaaaatagttcaaattactcccgtgaattattgtgacggtacgaattacctctatatcagatttcggagtggttttggtcccacatggcgcatatgtagtagtctagtcagtatagaaaatattaaaaatgataggggccacttatcagtttgtctcttctctcggtcaccatatgtgggtcctactttttatactgactgattgccacgtgtgtatccggtaggaccaaaactgcttcggagtttatcagagggcaattcgtccggtataacaagataagggtgaagaatatctgttttttttaattgaggtggtaatttggattttttccttacgaatacgacttactacgtttgttccaaagtataaatatttttagatcattaatttgttatcatatgctgatattattttttagttgtattaatggttaaattttaaattttgaattcactgtattcctctcgcaagcacgtgattagctgaaaatgtatggatgtctgtgcattagaatcagtgcatcagaaatgactatattatcgtacaaattttgaattagtattttcaaaccgagggagcagtactttgttttgggtgtgtttagttcacgttaaaattggaagtttggttgaaattggaacgatgtgatggaaaagttggaaatttgtgtgtgtaggaaagttttgatggatagaaaagttggaagtttgaagaaaaactttggatctaaactcggcctttgtatacttcatcctattttaagcgcaaccataagttttcgtatccaactttaattgtccgtcttatttcaattttttttatgattactatttttattgtcattaaatgataaaacatgaatagtaatttatgcgtgagatatgtttttgacctttttaaaacaaaataagacgaacgattaaattagatatggaaactcatgtctgcgcttaaaagatgaaaggactagtatccttgaccgaggtattatgctgttgataagaataggaggtccactcttgttgtctatgcttgactgagaagaatcctcttgccatgggaggaacaatcaaccacacaaattgaatatccttatatccatcctacacacgctaaaagaaagatcgacaaatttgatgggccagtagcagtactaggcaaactgcagcacaccaataccagtattagattttatacaaaactgattgaaaatgtccaattcagcggcaggggtttccttaaaaatcttaattctattattgcgggtgtatatatataattacagatcacaaaccctttttcagttttcgacccagtcctacatgaaacaatcaaccaaaatcaccacttgaagcttgtagatcactttcagataattccatcaagaatgagatcaatgacatacacggccattttcctaacttatcatacaatttttcttttctcctttttcaggcaaactgctctccttcacacggtttgcagagctagcattcgctccatccagtcgatgatgtctgtggcgatctcatcacgctcaggctcaaagagcagatcgtgcaagaacccatcgtacagcctcagatccttgtgcctcgatgaggcctcgttgtagaggtcctgtgaagccagggggtcggtcacccggtctgcggttccatggaggaccatgaatgggacggtgaccttcttcaagttgtgcagcaggtaggaggagatgcgtaggatttcatggccggtccgaactctgatcggcccggtgtaaaccagcggatcggagtacttcgctagcagggcagccgggtcgcgggacaccgggatgcctctcttgttagctcccttgaactgaaactttggtgctaacagagagaatattggcgccacagcctgcaagattcagatagttggtatgcacttatcagaatgtcgaaaaaaaaaccaagatggtccaattttttaagatttgcacatcaaggacgagattaaatgtagttctcgtaagcattaattttgtacagattgtttttctgccgggcatagtttgtgcagattggaaaattctaaatatataatgcaatcattttaataagcgcatacaggtcatagtatatctgtttttctaacgttgaatagaatacaactgccacagtttctcgcagaaggtttgataagatggcaaatgataagttgcttaaaccaattttgcaagctgttttaattaattgaaatatacctagttcttcaaaggtattcatgatcttcttttagcaagttatgcagatgaatctacttttgctgacctagaggatgcttattccatcaaaacaaacacagtttagaaataaacagggtatcagaaaaagcagcattacccctacaatgggatgagcaggttttacacgcagagctggtgaagttaggatgatgccttccagttttgctctgatacgagggaacaatgatgcctggaaaataccagctattgataagcacaagggaaagaagaacatgaagcatgtaaaatgaacatatctgcagccaaaccatttcaagttttcaaccaggctattttgttaatgctttgcaccattgctctgcccgtcacgatatccattattcacaggcccagaggagtagggtcagtttctaaacctggcctaaatagagctgagaaaaactacttattgttacaaggcataccttcaaaacaacagctccaccagtggagtgaccaagaagaaaacaggggacccctggattctcaagcacaattttaccaagaagtacatcctgtttgaagataataaaatatttcataagtaacagaatgaaggaataattgcaagacagacttgctattttcagacttactatatcttctacaacataatctagtgaaggcacataaccatgtagaccatcgcttccaccatggcctgacattgtatatggagatgttagagttagcctgttaatgttcaaaataaaagtagaaacaaacagatgttgttgatacaaaaagcgatgcaaactgcatggataaaatcaatgaaattgcctactgtgtttggttagtaagtgtgcattgcagggtcaatttgtgctgtgagtgaacagagtgtggtaacattagaatcatgagctagaagttgattctgaataaaatttcatgcttttgtccataacaaacggtaatactctgttatcaataagactacttcactttcaatatcaaatgaaatatttagctggttctaaatttctaattagtcatactccttctaatagacaatccccatattttccaatgactttttggctcacacaaaaactcagttagttatattaggtccgacaaaatgggtacttaaacaaccccaaaaactaatttcatgtgcattctgacccaaaccactgtaacttacctaaatgtaggactaaaactagccatccaaagagtgaaagaggcaataatgcatgtccaagaaaccaaactagttctcacctatccagtccattgcatatactccaaagccacatgatgtgagcagctccgcaaagtgcaaataccttccactggaaatacgggatcaaaaagtatttaattattcttttgacaacaaagaggaaagaacatgtatattgtatattaaggtgtgtggtgggtgggggacttaagaggatatatagccttacctgtgctcattaagcccatgtatgatgaccaaaatacccctaaagtaaagagaggaaatgatcagtataaattgaaagtggaagcaattgtacaacagtgtcactgcaaagtaaaaataaactgttcttaacattagcattgaaacacatgctaccctcgtaaatagatggttcaggctaatgaagaattccactttgctgcaaaagaggcttcaacagaacaatactcttcaaaaggtttcagctgtagggttgtcaaatttgccagcagcgtcaagggtagctgatcagctacactttgaagtattaaacaaaggtggttggttcctatttcaatctttgttcaatgcagcgtttgactacagtatcatttaaaatgtgaacagctgaacagagctaaaccagcaggtcatgggaataagaataatccacagtttggttatacaacattggggcaaaggaataaaaaaaagcttcctccttttcttgatagctaagctattcagggtcactttagtttaagccatcacattcagacgttttcaacgataacaaagatatagcaatggagcaaaggttgtgagataaggaatcgctttgattctgctaatctacccgattgtgcttaaattggtctcctaaactaaagcctaaaggtacacgaataaagcttctataatctcttcttatccattagtactagtaagttaccagcactaaacatttcataccatcagagagaaaaatactctgcatcagaagctgtcgtaaacttagccaactggtttgtaagagagtatgacaattggcaagaagtccatttgaccattatatcgaactactcctacctaacaattgcagaaccacggatgaagacaagattatgcagcggcgaactacttcaattgcagcctagccggtgcaatgaatgcaagaacgttgcccggtatctgaggccggatgtgtgtaggagacgtgcattagacggcacgtctctctcagagagactcgcagatgcagcaacagagtttcagcaatgcgatttacgccacaaatcctaccgtgataaatcaaaccactaaattattatgatccagatgcagctcatcttcacgaatgtctaatcggaactgaaattaaccgtcatttcacagctagatcaccggaaatttcagcgaaaacaatctggaaatttgaccgaaactgccaccagctacaagcctacaaccaaccaaaagaaaacgcttggagaagagacaaaagaagcctcttccaattccccaactcgaggagaacaaaacgccaccccaattccgaaacctgggatctctctccaccaagaaacaaaaatcccctaaaattcagaacgaaatgacgaataataatacagtaaaaatattcacaggaatcagacgagaataaaaaggtagtcctcttgcgtaaaagcagagccacaaaacgcccttcccccaccaatccaccaatgggagaagatcgattttaaaaaaattgaatcgatgtgtccaacaagaaaacgaaatcgccataagccaacaaaaaaaacaagccactgatcccctccacaacaatccaaaccactataccgaaggaaaaattgatcgccgaaccctccgtgctcacctcatctcggcggcggcggcggcgggcgcccagacgcggcagaagagcgcgttcctcctcgccccggggacgacgaacgtctcccaccgcctcgccccctccccgtccgcgtcctccaccatggccacctcctccgcgagcgccctcctccgccgcacgtcctccttctccgccgccctcctccgcgtcctcaccgccctccc

SEQ ID NO: 8512 - DNA, 2470 bp, Oryza sativa
atagagagagagagagatacaattccccatttttttaattatttttcttatatattttttgtttccgtcttaatgaaatgaagcacaattctcctgggctttagagaagagagagagagagagagatctacaattcaccaaaatttgtcctctgtgtttatcctagcacatcatggattttaagctgaaatttcgtacatgcctgattatatcatgaattgcaaagccagtgttttccttgtttgcagtttttcatggccatttgcgttgcctaaaagaggatgcactggaaatactcaaaaaaaactaacagcgaccgtaggcaaaactaacatctcaaagtttctggcttcaaccacacttacgaaagatgacacgtgatgcgtgacgtataactaaaaaaacgaaagggatgaaaataatgctacttgatagcataattatactctgcagaggatctaaaaagatgtaggcatgcaatacaaagcattaatatgtgttaagccattattcaccatacctaacatagcaatgcaactcagatatttggcataccttgtagagactatttcaaaagaattcacggactgaaccccagatagacttttcttggcatttcgtgcagagactatgtccaatgagttgacagattggacaccagataattctggataagtttttatttttaacattgatggtcggatatgtatagtcctaggaggaagctgcaacaggagactttattatttcttataaagtacactcaagatataaggtcagtcaagataagatagaaaaaggacatgatctgtacacttcaaaattatgtaaacaatgcatatattggtgaagacagtgaaggccactcggccagtgcaactatgacaataagaggatatcagcaaagattatgtcaacatgaacaaacaaagaaatgatcaggcggtcttaggaaatgatgagatgcaagaaatagcacacctatcctgaatgaagcacggataaatacggctcttcttgtatactacttttacataatcatatattatgaaattctcctgcgtgttctaaaaaataaataaaaaattatgaaattaaattgcaagacccgtactagacaatctccgattgtacggcacaaacatatggaaggcgctaatatatagatgttcaagcaactatgaaccaagattggaataaagaggtaatcctgaagaaattattttgataccaaacctgcttacaaactaattgtcttagaaaacagtgcatacccgcttgtcaactaggactgttccctttacagcagatccattgtagaacaggcggagttgaataagaagaggctagaaaaataaaatagataagaataacaaacatagaaaaaacagaaaaggggtaaatcagaacatcttatagttaatacaatacatattcagtggtgttgttagaccccatcaatttgcttgcagcacaatccacaatgtcctgaaataatgggaaaaattctcagatagcttaaagcgtggaacaaaacattgccattaaggttgaatgaagcacagtaaaataagttaatggcagctgatatttatatctggatttttgaattataagtcagtggcaataacatttgagcccaccctgaagctgaatgcaaaagctgtgcaatagatatgacagcaggaaaattttaggattggcacattcctacctaataatgaaatgaatcaacacaaataaaagttaacataagaggtacttcaattaggaacgagaaataatgtcacaaaacagtatattggtaatgcaaaaacaatgtaccaacagtcatttgcttcccatatgaggggcaacaagaacgaaaatggtatcaatttaattaagcggacaagttagagccaaagatgacccgaactaaggtggtgaggatgtagtggtgtacatccacacttcccaccaactgagctagggttcagttccttctttctgtaactttatcacaaagtcgtaatgatgtttcaggcatgtgtacatatgtatgagcaacaccatgattgttcctttctcttactagtatgctgcactttgatgaattgtgtttgtcaaactttttcactggtgtgcatgtgctcaccttataccttataaacaatcagataatccacaaatgcttctgatttagtaaaaatgcttcacaaaaccataaccctcagagtaaccaaaaaatgtctgacaggttaaaatatactacctccgttttttaatagatgacgccgttgactttttctcacatatttgaccattcgtcttattcaaaaattttatgcaaatgtataagatataaatcacacttaaagtactatgactgataaaacaactcataacaaaataaattataattacataaattttttaaataaaacaaatggtcaaacatgtgagaaaaaggcaatagcgttatctatta

SEQ ID NO: 8513 - DNA, 3799 bp, Oryza sativa
actgtagcgcgctggaaaacgtccaaacgaacacagccaagtgtcgcggttggctggatggtacgcagacgtcgcgagcggaaataaatggagtcgtgctcgcggctggctgtgggggacgagtcgcgtgattgggccatcccagcgatcgatcgagcgagcgagcgatcggcggtcggtcaggttgacgtcgcgaccgaactgaattgaatttggatggcgatctcatccctgatcctgtcgtccccggctgtgtgggtcacggccaaagcgcattgaattcccccttggtatcgtcaagcagtacactactagtatatgtggctgccgaatgagaggcagtcaatcagctacggatggatggatgctttggctcttctcttatcctccatccgtcttattataagcagagacggtatttttcgtgtataacgtttgattttcgttatatttaaaacaatataaaaaataagtcacacataaaatattattcatgttttattatctcataataataaaaatactaatcataaaaatatttcaaataaaacggtcggtcaacgttggacatagaaatacacaactacacttaatggagggagtacaaattttatcatgattttcgttagcacgtctgaaataaattttttatatacaagttatttttaatatagtattagataaatagattttttctaagtttaaaataattaaacctcagtaatcacgcgctaataacttttttgttttttcccctaactttatctttattttaaaaaacgaacagcaacttactttatcttgcactgctctgctcctttcccgcggctgagcttggctagctgcgatgctgccacaccgttggttggtcctgcaccaatggccggtcgagctcgagcatctcggtcactagcaaaggacaacaaagtcatctctgctgcatcgtactactacatagtacatggacctattcaaagctagctaaagctttgagcctttgacgggcaagacgccaagcaagctgaaccccggcctggccggcacggccggccccaacatcggcggagagcccggccggccggccaacctgcgctgccgctgccaccgagatcgacctcaccgaccggccggccaccaccacgatacggttgcctgccgcgcgtcatggcgtgttggcactagcaagcttgtcacctactctctccctccgtcccaaaaaaacgaatctagagttggatatgatattttctaataatacaaatatatatatatatatatatatatatgtccagattcgtagtactaagatgtgtcatatcggtattaggttgtttttttagggacggagggagtagctaccaccgccggctgggacggtagggttgttcgtcctccggcgtcgccgtacacaccaaggggagaaagactgtatgcccggctggtcttgtcgacctccgggctgagttcgggagtcaaggtttcgacacggaaaacccaacaaagaattagtatataattaattattaattaggtattagtttatttttttagaaatttgattaatatttttttaaaagcaacttttcaatagaaaaatttaaaaaaacttactatttagtagcttgtgaaacatattcgaaaaaaagagaaagagattggcaaagttggaagaagaacaaagcctagtcctaggcccggaccccgggtgatgcaaggcttgacgtacgtacaatgctgtggttggccagcgatgtcgtcgacaagttgtctgattccatggatcaatcaattgatcgaccaatgtatatatcaaagcttatgtttaagacttagagggagaatacatgtttacagcccacaaaatacacttaggatatccttaacgtgtttaagttcaatagagatataagatgaaattcgcactcttatatcctttggtctataacacatactacaatgtataagccgagactcactaagagaaaaaaaaagaccctactcaattaggattcagagaacaacatgtatattgcatagggataaaatgttttttttttctggtctagccttaagtataagattggccatagcaatattcttttatttacttatctctcaagacaaaaacaaagcaaaaatactgctttgctttttaaggttacttcttgtaacattgtggttgctcttataatgaaacttcactaatctatcccaggcgtgttcaaattaaggagggcgaacacacggacacacacgtcatttttaaaggggtaatgtacgctgcaggacgcactcaaagcatgcacgccgcgtatcaatcttacgataatttgttgttttccgctgtactgagatgctcaactgatcgtgcatatacaaggccacaaagagaccaccagctagtttggcctggtctagtttccaactttttctttaaacttttaacttttttatcacatcaaaacttttctacacacgtaaatttctaactttttcatcatattgttctaattttaattaaactttcaattttaacgtgaactaaacccacctttagttaaaagtatgcgctgttgcactggcaagcagagctagctagcacggtcctgcagaactgaacctacagatcgaggccgatgcattatcgtccgaggaaattatgatcgaggttgcatatgcatgttgccgtgtcgggtgccggccggctttgcgtcgccctgtggcatgtgcatgtttgctagctagctactgcatgatttctaattccaaattgctacttcctctattctaagggtgtgtttagtttcacgtcaaaattgaatgtttgaagaaaaaagttggaagtttatgtgtgaagaaaaattttgatgtgatggaaaaaataaaaaattaaagaaaaagttggtaactaaaccatcactaattaagtttatttttcatcgattccacacgtatcaatacatgtaaaaaactaaaacactcttattttattaaatcccagtgtagctatatatatatatatatatagacacacacacatagatatatatatatatatatatatacacacacacacacacacacatacacatatatatatatatacacatatatatatatacacatatacatatatatatatatatatatatatatatatacatatatatatatatatacacatatatatgcacacatatatatatatatatatatatatacatagatatataatacatatatgcatatgtatatgtatatatgtatatgtatgtatatgtatatgtatgtatatgtatatgtatgtatgtatgtatatatatgtatgtatgtatgtatatatatatatatatgtatgtatgtatatatatatatatatatatatatatatatatatatatatacacatatatatatgccgcgtgtgaaatactgaaattaagcgtgcatgctgcgtaagcactgacgatcaaactacgactctgcagtttaatcacgttgtccctgttgctcccatcttcaacgtgctccaaagtcgccaacattatttatacgcgactaaggcttcccttcaaacttccaaaaattccatcacatcgaatatctgtacacatacataaaatattaaatgtcgataaaaataaaaaccaattgcacagtttgcatgtaaattacgagacgaatcttttgagtctaattgcgccatgatttaagaatgtgatgctacattaaatatttactaatgatggattaattaggcttaataaattcatcttgcagtttacagacggaatctgta

SEQ ID NO: 8514 - DNA, 12105 bp, Oryza sativa
acgcctcccgttgcaagccgcgcgcgcgtgccgtggtggccgaccgcccggtcgccgccgccgtcagtctctgcacgcgcctgtcgccagtgtcgccgctccgctccaaaccgccccgccgtcatcgccgtcgtcatcgcctcagccccgccactcccgcgctagcctccaagggacggaggcagggcctccctcctccctcagccgcgcgcccccgctcacctcctccttttcccgaatcggcaaaggggcaagccccctttctccccctccttttcccctttttcctcctcgccggcgtcatcctccctgtcgccactttggccgcgaccgccgagcgccagctcgcgcccttgaccgcgcaagtcggttcccaaaccgacattgccgcccatttaaaccccagcctcccctttcccttcctcttccattcgcctccgtgccattgccgccgcccccgtgctctgtctcgcctccgccgtccttcgccaggcgccgggagaaccggtgcgttcgaggatgcggaaggggacttcggccgcgccctcttcttcctcttccccggcccgaggccggagagattactcccgcgccgtcggcctctcgtcacagcgccccgtcccgcacggtagtgtctccctccgttcttcctcctcgctccatctcccccccttagttttcggtggtagcacgagtagactccccgtagctagccggcgccgccccaaccgttgccgtcgctcgccgagtgctcgccgccgtcgccgctcgagctccgtagcacccgcacgtcgccagcctcgctcggcgtagctccgtccaatccgacgctagcatcgagttcccgtagccgcatagatgctctcaccgccgggaatcgacccctcgtggcctcgtcgccgtttccctcttccctccccgccggttgtcgccgccgcgattcgccgccgtcaagctccctccggcgaatccgagccgttggctcgtctcccctcgtcctgtgcaaccacccggtgtgctcgctttcgcctgtatcgccgtggttcgctccaccgttcgccgctgtcgtccgccgtccgttccggccggcgtcgtcgtctacctcccgctagcccacgtggcagccacgtaggcgccacgtcggcgccagctcagccgaggacgggacgggccgaccccggtcagcccctcccgtgcgcgcgttccaccgcgagccgtgaggctgcgcgtgggcccgccgcatccgcgttcaccgcgaaccgcgcctgtgcactgcgtccctccccgcccgcgcgcgtgcgccgcgtgctccctccgcacggtgagccgagccgctgacaagcgggtcccacccgggaccacgcgtggtgagcccggttcaccggctccctctctcttccccgcccgcgcgcgttctgggccgtcttttgggccgtccggcccagttaactcggccggaccgctccatttcccttgggccgcgccctagccgcccgaggaaaagtctatcttccctccctcatccttttctttttccaaaagggtttaaataaatcctttttccttcagaccaaaaatccaataatattaaaaattcaatatcttcccaaccgtaaatccgattgactccgttcaacttccaaaattccccaaatctcgagatctatctaatggcacgcttagaggtcattaatagggctttattttcgccgtttgttgagttgtcccgtttcgcgtgtagtttcggagcccgaagacccgcagtgcgaggatttcgaggatcaagctccggatctcgagcaaggcaagccacctttgaacatcttgagcctatatttgaaatttaattatattgcttgcaaaatattatgcattgataggatcgcacttaatcggttgtcccgtctgcaaggcagattggcggacctgcctaatttgttgaatttgatccttcctttgttaattgttataccatgtccccttgtaaccacccagttgcgcctcgatattcgtgcactctgtgcgagtatcgacggtcgccttcaaacttaaaatctgaaaaacaacttgggtaaaacttgggttttacaaaagacttggaaaacccgacgcctgggtcggtgcttgcgaactaaatgaatttctaaaaccgcggaccggggaacgtaccgggtgtacggttttcccgctcccgcacttaaggaccgattccttggaatttcatccgaacataagacaagtacgaccacatgggtggaatgggacacccctggctgagtaactagcttatcaggggagccatgatgccgagagacatgtggattcgccggggtggtgtcggggaggacccctgggcttcctggcacagtatggtctgggacctaacctgttgttggtctgggacccctctcgtcggcatatggtaaacctgtgtcggctttggaaatgccttgtcatgaaagcttggaggtctcccgacgtggttgatccccacgggctgggtgatccgggttagtaatgtcgtgtgggtaaagtgtaccccctctgcagaggttaactaactgttcgaacagccgtgcccacggtcatgggcggatgtgaggtgattcctagcgtagttttgtttgactactgcttgtgaaattgctgttgtgaaaaggggtttgatgtttgaaaaatctgtagctgacgggatcagctaggcccgggtggccgtttgaaaagttgttggcccgggtggccgtttgaaaagttgttggcccgggtggccgttgaaaagctgttggccgggtgccaaccttgttttaagatttaaagactgatacattgcacatactccgaccggacgggacacactgtctcaaccgtgtcgtttgagaagcacccacttagttgtttcagaaaagagttcaaataaaatcaattgcaaaaataccagcctttctttgaagcctgcattaaacacttatttcccctggcttgctgagtactcctgtactcacccttgctctatataaataacccccccagttgctgaagaagatgaagcggatcctgctgatgaggagttcttccaggagcaagccggttacgatgagttttatggtttcggcctagttcccaagtcgcgcctgtgttgtttggtccaagccctggcttccgtttcccttttgtaatgcagttgtgagctcgggatctgtccacagcccaacatgactgtactcctactctataataaagagacctctgttgctgtgatattctatcttcctgtgataccagcactgtttcctgggactggtatcgattaacaggttaatttggagcgtcacgggctaattccagtcgggactagctcggggcgtgacaagttcacaccaaacttcccccaaacttttaactttccatcacatcacatcacatctaaaattttcctacacacataaactctcaactttttttcccaaattaccaactttttccaaacttctctccagtttcaggaactaaacacagcctcagtttgagaattgacacacctaggaatttttttaaaaaagaacgattcgatgctaggctcaatccacatactggataatgtcaactatcaacaagaaggagattagcataagcttggcacaatcactttcaatattgaaattaaccaacacacagagcaagtgtgtgtgcccaaaatgttcaacgctgatgcaacgaaaatgaattaagccgcggtgctagctgcatgcatgtaaatatgtaattgagattgattcgaatcgaagagcagttagtagtgatgaactgatgataataactactgatgcacatgattgacctgaaaaacaaaactctaaatttttttccctgtttctgtctcctttgtggggtttgaaatggaaccatagaaagtgcgagtcgtatgtatgcacgtactacctgcagacacgatagatgattccatatcaaaatcaacataaacgcatatacaccgtacgtatgcttgaggattagtatctaacaaggtagttatacctttgtcctataataattatattttaaaatttaaatttatctcgaaatagttatcacaatagagtatcaattgttccatcaataacttatcatttatttttttaattctacccttaaccaccctctcgctcttgcctatacattatatctagtaagggacaccatagttttctttactcaattcttaatatatgctacatagaattataattattttaggacatataaagtatatatttatctgtaggtatttcaggacgaagttaaaccgatatcattagtgcctttatgtttagtcagttgtaatcttgtatacaaagatgtaattcggagtccccctcatctagatcactcatgctattcatcgtatttagacttttttttataaataaaaggaatgcatttttaaatgaaaaagtacgaaaccgataagttaacaccgagccattttttctaagttaaaattaatttataacgagccttcttccgattagtttgtgtgaataggacaacaacaaaaacctctaaaaaaaaggacaacaacaaaaaaaaacttgaaataattaacacaaactaatttaagcatgcaaaggccaccagtttaattaaagtgcaaaaattatcatttcgtctcatatgcatgatatggcagatacaagttgtgcgggcaatgcaacggcaagcccacttttttttttatctcgtctcctcgtgaactctacatatatagagatttatcacaagcgaggaaattaattaaccgaggaaaaattacacgcagccatgcaggtagaaaaactcgaaacccacatgtcagtgaaacaattttgacgccacatagtcccttatatatatatataagcttctcgtgctttagtattcgcgctcgctcgcccatgccgcggcggcgatggcggcggcggtcggcgggctagccacggtagtccggcgttggcgcggcggacgcctgctgctggaggagctggcggcggaaccactcgatgaagtcggtggccttgtcgtcgacgcggccgtcgacggcgccctccggcggctcgacggggaacggcgagtcggtgacgcggagctgccgcgtcccggcggggctgcggccgaggctgagcgccagcaacggggacggcgtggcgccgggcatcgacgacagcggcgtctccccgccggcgccagcagcagccgcggcgtcggcgttgagcatctcgaagacgcgggccacggcggaggcgtcgagcccgccgtagttgctggcgccgccgccggcgtggcgtgagccgccgcggccgcggaacctgaaggggaagacccccggcgcgtaggacggcgtggtggtgcagctgaactccacgtccctggggttgtggtggaagaacgacgccgacagcggcgacgacgacgagtcaccaccccgcgccaccccggcgccgcctcccatgaccgccacggcagccgcgccgccgtgcggctggtgggcgaggaggacgtcgcggagcgccctgccggcgagcttgccccggccgaggagcaggtggaggtccatcatgaggcgcttccggcacagcccgcgccgcagcatgtggtacaccgcgcgcagcacgtgcatcagccgcttcccgaacccgggctccatgccgccgccggccggctgcacggccctcctgtccgcggtggcctccgtggcgccgatccgagctgacagcgacagccgcaatgcagcagtgagctgagatcgagagcggaatcgaggtgggtggcaatggcggtttctcgctttggattttgcagctttggagaagggtggtgttggatgggtgggtggtggatggaacgaatgggaagaggaggtgggggcggtatttatagaggaggaggaggaggccggaggtggtggtggggatgaggtgagctggcacgggtggggcccacgtggtagatgggacttaagaactaaggaaaggggaagggaacgttgcgagttgcgggtggtggtggtggtgcaacggtacgcgcgtgtcacggtgcgtggctcgagccgccatcgcgaggattgatcgatcgtgccgcgagcgaacacatttttgcctgttcgatctctcttggtaatcaacctatcaacagtttttcctattgagcatgaaacatcagaagaaattatcatacaattaagtattaaaatcacgagaagcaatcgaatcacacttgaaacgttttactctaatgtatgaaaacattatgtttcaagtactggatcatcaacatatcagcatgcatcaaagacaaaaagtgtgaaacaccatcgaaatccatgccacaacattttgatacattagctgaaacgtcgaaaggtcacaaaaagtaccactctagcttcatcctcctttctagtatcccctcccacatcaccgattcagaccaggttaaccccaatgccaaccggctcctagccatgcacatcgccctgcgttgattcggacttcccctcgttccttcgcggttggtacttaaggatccaaagccctcaagcttggtgtgactggattcaacaattgcttgggggaatgatgagcagggttagaaattccggaatgaaatttccaaaccccccatgcgatattatttcatctgcaattatttttttgaatttggtaagattttgttcaaatttgagtaatatttattcaaaagttcgaaaatttcagtatatcgatgacctccaatagaatcggtcaaaccgaaaatttaaaccctaatgatgagtaataaggaagaacgggagtgtggaggcgagcaagggcgcttgtctcaacagttgctaggatgggggtgagtttgggtgcggattcccgatggtggcaatagttaggcacacacatttaccatcgatagggaggaatgatgcagggcacccgattttttttttatcggtcagatcatcttccaagttgtaaaccacagccgcttttcttctctttgtgtatgtttcttagacgaattcacatcaattatttattccattgcatggggtgctagttaatttaactatagtgcatacatccaccaattatgaaagtgaagctatagtaacaataatatacgagctgaagggaaagctttactcctgatgccaattatttacacgataaaaataaaagtgaaagtcagaagagaggattatgttgctataacactagctctacaaataactaatggtccggtcgccttccaggaagcttccaagcagaacacacagtgccattagcaagttgcaaatcttgaaatatcgcgacatatacaaacgggtgcttgcaacgtccaccttgcactactggatacatacgattttgccatgcatatttggtgtggtgtactgtggtgccaagctaactttggtcccgtcgcttctctcgctaattaagcaagcgaggcgcccctggaattttaggtttcttaagtcccctgttttttcttttgtttgagttcataatcagggttcacaatcccaacaaaaatcagcctgaatttcatgaaaactggaattcccggaacggttcgataagagaaactactcagttttctgatcatgttttaaaagaaaaactaagttttacagtttattcaaagtttatctgaatttcattggtttttacgggtttactaattgttttcagggttgttcagattgatgatatttcaaaccataccaatttttgataaagttactaaagatgtgcatctattttttttcaccaaaatttgttaaatacataagaaatcctggcaaaaattagcagtattgccaaattgataaaattttggtattgtcaaaattttggtaagatttattttggttacaatctaaacaaccccttcgttaaaaccggagataccgcttgtgcggttatcggtccggtaatgggattgtgaacctattcagaagtcgagtctccttttgtatgcggcttttcatatttgatccttcaggaaatgaagtggcacagtacatacaaaaaacatgtaaattttctccaaaattcatatgttccgaagatcattggtacaccaacaattgttacacgtactactcaaagtggcctgctagctagctaggcctctatatgcgtatagtagtaagactatacaaagtgcatgcctcttttcaccaggtgaatccatcaaataaatgtactgcttcatcccgtgatgctatagcccggtgaatattccttcactgtatatgaatacctaacagcttccatttactaaaaagttgaaacctaacagctgagttaaaaggaagatggagatgtacttcacagtgcagtggtaagaagtgtgtgctttcaatccaagattccgtatgtaatctctaacatgctcataattttttttaaaaaaaaatatttggagggacgcccctctttccaaatatccttttttttaagttgaaaagaggatagatattttagcagtcctaattgcggcggctagcagctgcaaatgttaacaaggcgaaccacaactaaaacacacacaagtacacaacatcaggtcaatgcatgcaatgaagaaagctgaaagctgctaggagaagaaaaaataaacatctgctgcgaagaaaagaatataaagtttgtggcactaatactcaattatattattatatataccaaattaaagcacgccccctgcaagtggtgataagagaatgtcagcaactgatcaaacgcaattagaaaaccaaactgatcaacaagcgagtaaaaagtggctaaagttcgttgcagagtatatcgtaacgtgcctactttgctttgcattagccagctcgaaaacaacatctcctaaagccactttattaccgctaaaacgccggtgcgaaattaccaccgggatgatacggcaaattaatttcagttcccacacatggcacgcatggcagatcgaaatcaaatcaaatttataatcgacaagaccatgtcttggtcaggattcaggaaacaatatgcatcatacggatgcgtaaagtataaatatactatgtacacatgtgagttaattaatcaatcaaaatggagtatctgtgttcttttgcacagttacaactgtacaagttgataagatcaagatagtggattcgtacgtacaaaggtataaatatacggacgattggatgcttgctgaacagttttttagcaaagcaaattgaaaggaagagccagaggacgaatgggaaatgtgtcaaggaaacggaagcaattaggtctgaattattggtgtgtgttcatttatggacaggttggagaaaatggaattaatgacaaacaaataaagaaaggtttgctggtcgcaagcagggtggtatgaaaaaaaacattttttatttaaacatgctggcacatatttttctttacattgttttagcgaaattgattctaattcttcaaagatcctaagatcatcatcacagattggcaataatccatcccaaaattatgtttttgggttttctaatctagatatagtaggaagtaaaaaaactagagaaaatccaaaattaattttccaaaactaaaaagtgggtcattctattgaactaccaacagaaatctcccgttttcctctaacctcacatggaagaagatcgcccctcatgagggaaggagagaagggtcacgggaatgtgagattgggaacatgagaagcggcgtcactccctctcaaatgacgagagcgaatattacagggacaataacttcaaaagtttggaaaaagagtagggtatctgttgtactagtttttagatgaaaatcctaaaattccaggatggagaatggagtaggggcaccattggtgatgctctaaatgaatgtccctcatgtaccttttttgtcgaatataatgcaaatggtgaaatttcgtaaaagaaatttttgtagagtatagtgctatttttttttctagaaaacgacaacactgatctaatatacatgttcagtttgatactttgattaaaagtaacaagttggttgcagagattaatcataaacggagattgttcaacattagagcagacctacttaaaaaaaataaacaaaacaacctctcaaaagatgtagcatacagctagcttgttctcatttcccagtcaaatgaaaaggagagacactcccggtttttggaaaagttcaaataatataaattccttggtgttcaagtgaggaatttatctgcttttctttcttcttcctcggttacttgtatggcggcatagcttagctagctttggctaaagctagcactcatgagcccggagctcaaagacgaaggattagtactactctgctttctaagggcccctttgaatcgtaggattgaaaaaagggaggaatagaaaaaacacaggattttggtaggaatgcaagtgtaaaaacagaggattgcaaaacacaggaaaaatataggaatgaccgtttgattagaccacaggaaaaatgcaggaattagatgagagagatagactctgggaaagttttccaagaggttagagtggatgttaaatttcctacgtttttgctctagaattataggagtaggaaagtttcctacgtttttccttttctcattcctacgaatcaaaggcatgaatagtgtaggatttcaattcctttgtttttcctccattttccctccaattcaaagggggccttaatttccttggagtttattggattcatatctgaacttactttcctggctaagggagcccactgtatggagtggatgctaaggaatgcatggtttgtgagtgccttttagtaactttgctaatcatggtcggttcttggttagtttacagcaaatgacagaaacatatgccagaatattacaggttcacagctcacagcattatgctcaagtgctgagtgaaagaaactgaattctgaacaatgggtgcaactatgcaatctttgtggaactttgagttccactcagaggaaaacactacctttgacaatatttatttatttgatgggatccacttcaactgaatatccatatgcagtacatggtctatataattaattaatttgtgcatttaatgacagttttgttgccacagaaaagatttggagactgttttagctgccaaatgccaaaataattgtagggcagcaggcctggtgctcaagttggctggtgctccccaacatgtgtcccctctggtggatgtagagaagaaaaaagaggcaattccatcaacaaaacacaatcaaaagcaacactagttttaggcacttttcacccttttgccaaaccaggctccctttgcttttttttttcttcttccttgatgtgcttttgattttgatccgtcaggctaagtgcgctgtagagtgtggtactacttggtagtagtagtacctagctagctagattccacacatcaacttccaatttgtggaagatttaaagaaaaaagggggattgcattatttggaaagcttataattagctgaaatgtgctaggacagaaaaggataggagtcttgaaagtgtaattagtgtgaagttgagaaggaaaatggcgttcattcttcttttgtaaaacaagtcagaaattaattatggccatcattcttgattccatcagttggctaagattatttcaggtcattccatgctatatgcaatatttgtaatagttgattttccactattttttagaaaaaaagtagagtgaaaaaataatcttagccatccaataagcaaaatggcatataagaaaaaaaacaatataagtaaaacttttatgtatgtgttattcctggtttaaaaaccaatgctaaaaaaatgaattacgatgagaaaaccaaaatcgactacaacattaaattttaaaatttaaatttgaagggcatcttataagctagtaaaaggcaagcgatgtgattcaaaatctccttttgttgtataggctgtttggtcgtacttgcatagtttggtaacaaagtgtcatcaccttcttcttacaataattggaaagcttgagatgtc

SEQ ID NO: 8515 - DNA, 2896 bp, Oryza sativa
ggtcacacaccgcgaccggtcacggaccggataagcgtgcgctgcgccgcattaaatgcggcctggcgcgctcgtccaacccgctataaatgcggttaggtgagtcccgctgtgctcacctaacccacacacgtggtgccaaaaccacagggggtcggggcgccccagccctcggggccgaaacgggagcgcctgagccctcggggccgacacgggagcggcccaacccctcggggagacagagggaggggtggccacgtcaccctcgggcccgatcccccccccccccgagagggtcaggccacgtgggtgaccgcggctacccaagcctctagtcacgatacccccggccccatgtcaccgacacgtacgaaaccatataaaatttatcaaaatttcaaatttcgaatttaaaagactaccatggtttttcttttaccgtaccccgtggtaagcacgattatcggcgattttgggaaccttggatgttacatatcctaatacaaagaatttgtatacattccgttcgaggtttagtttgttttgggacgaataatagagtatgtctaaattcatagttagaagtaatctttttttttatggatgaagtatataggtcagtgtcacgcccagaaattcccggatagaatttcaagcagaatgtgcattaaaatccccgtccaggaccggccggggtacacaaacgacaatgttgacattcagatccacgtcttacaaacatcataaaagtcttacataaatgcagcggaagaaaagaaagacaacaagagctaagccttgactaaaactgaagcgggaacaccactccacaggcatcctcgacggcacggacaaagcctactcctcggagaaaccttcatctgacccgaacttgaactctggggttgggaaaagtagagtaagactgagtactacccactgtactcagcaagtcataccggaataggggtatggtgcagggaatcatcaaagaagagctaaagtggttcatttgcataaagcgagcatttataaacagaaattgaaagatttaaacagttgtaataattaattaatattaatcatccgctgtccaacgctatcccacgttgcgacaggcccagccatccacctaaactatccaaattcaaaagattacactaaggtgagactaatcacggtgaatctggttgaccgcccataaccgcgggcacggctattcgaatagttttactctgatcagaggtgtacaactgtacccacaagacacagccccacgacacgtttccgtgcgccgacatgtcaccacgacataccggaaagaggccgtgacaggacccttcgcataaccccctctaaccaagcacaccacacctcagatttcacccccactcctcgcaaggcagcgggaagtcccctctcgtgcctaggtgaatccggaagccgcataggccgtcgcagggcccatccaaactccatcacgcccacccttgcctggatgcgtcggctagaggaaagctacgctacaagcccagccgttgcccacgctggcttgtggtaagtacgataagttcttccagggcatcccgcgaaccggtccttaactgccatgggtgcgaccagcaaaaccatgcacccacagcccaccatgtgatttattttaattaaccaacaccaaagcggtgttactaatccaacaaaaccattagaaccaacagtctaaacattaataggatttttccccattgtgaactagttgaactaagcatggctaagcaatccctagtccaaactctaatcatgttataaccccaagctgacaaagaaacatggtacatcaatagcatggctacgacaataggtaaacaacccatagtaaccttataaaacgatgcagtatttgaacgaaaacaatagagcatttgcattataggatcaacatgttcaagtgacaagcatgacttgccttgctctgctgctggaggaacctcgacgactatttcgaagtacaccggagcgtcggaggaatcggaatctagcgacatacaaagcaaacattgcaaacaggctataagactactgaaacagggaacaaaaccatttttaatagattctacacatttttcttgatttactgagacttgaatgggcttaaacggagctcggatgaattagttatgaattttagaagattcactgtgtttattactatacaagaaaaaccttaaatcatttattgcgcaatatattccaggactgacgtcatcaaggcggggcgcggcgccgacatgcgggccccaccggtcagcggctcggggagggaggaagggcgccgacaagcgggccccaccggtcagcggctcggggagggcggtccacggcggatcgggtccacggaccggggaggagcggcgcgccacgcggcggccgaaccaatggccccgatctacccaagggtagatcggacggcgccgggagctcggatgaattagttatgaattttagaagattcactgtgtttattactatacaagaaaaaccttaaatcatttattgcgcaatatattccagggctgacgtcatcaaggcggggcgcggcgccgacatgcgggccccaccggtcagcggctcggggagggaggaagggcccccgacaagcgggccccaccggtcagcggctcggggagggcggtccacggcggatcgggtccacggaccggggaggagcggcgcgccacgcggcggccgaaccgatggccccgatctacccagatcggacggcgccgggagctcgcggccggtgcgcgcgggcacggcgcaaaccggcccggcgaccatggcgcgcgacggcgcggcgcacatgcggtagcggcgcacatgcggcagcggcgcaaga

SEQ ID NO: 8516 - DNA, 16037 bp, Oryza sativa
tgtcatggccatctcggttgctaagacaaaaccttgtgcaaggaatcaaataagagagaaacacccaatagtcatcagattcaaaatcgaggccaggagatgctgggtggaggtggatgggttggatttccttaagacagtagggtctggatttcctagagaatgctattggctctggtgctggcagcatggacgtacgtcgggtgatggcgacggtggcagggcgacggtagggcgatggcggtgcgcaatcttgaactcggcgcgaaggacaaggtgtacaatgggacgagattaaaggtgcaatcagacaggcccctgaactcacttataatacaaataagcgggtaaaccggctgggtccgcaggtctgcccgcttacacccttagatacacttgtccttaccccctactagatctagttaccaacacaaatatccggtactaccatcatactcttttcaaattagtggtgggatatgtcactggtacctcctgtagtcctgttacctggtagtaatagcagttggtggtcctaaataaaatccctgttagaaaatagtataagatcctctaatatcccttcgtttagtcatacgtggttacattttataggatctcgaagtgatgagtgttgatgaaaaacacgaggcctgggaaatctgcttaactccagtgcatgtccaaagctcgccttcgggtatgctagcgtgccagtggatttgatcctgcaatcaacaagaaataaaggcaaagaaaccgcggttaaatctataaatgatagccgattggctaggtgccgatgacatatcatttatctttgagccggtgtcatatatgtatcgatcggcagccatgagtaaataagaaggaactaaatctatttgatcggctgtagatattaacaatatatactccttatatcgatatatacttaaatcaagtgattgggatagatcagtcgccatgccgagacaatataaatcacttagatcgaaatatatattaataatgggactatatatgttcatagcatagtcgatcagatagatctagcatgtatgggctaatactccgatactactctatattaagatattaaagcaagcagaatatatcaaacaaaagcttaatacacttaaatgccacaaaatcttaatataaagggcagatttaacatgtcagtaaagcatatataacaagtatagttaaatcagctaagatcggctaaaaccccgatactaccctaatcggcaaccaagaagcaagctagaggttgagattctaatcacgactcataagatcaaacaactgatgcagctataagtatgaaaagaaggacaatatctagacaatcaagccattggaattttcatagagtggtagatatcatgtacaatctaaaccaacatcgatatttaacctaatcggctgacctctactagtagatgttagctgattgtaggttagatgatgatattgctatatattatataagatatatgataactcgacggattacataaacaagattagagtatcatagagatggaagcactaatcccgagaacgcaagccgccataacaagttttacctcttgttgaagatcgaaaccgatgcagctcaacccgaaagcaataacttgtcgaaataaaacgaaagcaaaaaagggtggcgatgcaccaagattgtattaaacgtgtgtgttaattgattacatagggttcggggtctatttatacccgagaattacaaactatgtccatatcggacatgactcttatctctaacaaactctaagataccataagtctttgcggcagacttttgcccaaacatatctctaaggaaattacataaaatatactaattaatagatacagttgccttctcaggactctatccacgcgtggcaatcatcttgaagcatatcgacccaacccaatatcgtacaccaagtcgtattgtcggaatcggctgcatcaccaaaccaagtctgactcgaacttagccgatccaatcgtagctgatccggactccagccgatttttactctgtttccgcgataatccttatctctgattccgcttcgatctaatcttcctttccgatgccgatattaccaaatttggtcgttaacaatgagatatattaatagtcttcatttatttgaacgtgtatttaaagagacacattcacaattatgtgtatacctcttattatctctgtaactgaaaaagaaagacattgttttgtacattgggtttgaagtttgtatattaaattatactaacggattaaaattttatattttatattaaattgcttgattatattaataattacaatttcatatcaattattacaatgctttagatagatatcacaagtgacatgatttaccaattttcttccataagtttcttttctcgagtacatctaaattattaattccctgcaacacgcgggtatatatatatatatatatatatatatatatatatatatatatatatatagacacacacacacacacacacacacacacacatatatatatacatacatacatacatatacatatacatacatacatatatatacatacatactacatatacatatatacatacatatatacacatatacatatacatacatatatacacatatacatatacatatacatatacatatatacatatacatatacatacatatacatatatacatatacatacatatatatacatatacatatacatatatacatatatatatatacatatatatatatatatatatatatatatatatatatatatatatatatcattttcttcaagagaagacgttgaaaatttttgggagaatattccaaagttcaataattaccaaagagcatcaaatatggtagatattctctcatataatccaaactagcatgaatgcagaagacaacaagtcacaatatgcttaaggtaaaaatccaacttctcgggaataaacagagcgcccgtgattagaagaagacatatgactctctgaaaaacccgtgatgctacagtgtgataaaaaatatgagtgaagattgagctccctcttcggcttctataaaaggggaagctagcgaagccagaaggataccaagaagcagcaaccctcagccagagtctcatgagccactctctaagctttagtggtagaaatctgttaagagttcacattgatagtatattgaagcaaggagtgtaatataaattgtgtaaggtaagcaacccttgtgtgtacaatccctcggggttccctaaagggaaaaccatatgtattctattttgtggtaatgtagtagttttattaagctttccttgctcgaccttgttatgtttatgttagtttaaattctacgctaatgaccctataggagagatgcccttcagtaagttctcatagttcaccttgcatgcagcaggtaaagagaaccttttatctgttgaagaagtgttcccttcgggtggaactgcctggggagacggtagaatttttatctcacatgaatagacccaaggacgggattagggtaaaagcttaagctactccttcagcaaaatagttagacatatggtgagtaccgagtaggattacacatctatcgttgcacgctcggctgtcccagtggtttcgccaacccattaagatcttgaaaatttaaaaaatatatacataaatatccatggagaaatatacattaaggtaaatgcagtccactatatggattcttctgccatctttacttgccaaaatcctacttttaagtcagatttcgagaaatatcccttggatattcaactgtaagtaccgagtggactgcatagatgcaggataatactagtatgatcatccaaactagcatgaatgcagaagacaacaagtcacaatatgctgaaggtaaaaatccaacttctcgggaataaacagagcgcccgtgatcagaagaagacatttaactctctgaagaacccgtgatgccacaatataaatgtaattattttcactaagctataccgaagatcatagttggcactctaataatagtcaattaaatttaattgttgatttgatatataacttctatataaattggggaaaaagaaaagacgatttggagcaaaaggttgaagagttatataaagaacgaaaacaaatagtagagcaatattctgtttttagtactaagctaaatactgctttaaaattactacaagaatataaggcaaagcaaaataaaatttcacaaaacagtgattacatcaaggaaccaaaccatggctctgataccagcttatttctccacggataattttgctgccatgttccaaagaaaaatgcaaaatatatttaatggaacaaaatgggttaatgcataacgtataaaaaattcaattatatgtaaaatcaacataataaatcctaactacataattaaaacacgtccaatagaggcgaccccaaaggatatagaagaattattaaaggtagaggcaataagagaaagcaggagccctcatagatcagctgcatttatagtaagaaatcatgacgaagaagtgagaggtaaatataggatggtcatcaattacaagaggttaagtgataatacatttgaagatgcttataacattcctaataagcaagaatggatcaatagaatagtagacatttctcgaaatttgacttaaaagcatgattttggcaagtaaagatggcagaagaatccatagagtgaactgcatttacctgtcctcagggacattatgaatggcttgtgaagccactaggcctaaaaaatgcacctgccatattccaaagaaaaatgcaaaatatatttaatgacaaccaagaatttatattagtctacatagatgacttattagtcttttcaaaaacttacaaatagcatattgctcatctagaaatatttttttagaaaggtggaacaaaatgggttaatcttatccaaaaagaaaatggaaatatgccaggagaaaatcagtttccttggtcatgaaataggagaaggcaaaatacacctacaagaacatattgctaagaaatttttacaatttcctgatgctatgaatgataaaaaggaattacaacaattcttaggaattgtaaattatgctagaaaccacattcaaaatttagcaaagttagcaggaccattatatgctatattaagaaaaaatggtcagagatattttaattctaaagacattaaattagtaaggttaataaaagaaaaggtgaaagaactaaaacctctagaattacctttagaagaaaactattttattattgaaacagatgcatcgcagcagggttggttcctgtattaaaacaaagacctgctaaatactcatctaaatcagaggaaaagatatataggtatgcctctggaagacaatacagatcgagaaatcctagaaataatcaacgcgataaatgcttttaggttatatctagggtttaaagagtttacggttagaacggactgtgaggtgatacgtagatattataatcagcttaatagcaagaagaattctactaggaggtggatcttatttgaacaaatcattactggaaatgactataaagttgtatttgagcatattaaggggaaagataacaatttgcctgatctactttctcgtttacctattttgcaggtatgaagaaatctatgaattataatggagttgaattcttcacttttggggaagataataaactcagaatattcccaccaaactcttataaatttaaaccaaaggaccatataatcatatatgaagtgcaagaatgtattctggacaatttttggtatcaatataataatatgaagggctatatcctatcaatattaaatagtcttgctgaatattttcatttgataaatgaattaatgccagttgcaaaaaatattgaagccatacagcaaaagcccatttatgtggtttttgaaggaagagtaccaggcgtctatatatcctttgaagagataatatctcaaaaaatagacgcaaagctaacagtaggaatatcatggaagaaatataaagacattgaagaaccattaggacaagctaggaaaatattgggaataaattattatctagagccagcggcaaaggaatatattcaaaagtgcaagaggctagaaacaagaaaaatccagagcccccacattatacaaatataaaggaagaagggtcatccagaaaattgacatataaagaatgcttaacaaagggattagaccccttagatagtgaatatattgatttaaagataaatgaaaaaattgcagaagtctcgactcagtgaaagaaagatttaaaggaagaaattttcaaagaattaaagcaagaattaaatgaaaattttgaagctctgaagaaagcatatgatgagaaatttgaaatagccttttctgatgatgacactatggatatcggtggtcatgggcaaccagacgaatagttattatatataaagacctcattgataaggtattatcaattatacgggcatggtagaccatatatctatatctgttgaaaataaaaataagattacaaaggtctgtcgttatatcattttcttcaagagaagacgttcaaaattttgtggagaatattccaaagttcaataattaccaaagagcatcaaatatggtaaatattctctcatataatctaaactagcatgaatgcagaagacaacaagtcacaatatgctaaaggtaaaaatccaacttctcgggaataaacagagcactcgtgatcagaagaagacatataactctctgaagaacccatgatgccacagtatgataaaaaaatatatgagtgaagattgagctccctctccggcttctataaaaggggaagttggtgaaacagaaggataccaagaggcagcaaccctcagccagagtctcagaagccactctctaagctttagtagtagaaatttattaagagttcgccttgctagtatattgaagcaaggagtgcaatataaattgtgtaaggtaagcaaaccttgtttgtatcatcatccctcggggttcccgaaaaggaaaaccatatgtattctattttgtggtaatatagtagttttattaagctttccttgctcgacctgttctgcttatgtgagtttaaattctacgctaaggaccctataggagagatgctcttcagtaagttctcgtagtccaccttgcatgcagcaggtaaagagaacctttatctgttgaagaagtgttcccttcgggtgaaactgccttgggagacggtagaatttttatctcatatgaatagacccaagaacgggattagggtaaaagcttaagctactccttcaaccaaatagttaagacatatggtgagtacagagaggattacacatctatcattgcacactcggctgtcccggtggtttcaccaacccattaagatcctgaaaatttaaaaaatactccctccgtactcataaatgaagtcattttggacagcgacacggtctccaaatcacaactttgacttcttgtttctataaaaatatttattgaaaagtgatatatgtatacttttatgaaagtatttttcaagacaaatctattcatataatttttacattttcaaactaaaaaacttgagagttattcatgatttatattctcaaggtttgacttaaacattgtcctaaacgactttctttacgagtatggagggagtatatacataaatatccgtggagaaataagttactcggtgcgaaatcaacaagaggcagcaaaatagcaaggtgaccgtgtatctctactattataaaaattgaagatatttttaccggtacttttggtacgtcatccgtgtttgaatccgtttttaagttcaatcgcttttggaaatacagatccatgtttaaatcggttttaattttgttcgtttttaaaaatacagaaggagtcgtataagaaatctttttaaaaaacttgcgtgctaaattgagacgattggaccctaattgcggctcatgattttgtaaaaagaatatccaagcgaattcccacggtgaattttaccttagctataccgtacaataataatacgattaaaatagcattcacctgttgcaacgcacgggtattaagataatcctgtaagctatatccaaagggccaaggcgtagccgagcacgtacgttaggtatagcagctgccacgaagagaccgccgttgagttgaacgaagaaaagtcctagtcgattatatttacgtcatctcggcctggtcaaactctcccgcgaccgtatagtatgcgccgctgtccccgtgtgcatgtgctagctatcacgatatatagtacttactcgcgcatgatcgacccacaaaaatcgtttaaaatttggagcacaaactaattcttcttatcgttgtccaattttgatatagtttcgtaaccaagatttgttaaaaggggatgtttctagtttcataaatccttatatcgaagccgtgattatatttttttatttaaatctacggttacttcgatgtatatcattttggatgaatcattcttttatatattttccttgatgtcatgattcaatgtacattcagttttatatatagcaataattgcacttcataggttataaatgtatatgatgtacggatggttaaaattaaatttaagtataagaaaaatctaaaagttactactattatctaaacgatgcatgtgacttcatacgtatcaaacgttttattctttttattctaactatacatgatatatatacatactaccttcgttccaaaatacttgtcatttttatttattttttacgtttgatcattcgtcttatttaaaaaattatgtaattattatttattttgcttgtgacttgctttattatcaaaagtattttaagtatgacttattatttttatatttaggcggtgtttagatccaagggtgtaaagttttggcgtgtcacatcggatatacggacacacatttgaagtattaaatgtagtctaataacaaaaaaaattacagaatccgcctgtaaactacaagacgaatttattaagcctaattaatccataattagcaaatgtttactgtagcaccacattatcaaatcatggagcaattaggcttaaaagattcatctcacaaattagtcgtaatctgtgcaattaattattttttagcttatatataatacttcatgcaggtgttaaacgttcgatgtgacagtgtgaaaaatttttaggtgagatttaagcagggccttacataaatttttaaataagataaacggtcatacgttacaagcaaaattaaggtcaaaacgatatctattttgaggcggaaggaatagataggagcacaccatgcgtgtacgcacactgtgtaggagatgagtatcataccttagctactacggagtactactcaacatatcgtacggcaccggtaggaaattatggccggcgcagtgtctagctggctacataatttactacagaattggctatttttctaaatttatagtattagaatatctcgttatatccacataacgtatggggtatatacggaacattgggagtactagtagctaggtaggtcggtaggtgactgatctgatcctgaccgttgaatgtgatcaagtgatctgttgaaccctctctccaatgatcacattgctgcactactattagtcacgtgtttcacatgcatttctttgaaagaaaacagtgcctcatgttttttgttagaaaatctttcatacagttgattagttagttcgctaatttgttgggattagtcatcgtcatgtaacgacttgcacaacaaactcatttctaatttgctctctctttgttttgccgccgcccacgcaatgtatatatctactgcagattccttccatgcatgcatcttaattaacttctccgaattcatggattccaaatgaataatgaataagatgctaagctaggtttaccaattaattggctaattggcaaccaaatggctaatcatcatcaccatcatggcatcatcatcaaattttctaaacgttgcaccggaaaatcaacctagactggaattccttccaatccttcgctatagctagctagctaccacaacgatccaaaagttttgtcaaatatttagaacggggatagctaggcagtgtcgacgaagatgtgatgtgatctctgaatatctgaaccgtcgtctgatccacaaaaagcttcccggctccggacgctagctgctccatcccatcaattctctccattctcgcttgcatccagccaaaccaaattgaccgtggactgatcacatttatactgctacatcatccgccgttaatatatattttgagagaccatatcattgatagatacatgcatgcatcctactaattcgcccagatcaacggccggtctcgagacgtactcgccggtaatttgccggaaattgttatacgttttccaagggaagatgtctttttttatgccatctaaatagttatgaaacattttgattaattttcttttcacgggatagattaatatacgatatgtatcactctgtaaatatgcatgttcagaatttcaacccctacatgttattgtaaaatgataaatatgactgtgaaaatgcgtagactagtagagttttttttttcattttgttacaatgcaacttggtattcatgtttgtaaagtaatatatctcatattaatatatcttataaaaaattatatttttaagttattttggtggcttacaagaaacgatgggatcgatatattccttcgaggggaaaacaaggaacatttcccaatttgccattaatctactctcactcatcacagtcatcatgctagttgatctgcacgctgatccgatccggccggaaatttcgaacttaattagcacgtggattaattagttggcaaaagctaagtacaagtcattgtgtggtcaattgatcgactgatctgttgctccccgcttctgcggctttcattggctataaatacgcagatatgtgctcactgcctagctaccagtcttgcatctctaactatatatacacatacatgtagcatcctgctccatcttaactagctactactagtgatgagcagaatcaacctcatgcagtaatatgctgtgctgatcgaattaatttacacatatatagatagatagatagatagatcgttcgaccaatcgagctagcttgagcaaactgattgacctggtgaagtggtataattaacgagcagatcatggaggattgcagcagctggatccatggctacgccaacgctaacgccaccgccggcaacaacggcttcatgtgcggctacgctgccaggtaggtgttcaaacatcttgatgatcaccgtgacacgatcgatcgattgatcgcgacgacgacgataataccatctgtaaattagtcgtctctgttcttgagtggtttggctgatcagttagttaattagctacttcgtgtttgcagctgcagcccagtagagtttcagcagcagcaacagctggtcggctcgcagattgagcaccacctcaaccaggcaagcttgatttgcaatttattcgatcaagaaacaatgcataaaatcaaagaaattttaggatttaatttggtaggtgtcgcgttttattacggcatgcagatcagcatgcagatggggatggatgacgagtcggcggtgtacgacggcgcctccatggtggacgtcctcctcatggcttcctcgtcgccgcaccaccacgccggcgccggcagcttccagtactcctcgccgacgtcctcctccgcctccttccgctccgcctccgtctcgtgcagccctgagagctcggcggcggcgacgacgcacttcctcggaccgccggcgccgtccgcggcggcggcggggttccattacccggaggtctcctcgcaggcgccgttgccactacccttgccgccctacgagccgcagcacggccaatacaccaccgtcctctcgccgccgccgccggcgccagagttgccggcgactactacgccggcgaccggcggcgcgttcaggcggtacgcgcggcacctccgcccgaggaggctgcccaagccgggagggtgcgggcagaggatgttcaagacggccatgtcggtgctcaccaagatgcacgtggcggcgacgtacaaccgccagtactactaccagcaggcggcagccgccgccgcgtcggcgtcggcggccgaggcgccgccgtccggcaaccagctgcagcacatgatctcggagcggaagcggcgggagaagctcaacgacagcttcctcgccctcaaggccgtcctccctcccggctctaaggtatacatacatacacgtatcaatacgtacatttgtacgtatacacatgcatgatcattcatcaacattttgttcttttgattagtgatcttgactagtaatatttgcttcaatcatttcttcctttttaatggtagaaagacaagacatcgatactgatcagagcaagagagtacgtaaaatctctcgagtcaaagctgtcagagctggaggagaagaaccgggagctagaggcgaggctagccagccgccccgccgccgccgccaagaacgacaaaggcgagacggcggcggcgccagcgccggaagccggcgatgagacgaagcgaaaggacctagtagagatcgaggtgacgacgagcggcggcggcgccggagcggcggatgcggcggcggcggcgggaggagatcaagagacctgcacgctcaacgtagacttgcgcggcggcggaggcggcggaggcatgagcacgacggacgttgtgctccggacgctgcagtgcctgagagagcagatcggcgacggcgccagcctcgtggcgatgagcaccagcgccggctccggcggccgcccgcctcgtgcaaacctaacattacagctcaaggtgtaattaattaataaaaaagcattctactaaagaagttaaaggaaaaatctgtctcacatctcagtgatcagaaaaaaaaaagaagaaaaagggaggtgccatcagtgcaaaatagcatgcatgcatgcaagcacattgttgacagcatgattgtacatttttctctcttaagataatggaaaaccttacacatatttcatactagtagcaattgattcagctggcatatgtggacatgcactgttcttgacagcttgattaattagtcttgacacttcagttaattaattcactctgctctgctgactatcctgcgagccgcggaaaagtctgcatgatgaccgataatgatggagggctaataaacatggcacttctgaagttagtgatttcaggtcaacattaagaatcaagcgtgcaagctgactattataattagttgtcgtacgatgacgtgcatcgtcagccataattagcagacacaaatattatactctgaaaagtaaaggaccgtgatgtcagactggtaaaggaattctacaccactgtaaaaatcctcagcaacgttcgtacgtatacacgatcgcatccatgaatcttcaggagttgaaatttgagaaatacgtaacggcgacagttcctttactcccttgttctatattacgagtccttcggaccttttttcgttattcaaattcgttattttaggttatgtatttaattttaaaacagagaagacatatcattatagtttgggcccatgtgtcagacatgtacttactagattatctaatcctacttgcctccttgtgcccgcaacgcaagcccccacccaagaaaatcagaaaaaagaaattcacaaaatgacctcgtgctttgtttttcagaaaagtcctactaccaacccatttccagtcataggggcaaagagaaaaatttaatcttcatatgatcaaatcaacatgcaacgcacggttatgctacaacagggagttaaaaattgtagtttttgttagtaaaaaatatatagctttctaataaatttgcttgttctggttgcatcctttaaaatgtatagctaaaattacagaaaatgacgattttaacttaaataaccgcatacttttaaaatatactcttaatggtctattcaacttacagattatggactctcacagatagtggtgaaaatgctacagaatattctgatcatacctgctttcttttccctttttccgaccatgttagcattatcttgttttcatccagaatttcgaagaggcaagatgtaacttttgaaaaacaaatcaccaacattttctttagaaatctattaaaattaactttactgctttctaatattaattttattcatttatgtcctcaaatgtttttgtcattaggtcagtttcatccctataaaggaattgggcccaacttatttaagtcatgacattgttcgtgttatgctaggtgatgcagtgttagcgagagaaaattgagattatggcattatcaaaggtgggttttgccacaatgccattcggcagattggtttcgttgaattgccactctcaaaccgtgtgccattgctggaatgcattctctcatgaaaatacccttggacttcttacacaacttgttttcttaccatgttagtttgctcatctgcagaatggtattttaacgaaacccacttttgacaatagcgtagtctcaatttgcccgtagtccgtctaggctcatgtgaattattcatcgaaattatatataattaaaaaataaaaaaaattataaatattgtttatacgtcatgtttgatacaactccacatcttaaatttgcgctggatttaatgtttgtatgttaaagtatagccgtttaaaatttttatcttatttaaaatggaaacaaactgattgatctaaatgttatcaacataataacgaatttagatctatggatttgtggagctacgaatatatatatacagcttaaaaaaaactttgaatctgaagccgtgttaaaaagggccatttagttatgattgtttggtctctcaatttttttctaggtccgccattaacgatgacgggatcaaggtaagaggccgggacagccaaggacggcaccgtggcatgcaatgaaaggtcgtcgccggcgacaccttttgtcagcgccgctgcgcaaccgccgagcgctatatatagcaagctagctagcgagctagtagctccggcgacaccgagctaattaataaccgacacataccgctgctgcaagtttcgacgaggcttcatgcatgcgtgttgtctcactcaccgacgacctacgtacatgccgttcgtgcagttggccgggtgcagtcaaaacgaagtagtaattggtagtatggtagctgcggtcgtaacatgggagcagtatttacttgaattatatgtacacttattggggtacgttgaaatttcagcacgaatggtacgtataaatgatgatgatagggcgcgctgacagatgttttgaaaaccaccgtggtatgtacgttaggccttgtttagtgccaaaaattttttttcccaaaaacatcacatcgaattttggacacatgcattgagcattaaatatagataaaatgaaaaactaattgcaagggggggaaatttagagacgaatcttttgaacctaattagtccatgattagccataagtgctacagtaacccacatatactaatgacagattaattaggctcaaaagattcgtctcgccgtttctaggcgagttatgaaattagttttttcattcgtgcccgaaaaccttttccgacatccggtcaaacgtatgatgtaacacaaaaaaaattttatttcgtgaactaaacaaggccttagtagttagggcctagctaggttcgtacacgactgggctgcaggaa

SEQ ID NO: 8517 - DNA, 26965 bp, Oryza sativa
tgggtcatatctctatctaaattaagtttttttttaatggagtactcagcaatgatagctgagtagttgagtagatgaatcagcaattgatatgaaataattcatgttaatacaaggaattatagctgtcatgcccgtgagcaatcaagaaggatttgctgctctagctagtggccagaatgcgtgtcgtgtttgatttacctacaatactcttgtatacatgtatgatagaatctctctccaaccatatctttttaaaaggacagatgcgttagagacttgtattccacgatttttatattttcagcagacgccttgcctaccatgttaatatttttaatggtgcagtaacagacccgtcttccaattaataatttatcttctttgctatagcaacgtaacgaccgtcaaatgttcactgcagagagggatgacctcatccttcgtgccgtctgtatcaggtgatcaattttattaggaaatcagctaagctgcccccaaaagtaaataagattagcttaaggtgataaattagtatatagtaatcccaaagtagcaagtcagcaagtggttttattattttaaagaaggacggaatctttccgcttcccttactagttaagatttgcaaccaaccggcaatgcgatgcgattagaccagaccactattttaacgtttcatacacatcaccctacaagatcccgaccatagtgttttgacgacttgacctaggtttacatttgcaatatcttaatcccctcgaactcccaacggtgcaacattagaaaaaaaggtgcgcagaaaggaacttaccaggaactgtctcgatgcatgaattttggcggggaagcagaagctgaactgacgactgttcaaaggtccaaggaaaatgaaggcctaatcctgatccatgtcccccctgcactgcgagtgtcctgccaccataaaccggagcctgcaacagctgaccagaagcaaggacaagaatgcagagcagaacgatcaaactctacatacctggacgttggattcttagctctcgagctatgtgaaatacccttctcatctgtggaaaatacacaactaaaggggtggacaagattgaccagagactcttcttcatcatgcactgccgtcatatgcaatacaatgttgatatcatcatatacggcgtaagacgaacatcttccattgaaagttacagcacattagtagtctcctttcaatcagtaaactgttgtgaaaactggaaagtatgcagttaaaatgaagttatggcccttacctgggatagcaactccattggctcctgatatttccacgaaacgggaattccaccaaacaagtaaatttcataatactgcttacttgagaatagtaagcaagtcataatcctaaagcattggtattctctccttgacctacatgtattatactggtttaacgagacatagagaagtcatattgtgtcagtccaccatatatagatgcaatttcacatagactagtcgatagtattacattgaatagaccatggggaaaaacaatattccaaccagatggcaaaactcttgccctgcctccaatccgtctaaaaggaaaggaagaaatgtgcgcacgttttggaagtcagttgctaaaaaataaggagtctactactctattctgtactggtcaattatgatgcatgagaggaaattagttaaccaatcaggcagtgcggtaacaaaatcccaaggtcatcctaattcctaagggaagaactgaaaattcattaaccaatcagcgagtgaggtaagccggtaacagatttcagggcacggtaggtccacgtcaacactctgtaattcactaatttatgcctcaatcttccataggtaaaaagtggtaggctaaccccataagcccctccaggcctccactaccaaaaaaaataaacacacacacacacacactgacacaccaacccccgggagagagagagataggtcgttctcaaaagaactccagacttcatgagcattcttactatcaaagctttgaagattagggagttttgtcgttgctcgatcgacacctattagacatcgtcactttgcttcattttctactcgcagattatacatcatggaaggatctcattacacgaaaaaaaaaagatactttccccttgtcgcttgaatggtaaactatatgaaaatgacagtcagagaggaacaattggttcatctgttaccaagataatcgtatagaaggaagaaagttgcttgcttagagtggtggtgaccttgagcaactgccaccttttggtcaataggagtggctctaaattaacaggaatttgcgtacagtactacagtggtgtattaaaaaagaacccgcttacatgcctacttagacaagccagcttctagaagtttattgctttaactacatatgctttggtcccaacaatagtattacagtgtacgtttattatgaaaagttgctcctttgcatcccttgtccattcatttgtgagcatgtgatgcggtaagcatttcatctatatacattagcttgggaggatctctgcacgatccaggcacattgccaccttatccaactccaactcgggaacacattactttggtttgaaccgatgaacccaataaatctcagttttggttttctgtttactgctcaaaggcaaagaccaaaattagtgttggccatgagagctatacgactatccatcgtagctcattataatgcggatggcaaatgtcatgtaactggtagtagtaggactactaatttgccatatgtggatggcaaatctgtactgattttgcatgatatagagcaaaataacctccataatgtattgttagtgggacaaagtaagcagcagcagatgctctgcagaacaagaagatgggggccacaattgtttcgaacgctatgtgaaccagtatagaaagcacatggagaaattttcattggcataatggcgtttctcaatgcaatgcagtctgtatcccaaaaaaagcccatggtgaggaattaattccgcagttcagtatagagtagcacatttccaaatgcaacgtgtgtgccgggtcagagcagcacatttcctaaagcataagcttaaacgagtggatgcaaaatgtgtgtagcaccagaagaactcctgcaacgtagattgtccagtctccactctaaacatctccaatccaacacccaaacaccctagggaaagtctctaattactttggtccgatagcatcctgtgaaggttacagcgtaacctactaatcaggtccccaaatttcagagaacctactaatcacatccccaaattttagagaagtacagaaacgaattaatgcatcaatctactgtctagaactcaaatcacgcgacaggcatcacatcacattgatccgatcaacgatcgatcggaacgcgaagcgcgcgcgcgcgcgcacacccatcggaatctccgagcacccaaacgcgcggtagatcccgcaaccgagccaccagaaaaaaccctagggtgttcgcggcggattgtaccttgagcggagccagcccgagagcccgccatcgcggcggcctcggggaagacgaagcgcgggtggaggaggccgttcatccatcggcagaatgccactcccctcgggccagaactccggcgtgctctgctcgccacccccaaccgccgcggccgccatcgccgccgggaccgggagcgcgagcgcccgagaagaagtgtgggttgggcgcgggttgccgaggcggcggcgcggcgtgagttgggccgagatgtgccctcttgggcccagcatatatatgggcctcgagtcaggaccgtctaagaaagactatgggccttactctcgtggcccatccaactcgaccgcattttacaaaaaaaaaaaaaaaaaaaaaaaagagcaaatttcagctaacctcacgtttttgcataaaatcctacttcctccgtttcacaatgtaagtcattataacatttcccacattcataatgatattaataaatctagatcaatataaatgtggaaaatgctaaaataacttacattatgaaacggggagtacgtattataatcagtgacacgtaacatgtgattctaaagtttcacaaaatcctacgactatatatttggtaaacatttacttaaaatttcaaaacatagaatgcatataaaactttgagtggtcgatttcttgattaagattatcagtttaactcttcactactttgaaaaatattgttttagatatgttgaaatcaattgcattttttttaaaaaagtaaggttttattaaacatttagacataaaacatgtagttatgtaccccaagtcataatacatgacttccacgtagaagttaactgcgagacaagatcgttgttattatggagcacaaagaaatcacacacaggtaacagggcattgattctcaactcctgaatcaagtctagtttttactttctctctaccaatttggtacatgaaaacaaggggaaaaggctgcataacgttgacaaaagttggataaacaagagggattcgctgcaattcacagccctggatcatcgctggatcggatccaagacttcctgtggagccagcagcgcgtgaaacacgcccagtcgccatctgaaatgaaaaagctcttccggccccagaccgaacttaacaatgctcacttgacacggctcgaataaacaatgcagtgtgacagcacagttctgcgtgaatcacacactcagatcctgcaaaaacgaatgggaagtatctcagttttcatacaagagctgcataaaaaaatgaactggaaaaaatggaaatagcagataaaagcaaaattgcagggcatgaggtacttcaggattcctgattgtttctgtttcagtgacctttcaagttaacttattaggtggatcgtgcgcaactaaacaagacatgttgttgctgtcttgctgagtatatcatctggtacagtggtgaactcaaattcccaattttctacacatttacgaatggttaattttctacaaagaagatttgcaattgtcgatgtaaaaatttcaagactaaacatcatgaagtttccaggtaaaagattgacctaacactcaaatacaagggaaacatacaagaaatacatgcacacgtaaagcatcgtatgaagaaacaactgacactgaaaagggaagctgtaaattgccattatgatactgtacgaaatgagatggtagtggttagacaaacaaccaaatagatgacaaagtaaggagtacaaaataatttgcatttgcagtcaacagttttagaaataatttaagaagctccctctaagaaagaaaaaaaatatagagaagcggttgataagtccaggtccaggaatagtgtatctgccgggaacaaagaaaatggaaccagaacaaattgcatcaaatcttctgaaaactacatttgaattcagctcgttatatgtatctgtgttttcattatctagttcacatttgacgcacaaattcaatgcctcgattgactgcgtcagcaaactaataagtgagttcgattaaattgttggttagctggacctaattccaagagaagtggtgaatgggtggcctcccacaacttcccaaactacatatctcataaaaactacaaggacctgttgatccatagatttccatcaaacatatcagtattttgctccttcatgatatccatgtcttttggttgccattaataatttggcatcaatgacaaccagacaaacaccaaaacaatcgacaaccagcagtgcagtgttatatcaggcagtaatgagatggcatgactactacgattctaaaaatccctccgtttaacctgactggctgactataatgaatgcttgatatcacaactcacttgtacagttgtacttggattactatttcacccagatcttattgaaattttctgcattcctaaaagtttttcagatgacaaattcagatgtttctttcctttgttgctacaagccattgataaatcaggtaagtagcatgacaaatcatgtaaatcaggtaatgtgtgatttttttttagataatgtatgaatacaagagtaagttcccagtatccatggagcaagcacaagttaaacatgtactagcaattattatgatcaaattgagatccaaaaacagcgccttagctgctctatctactactacacaattaaagtcttgcaaatcattttagcaaagaagcgtaaaactgattgtgtccacattaaactgtaatgatcacaatacaaaagaagagattaacaaattgtacacaattcagcggtaaaaacagaaattcatacacaatactgacatttgtaggaatggaccaagaatgaagaatcggaaggcaacctcgaactagtgagccggctgcgggggcaccggcgtgtaccagcggccgacctcatcatcgacgttctcctccgccttgtgcagcgcggcgtgcagcacaacgagcaggaccccgatgagcagcgaggagacgatgttggcggtggcgccggtgagcaggaggaggacgagcgtgacggcggcgagggcggcgagcacggcgccgtccccgacgacgcggccgaagagcacgatcggctcgtcgcgtaggaagtagaggacgagccatgcgaccatgcagacgaggaacacgatgagggaggccgggtgccacaggagggagaggaagacgacggcgaggaccacgatggcgtagttcatggcgtagtgggcgaggttggcgcgcacccggaggtaggcgtcggcgaggctcggcggcaggcccagggcgtgcgggtccgcgagctcccgccacggccgccgcgtggccagcgccgtcgcgccccgggccttggcgcgggagaagaagtcgagcggggaggccccgccgccgccaccgagtgggagcggcggcggcgcggcccccgaggaggaggaggaggaggaggtggggattgtgccgtacttcgacatgggagatggtcggcggcggcggcggggggtcggatccgggaggggaaggggaagggggggatcgggaggaagaagatgaatgggggaaggaggagggggatcgtggggagatgagccgtactaactggagggcgtccagtggcacgacaagggaacgtgactctcgagggggttccggatggcaaccgtcacccgttcttttttcaactttgtgtccgccaaaaaaatactaatttgtatacttcaattttatttttttttctcattacatgacggacacatacgcatacgcatcactatacacgcacactcacaaatgtgtcgaataacccatgatctaagaaacatatctctaatcttaatatacacctattgaaaactcacctacatgtatataatatttagggaaaattataaccataccattataattttgcaaaatttgagatatgccatcctgacccacatgtcattgaatcatgtgggtcctacatatcattgagataccgatagcatatctcaaactttaaaaaattataatggcaaattataatatttatggtactgagatttgaaccttggtgcgtttcagcaaaacatctccaattatttgaatataatgtagaaacttgtcataattttgacaaacatattttgatgtcctgcgaatatgtgatattttgcactttatttattaggtgtgatctaatgtatactgacattcacaatattacaccaaattatgggaatccaatacacaaaatgctatattggtctaaattttgttttcccttggcttttaactttatctgtctttgtactctatttcgttcctataaaatcggttactatcccatctctcggatatgcagatagttcactccatttgtcgcgagattgtccatgtaaccactatactcacattacgccaaagttgtatgtgcatgcacgtagagctagtaactagaatgttaataaagaataaagttgaaagaggagaaagctacaacagagatagatatgaccgtccgaacaagatggcgccatccttaccgttgctaggtaccataaagttgctgcagcaaacgccgccacctacgtcgtgtccccagtttgcgcttctagctccaatatctcggtcttcttgtcctcccttcgcagcttctttgtcaacttactctcgtccatgccaccgcttatcactagctagctagcagcagacaattcacggcattgattctatgtcgtcttatgcgtaatgcactcaacaacgtcgcaagatccagaagtactcacggtgggaggacgagggaagccacaaccattgcgctaagggaggacgaaggaacgccaataccgacattgctcaagctcattatcatcatctccgggtgggagaatcagcgcatataaccatccccatctcttcttcctcctcttttcagcttcgacctgataccctaggtatcaactaatattatttaggtatggtattgataaggaaatagctatgcgtccgacggatttgtacgacatgcatccgattgcggcttgcattggttcgctggagagaagccaaagatggtgattgatgcacatggtatggtcggacgcgggtcgtacgaatccgtcgtacgcatatcagtgctgtattgataataagatattatatagttgatatatgtgacgagtatctacgagtatcaccaatttctgaactatatttgacgtgttcctccaatttccaaccaaaaaaaccaacctttatgtcggcatgtcgctatcctatgggctttgagcccacaagaaaatagatgcgactgatcttgggccaacacatagcccatactccaagcccacgctactggtggtaggtacacgagtaaaacaaaacgtgttcttgcctgcgtatatacggtgtacgtacacacgtctagtacacgatcacacagtcacacgcacagatccacacgattccaaactcccaactctcgactagaaccgactccaatggcggcggcggcggctgctgctccgcccttcgccgccggcgactcgccgcccccgaccgggttgttttctcccccgcaccaccaccaccaccgccggcgccgcccccgcgccccggcgttcctccgcctcctcccgcctccacctcctcctcaccgccgcgctcgccgtcgcgacctcctacctcctcctcatcctcccccgcacgcccctctccgccgcgccggcgcctgcggccgccgcgcgggcgcaggtgaagctcgagaagccggtggtgatcctcatctcctccgacgggttccgcttcgggtaccagcacaaggccgcgaccccgcacatccaccgcctcatcggcaatggcacctccgccgccacgggcctcgtccccatcttccccacgctcacgttccccaatcactactccatcgccaccggcctctacccttcctcccacggcatcatcaacaactacttccccgacccaatctccggcgactacttcaccatgtcctcgcatgaacccaagtggtggctcggggagcccctgtgggtcaccgccgccgaccagggtatccaggccgccacctacttctggcccggctcggaggtgaagaaaggcagctgggattgtcccgacaagtattgccgccactacaatggctcggtaccattcgaggagagggtcgatgcgatccttggttactttgatctcccatctgatgaaatgccgcagttcctgacgctttattttgaagatccagatcaccaggggcatcaggtgggtcctgatgacccggccatcacggaggcggtggtgcggatcgatgagatgattgggaggctcattgctggtctggaagaaagaggagtgtttgaggatgtcaatgttatattggttggtgaccatgggatggttgggacttgcgacaagaagctggtgtttctcgacgaattggctccatggattaagttggaggaagattgggttttatcaatgaccccgttgctggccatcaggccgccagatgacatgtcgctgccagatgttgtggccaagatgaatgaagggcttgggtctgggaaggtggagaatggtgaatatctaagaatgtacttaaaggaggatttgccttctcgacttcactacgcagatagttatagaatcccaccgataattgggttgccagaggaagggtataaagtggagatgaagcgatcggacaaaaatgaatgtggaggagcacatggttatgacaatgccttcttctcaatgagaaccatatttatcgcgcatggtcctcgttttgaaggtggtagagtcgtgccatcctttgagaacgtggagatatacaacgttattgcttccattctcaatttggagccagctccaaacaatggttcatcttcttttcctgacacaattcttttgccgagtgaatgatcacatatacatgtgactgctgtggttttggatgagaaaggtcttgctgttggtatcctcctttagtcgtaattgcacttgtacacttatcatattagattcgtgtcactagtggctattcactgcctgaatgcaaatgctgctagtagagagtatctttgtccttatggacaacatttgctgttgttatcatgtcttatccttagcggttttcttatgcttaaattttcatgcaagttcaattaagctcgcattctctgcttaaaatgatgtccatcctgttgataagagattaaccagtcctagttctatatttaatttcagccaaccttttacccactgataataatttgatttatgtatctcctgttaccctgaattattcatagtcactgttagtttcttctgatcttctggtgatctaggtgtactcattccaacatatggaactgttgggaatcataatagacgaagtggtgtttttactttcctggaggatcttttcatggctttatcaataaattgtgtagcaacgtaacaatatgcacatgagcattaacaggcctttatttctctggtattagtattacatctgttatcagttctttgttgctttgttcttccttgttattcacttctgtcaccactttgctccttgccagtaaatcaaagcagttgctatattatgtttgagtattttggaaaaggccaacaattaaacatagatttcactcttccttttttttttggtatgagcaaataggatatctgattgggaagactatttcgttggcccctttttaactcttgaatcagaaaaaaaaaatcaggtctatgaatattccgttccattcccagaagaaaaatatgatgataccaacttcttaaaagcatagtttagagtttggagggctgcaaattgcatagtgtaaatatgtcgtgtccataaatagtttccttgaacacatcaataacatcattgttacttacttacttttgcatgcctctctgtgtatggttaaaataaccaactaaacataaaacattgttggccattttcctatctgaaaagagccatcgttttgtttgtttgccaacttttttgtgcattcatacatgtgtctctataagcttccttttcttttgtctcatacctatttcattatattatttgttctatctgttgaatccaggctgatatgttctaccttattttcacctgttggtggtcttaggttctttattttattgatacagaggttcaacctcttgaaaggtgaaacttgctaactgctcccatgccgttctgagaatgcttgttagctttcatcgaatactattatgttacattctaaagcctttttttttgtttaaattgcaaccatggtcctttgttgaatttccatagatttgtaatgtttttttctcctctaaaactatagttgatgcttggtactataactttgaattggttgctttgccgtctgtttgggcacatggtctgcacagtactttcttctacttcattttatggttcttgggaagtaccaagagatattggtacatctgactgtaatttttatgtgatatcacacagcgcctcctagtgttgaggaaccacagatgaactctatgaggtatggcaagttagctcctactgttgttgtattgagatgtactacaaattaacactacaagctatagtaggtatcttctcaaggaccacaaaaaaaaacttcacttcttcagttcttaaaatgtcatggatgtgcttaggatttcattctttttatttagatcaaagattggcaactcctggattttctcctccctgaacaataaaatgaaactgcaaagtctgctgggcaatctgtaattttttttgcaatatgggatcaggcaatgccccgtcgtgttatttcctgagggatgttgaaaacttagtacatttgagctactaaaagagttgcaaattataacttggttcatttgaattaactcatcttttagtgggtgcaagttgggtttgtgggtgtatctaccttgtcattgcaagaaatcgtccaagcatgtagcacagcaaccctttgaaacacttgacttacctattataatggcaaggatctgcacatttactattcatgaatacagtttcttgtctctccatatcttattgagttggttgtcttatgtgcaattgctacattagctgggttgtatatgcaattttgtcaagaaagatgatctaagcatttggttgtatttagtgtacagatagcgcatattgaaaaacacaaccaaacctcagtacctccgtcatgaaaactctgacaaccttgatagtttctttttgctattagttctgctagagctcatttttatgtgatttttggaactaaatacacaatatattgttgtttgttgatttgagtttttcaaaagttaattgtcatggtagattctgcagaggttggtgcaatcataaatcttgttctggctcttctgattatcctgggttaggttctgtattcaagaacactgccagttagagcttagagggcaaaattacttcattgcaggtaggtaaatgccttcatattctgcactgcacatgtttgtttgatactgtagacatttcatgaattagtacttcataattattatccaaaaatctttaagtttcaagcaatagaatgtcctgaatggtgaggctgtttctaattcttttcattattgaaattttcttgatgtacttctgatattttccatccttttaggtttaaaggaaagtagaaaagacagaaaaatgtgccaggcctgactgaatagattcctgatttcctgtaaactaaatcacatggttagccgaagtgatcttgatgaggtaatctgtatagtattttctttagtattcagtcagcaagatcagtttatggggatggaacagtaacactagttcttgccccatttgatataaagattgtattagttcataactttgcatgttaaatagttactgtctttctaaaagcagcataactttgagaaatcagaaatggtatagataaatagccttggagagaacatgtttatcttgttttttactgtacctcattattactgtacgtagtagctgctgataatcacccagcctcactgataaatgcaacccgacaggagcacaatggtcatacaatctagtgggcctttcagcgtagttgggtgatgtcctgcaagcaggggggccataagttggtctctgaaactatgccatgaacagatggagataaatgtggcaatgaacactagcaaacgtggccttattctaagaatcggcttgcagggaccggtaacacacggtaacagtgcaactgtaggggctataaagagtgagggtccagttgccacccaatttcttagttttaataggttcttttattggttcggtgatgcaggcagtcgatatatttgttgtccactaacttgcaagctttaattgctttggttcatattagttgtttgttcatgattatggtgtgtgaccttaaagatgctgctgtatgaactagatctgtcaaacagaagtgtagggactttctatactgttgtcacagctccgttgtttggaaaaatctatgttgagtagtgctcttcctgttttatcttttgctattcgatcatatggctctattcatgattgacctgcatgatttgccaggataaacaagtggtacactggtgcatgcatcgtattttctcttacgtatttgtattttatgttaattgagaatatctagctagttcctatgctatgcacttctgcatatcacttggctcattggctgtgcagagcaattgttcatcttttgtcttttaccattgctcactgttgaagtgttccctccatcatttgcagagttctgtgataatgtggcggtctgccaggaggaacaggtgtactgcaatcagctgcaggaactaccagccgattattctgtaggcaataattcccagaactgaagcctgagcatgccgaacctactgtttctctatagatcccttggtaagtactattgtctgttgattcactcgaacaataaatttacctcagccatcccacactttttccccaccatttctgttccgcatagatttcacatccattattcagagttgcacaaaccactatcacatatcttcacctttaccgttcgggagcactcccatggtaacaagagaatactcaagcttggcagtgcacaatggtgcaagactgcaggataatctgtatacactcattccaaggaccaaaagtgagcctgtacttttcttctgttacccccatacagggatcctttgctcctggctttgttcaatcaacttcctagcccattctcctcctgttcatgtgtcttgcgcccacactcgtaaagccctaaactgcacttcgccagtgtcctcgtcagtcgtcagctgcatgcaataggagcacgggccctgggcaaggtcactattgagatcccttttggcttgctgatgggtactgctaccaagaaatattgttctaacctttgtccttgttgcactcttgcctcattgattccttttgttccttcctttatgatcccaatgtgatgcttctctgtgcgtacgctagggcctgctttgtttttgcatgtgactttccttctttcttccactaacactgcccaggattgagcactcggtcatcatctaatcggtatttcaagcttcaaagtgttttgatgcctagctagcttcttttgtttgttagggttagggtgagaagaatgttcgaatgattgtggggatataatcaagctgcttttcctgtcaccttaatcatgcaatttctggtaaatcctaatgattggtgtccatctatccatgagtgggcagtctgagccacatccaccctaccaccccatataagtgctaatatgtgcaggaaacaaaatttcctgaattattttcgtgcaatgagtgatgcatatgttgaatttaaatgcctaaactataatcaattgtgatatatttttctaaagagttgttcttatgcagaactatggctcttcatatctgtactctcagcagcctgcttcatattcaggtcaggagtcttactctcttttttctcagttacaggtctttgtagtaaaagttgcaggctccaataaaaatgaatttgtaggtaaaacttttttatatgtgttcttggtgacttaaaagccaatgctaaaaaagaaactacattgaaaatatctcaaaattaaatttgaaaatttaaattttggcttattctttggctgtttaggccatccgatgggagcctgcatcttacttttttccatagataaatcagctagaaagaatattgctttgaagagtttttttaccttaccgaccggtctaattatcacatcatattaatacccaaagatgcaaccaacaactcacggcatttctttcaaagggattttaataaaaccatggcaattccagctaatacacgaaatgctttcccttttgctgcctttgctctttcaccgttgttgttaagtgtaaggctctttcacttaggagtcctagttcaagctaaaggcttttgaaaaggaaagggggagctctagtatgccactaaggccatccttgcacttggctcatcacttggtgccttacaacataatcaaaagctccgatccttgcgacctcctattggacctaaaaggctaaaaccatgaatgttctcccgtgtttgttaatcaaatcactggtccaaagctagagtagaaaattcccgcgcatgaggggcacataagcataggggaaaaagcacccttgatcatgactaaacaagtgatcagagtgtgatgctaatcattttagtaccgtgcggtttgggtccggccacatcattgccttataccagagtctgttcaagaactgatgcagagctgtcacttgcatgaatattattccctagctgatcaatggttttgctcttcatatctgtgggctgtggaactatggttgatatcataggtggccctccaaaattgcactgcattggcgccaacttggcagatagtgtatataaaagttactccctctatcttaaaatataattatcctaacatttaaattttgtttcaaaacataggtacttctctgtttactccttatctcaatcaatcataatcatatcttatttaacattttcacatatttcctcattgtaaccaaccataattatgtctcatttaatttcagttatctccttaatccctataaaaaactctagaagtgcttatatatattttaggatagaaggaatattatgtaaacggttagtgtgttcaacatcaatcctgtgatacagtatcactgaaaactctgttgatggattagatcactctttactgatggcgaagtgtcgcacgagccgagtgactgatatttccctgtggagccttgtcggaagcgagagtaccagtgctactagtgagtgatgtaacgcggcatctcgcatggtccgtaagtttgacgggcgatcgacacgacgcagccgggattgcgtttgcatgcccttgcagccctggaggagggagtgcgtgtgcgccgcggattgggccggagccattgcgtggtttcgtaccagcggcaaaggaaacgtacctgacctgcagcgacgtaccacgtacctatcgcttgccgttgctgcgtgtcgctgctgatctctctctgatgttgatgatgatggtgatgataatgtttgtgttgttgctttgttttttaattaattacttctacctgcgtttattcttttggggttcgtttccgttcgtgattgatgtgatgtttgtttgttcgtttgtttttggagcagggtgtcgggcgaggagcgatttgtttttgatactgacttgcaccaatctatttggaaacagtaggtaagttactgcatctgcgtactttgatttactagtttggaaaacactggagttgcaagaaaatacttctacgtctcctgtgtcatcctctattctttgtgaaatgggttgaggttagccatatgtccaaagattaccaatttatgataaacaggaaacgcatactacgtagctatacgtgtgtcaggttcgtagttacgatcgtgtttcttatagacggaggggtacatgatatggtaacattgatttcgtaaggtttgtaaacgattcaaatacttaggattttattcctataatgccctttggatttaagtgcattataatgtccttttgattttcataagaatgagcttttaaaattatatggatatggtttcctatagcccattctgaaggaaaaataagtatgagttccttggccccagttgatttaaattaatgagctagcagattatggatttgattatagggataaattacatattttaagaaaggttaagttgcattcatggtacattaatttggcatgcgagtgtaatttagtacatgaacgtgagaagtgagagttgtagtgtgataagggtgtgatttagttgaagaactaataagtgagcatatgggtacaacaacttacaagataggttcgattatggtacaataacttaaaaaatgatataacaattaattttttcgagcattttgtcatacatattcagtttttaagtactaattttgtcaatataatcgtgaatatttgcatactttaatttgtttattctagtaattaatatataaacttatgatggtggtgcaaattggatgagcaacgtaattccttattcttatagattaaatttaagattttaaggtaatatatgtagaattactatgtgatggcatattgatatcacgaaaaaactcacctagcattcggtaaccaaaatatttcatatttaaacaagttgatctaccaaaatagtaaattccgaagttcttgtaatagtaaattacactcacttactactgttgtactcggacattcaatttaaggtcttgtactggattacatccacttattaattgttatgttgtgagtgtaatttactcttaaaataaacttaacaactggagtagattgagataagtggtctatcaatgcactagaagatttttttttttttgagaaaacgtactttttgaagcgtgaatatgacctagttattgttttattttcccttgagaagagttattgtttctctccaaacaaaattccttcaaatttcctatgatatatttctcttgaaccatccaaatgcattaatattactagtgcattccagaggagcttttagacctgcattccaaactcatgtgctcgatgttcgatttctaatttttttttccttcctatgttttgagaatttttcttccaaaagagcttttattttggacctactatgagggtcattgcttgcttcaattaaatgactattttctctgttccaaaataaattaatttttagggttcaaaatttgattagaaaatatgatttatactctcttgcctaccatttctccacaagtcgacaagttttccattcaatacccttagaaccaatagttttttaattaacttggggtactttggatttttttcctcactgttatttttttaataataaaggaatctctttattttgagacaggagttgtgtggtgaacatgttttgagtcttttattataccttggatagtctatagtactatgagggaggatagtatggcactctttttgttgggtttcagtgggtcctgttcttttcttcaacaaaagttggataaacttttggatactcgtgacacgcttttgatactactaaacggtatattttgtacgaatattttctatatgaaagttgttctaaaatatcatattaatccatttttcaagtttgtaataattaaaactcaattaatcacacgttattaccacctcgttttgcgtgaaacacttaatctttatcttcatcttcaggagattcaaacaccatcgtgtatagaaatttgctcctttggagagttttagccattttgaaccacgtgaaaagatagtaatgcccttgtccttctacacatcatattagggctgtgaaaagatagtaatgcccttgtccttctacacatcatattagggttgtgtttagatccagaggcgtaaagttttggcgtatcacatcggatatacggatacacatttaaagtattaaacgtagtctaataacaaaacaaattatagaatccgcatgtaaaccgcgagacgaatttattaagcctaattaatctggcattagcaaatgtttactgcaatcccacattgtggcgcaattaggcttaaaagattcatctcgtaatttacacgcaatctgtgtaattagttattttttcgtctatatttaatactccatgcatgtgtcaaacattcgatgtgacagggtgtaaaattttaccagtaaatctaaacggggcctagatccatccatccatctgttcgtcgggttcgttgttctctactctctctctctccccatctcttctaatgtcggtcgccgcccgggatcaagagtaggaggctagtcgtcgctaggctcaaccctccccaccacttccccttctttctttccctgcctttctctccttctcatggtccctccttgtcgccgtcggggagccagagcaagagtctggtcatggaaggacggaaagagagcttgaaaggaggcttgttggccaacttttcgtccgtggagctcaatttctcttgccctcgccagcgacacctagtttcgtcaaacgtggaaaaaagaggccacagaggagcaaggggcattatcgtatttagatgcggttaatactccctccgttcaaaaaaaaaaaaaaaaaccaacccaagaggagatgtgagacaatgaacttggacaaagggctgtccaggttagcttttttgggacggtggaagtatgtgtcaagaagacaaacccgagggtggcaaatcatcggtgtagtagtaatgaagtgagtagcgttttatccattgcaacgtataaactaacattttatcaaaacccaacatagagagtagcatattcgtcttttttcttattattgataacggatttagggtattctttagttctactatttgtgttcctggtcgacagcgatgtgactggcttcatctccaagccctttcaaaccagtcgtgtgcgcaaattaagatagcgatcgcactcaaccccgtgcacaaatttgtcgttagacgccctactactgctgctactactaactactcccggcccctgcctagcactaggaatcttttgctagcctagtggtgaatgctctcactctattctagaaattggtctcagctcccgtctcccggtgccaaagaaatcttttctaaagtttgttggtgtgatgtgaacggtgtgtccgataaatcaatgtgctgctgcccccgggttgaccacgatgtaaaatctttccgtgcgcacgtttttaaaattgctaaacgtttattttctacaaaaattttctatagaaaaattgatttaaaatatcatattaatctatttttttaaaaaaatagctaacacttagttaatcatgctctaataagtcattctgttttacatgtaatgtgtatgggatgagtttccaactcaatattggaaatgaacctttttcaaaatagtcaattggagcactctcggcaaaagtgacaccaggcaaaagtcaaattcgtcctactcatgcattgaaccgttgcctacacccgaattacccttctcaatcatattagagctctaacttctaaatttagcttcagaagttaagtttggagtatagttgtggagcagcataaacccaacttcacatctctagtacatttttgtgtaaatgttttactcaattccgctcctattttaggtggagctgaaactatttggctgggctctagctccacgagaggtggagctggagttgtgctaaacaagcctaaatcaaacatagtgtggagcttaaacattaatttgtaaggccaatgtgaaagtatgtgttgaggtattacagtataaaactcaggaactacaatgcaaatttcctaaagctggtgggctggtgaccaatgttagcctctactccatgagggcatgttcaatgcgtgcccctggagattatccttagcacactccatcgatggccgtttgcttttttgtccatgccgtcctcttgcgatggaacgtgtgcctctgctggggacgtggccctcgctcgcttttggcaggggatgcgcgttgggcgcgagcatggcttgtggacaccgttcccaccgaaaaatttcaccttccaccccttgcccctctcactcatcgccctcacggacgccggtgacgggagagagagggagagagagaggccagcagcggtagcggcgagggagagggagagaggtgagagtctgcggtgagagggagaggacaatgacctggagacgatgccgacgacgacctgcgtgacctcctccgccggtgccgcgacctcctcctcgatgcggcgtggccggcgtcgctccattcgatctagccgcgagggggccagatccgcacacgacggcgccaaatatgctgcctccgaccgccggcggtgacggaaccgaggtcggcaacggcggcggggcgaggctagcgcgaggcggggaggacaatgacggccaccgcaacccgcgcgccactcttcgtcggcggcggcgacgggcggcggcgagagagaggtggcgaaagggagagagaggatgagggagagagccgcgacgcgtgagagagggagagagaagggagcagcggcggcggatgggcgggaggcggcggtgacgggagagtgcgggaggaggcgatgagcgatggtgagagagagggagggagaaagcgtcggaggaggtgccgaggaggggtagttgaggaaatttaataccgtgactttcgtagggatacccactgtgagctagagtatcttcatccagttttttcggattttgaggaacccatctagttgtggcctttattgagagacgagtgtccatatgagtgtcttcagtcagagaggacaccctgtgtcttccattgtacatgccctgaaggaactacaatgcaaattttctaaagttggcggggcggtgaccaatgttagcctctactccatgaaggagggcagggtagggtgggtttcgtgtcccttgtctttcatcgctgcacaaagaggagggcaaagttgtttgtcaaacttgatggccttcttcatccaactcttgttggagaaaagaacgggaactatatttcaactattgcataaaaaaaatctagtacggaatgtgatacagtctagacatggttctttttatgtgacgaagaaagtacattgaccaggttgccaccgttgcagatagagtaaagcatcgtgctagtgcatacacgcgcaagattataactattcacttcggtggttcatcatcgcgtgcatcgtgatgtcttaaaaaaaggggtaaggctagtgcaaacataagggttatcatacttttaacttgttatcacatagatgaaccatcctcacacacacaagattataactatggcaaaattggttatatagcatcgaacttcggtgagaggatttttcccctccatttttaaaaatttgtcgctgagagtttatatctcaagtttggccaatactattttaattgtgagtttgcatatacttagtagttatgcattacatcctaaataaaaccatatagtttttatttggaaaaaagtacgaattacccccctagctatcgcggtcgtctgaattacccccctgaaccacaaaaccggacattcttcacctcgaactacacaacccggacgaattactcccctcgacccaatctgcggtggttttggtctacgtggcatacgcgtggtagtccagtcagcgttctattcattaaaaaaaaatgtgggacccactctcttctctctctcactctcactctcactctctgtcatctttctctctctctcactctctctctctctctctctcacgcgcacagcggcgaggacggggggccggaggcggcgtcgaggatagcggcacgcacgcacgtgaccggggaccggaggcggcagcgaggacggcagcacgccccgcgtgctccgtcgacctccgggccacgctttccttccttccccttcaccttcccctccatcagatcggtaccgccgccgcaggagctccatcacgcggcccgacgactgacacctccacctctgggaaggcgatgtcctcttagccgtgctccccacaggttggtctgtttggctcggcttcgctggctcgttttactggtgacgcacggctagttttcgatgtaatgtctcattgaggtggcctgactgcttgcatgatcgtttttgcatgttgttgggcagcgcgatgcatattgggaggccgtgatgcccaacctgaagccatcggtgaccacgacggcacgagctttggagtacagggaggagatcctcagagcgctgcgccgctgcctccggggcctgtccgcgtgcgtgcgcgccgccgcgccatgcgtgcgcgccgccgcgccatgcgtgccgccgtgcacgtctcggccatgccgccgtcctcgccgccacctccggcccccgtccgcgtgcgtgcgcgccgccgcgttgtgtgtgccgccgtcctcgccgccgtgcgcgtctcggccctgccgccgtcctcgccaccgcctccggcccccggccgcgtgcgtgcacgccgctgtcctcgatgccgcctccgaccccccatcctcgccgctgtgtgcgtgagggagagagtgagagcgagagagagagagacgacagagtgagtgagagtgagagtgagagtgagagtgagagagtgggtcccacatttttttaatgaatagaatgttgactggactgccacgcgtacgccacgtagaccaaaaccaccgtggattgggtcgaggggggtaattcgtctggtttgcattgttgagggtgaggaatgtccggttttgtggttcaggggggtaattcggccgaccgcgatagttcgagggggtaattcgtactttttcctttttatttattaaagggtggatagtctatgtctcacttaaggctcagcttggttcttatgtttcaatctgctcttcttagtcctttaagtttttgttttaattcaaactcatccttagacctacttaggaagccagataactaaatattatcaacatgtctcgattaaatgatccttttacccctcgttcatatatatagaaaataaaaaggcttactatcaatacggtgtaactgtatgatgaaaactcctatagatctgactatcataaatacatctaataattatatgatgctattttttttaaagagtaaagtgcacggacggtccataaacttatattggtgtgtcacctaggttcttgaactctcaaaatgcatttttgggtctctcaacttgtctcgggtgtcatataagtccaaacgggctctaaaccgctccgtgtgctgatgtggcatgccatggtggtgcctacgtgtcagtagaacccaacccatatgtcagtcacatatagaaaaaaaattaataacatatttttctcctctctttttcatttatttttcaaaattaaaaacttccttttctcctcaatctcccctcttttaaaattttattttttatatgtgagtgacatgtggatcccacagacacataagcgttagcgtggcatgccacgtcatctcacgaagtgggttagaactcgtttggagctatatgatacccgagacaaactgagggacctaaaaatgcaatttgaaagttcagggacttaagtgacacacctgcataagtttagggaccgctggtgcacttcactcaatttgcacacaatgatttttttttctataagtaatgcaaagtaatttatattctacgaaagtaattatgtatatgatactatagttgttaaagctcaaccctttgtatgagcaggttaaggttgaaataacgggaagcgttttattcatttttattctcttttgtagagtatgtaataatgtaaattaagggtaaaaggatatttttctaatacaaccaatgactaggatcagccatttggcacaccaagtggtccaaatgatgatttagggcctgttttaaactacattttggattggttaaatcctcgattttcgttagtcacttaatatgaaaactttttatatagaaattattttttaaaaatcaagtaaatctagtttttaagtttataataattaatactcctgtacgcctgatcatccaaattatgttacttgttttcttttctgtacgcctgatcatccaaaacacaaaccaccttgaaacgtacgcagccctaagctaaaaacaaatatttaaaggatatgtgtggatacaataaaaagataaaaccgatcaaattaagtttactagattagttattcacccttcattcttcattaaactttgataatgtaagagctattggtagtcaaatcaacatcattacgaagtaaggatagctcaattagttaggttttttttaaaaaaaatcaacctatcctgatttaaatcgtagatttgatatgagtgctcgtatttatggttaatttttttagtggtacctgttgataaataggatgtgtgtatttatagggacgagtatgcgaacgtgtgtttagaaaaattaaaacatcatcgaccaatagtgttgggcaaactctaggccagcagtatggtggtggtgaccggtgcgcggcaatgcacccgtctctactcccccacttggccccttttatgggcgtgggccctacgcgtgtgcgcacgaggaggtgaggtgagacttagagagagagagatagaagggactcctctgctctgctctcctctcctatatccatccataatccattcctccccgccgtggccgtcaccgtcgcccctcgccggaggacgacgacgagacgaacaccaagagactgttccaccatacgcaatcattacacagacgtggggactatactatactatactcctatttaggtgcggatcaacactataatcatcggtgtttaactttcggtaaaacctatagcaaaattgtttatctatatactataacatcatgttctaagcataattagcatattatgacacctataaacacgttatgacaccaacaaaccaattttctgatccaccactgctcctatactcctatactatactggagtattactaccccttcctcctcgtgtactttgcacttgccaattccattccattattatataatcctcccctccaaacccatgcccct

SEQ ID NO: 8518 - DNA, 25912 bp, Oryza sativa
caatagcgtcatctattaaaaaatggagggagtatatagcaacaaaagtcccgagcgactccctccatttcatattataagtcactttgacttttttctagtcaaacttttttaggtttgagtcgtttgaccaagtttatagaaaaatttagcgacatctataacaccaaattagtttcattaaatgtaacagaaaatatattttgataatatgtttgttttgggttaaaaatgttgctacgtttttctataaacttggtcaaactttaaacattttgactaaagaaaaaatcaaagcgacttataatatgaaacggaggtagaaattcattgaaggtaataagagtgacacaagttcacaaacatacctgtggctccaacaattttccctttgagttactataagtgcatttctgagccaaatcttcagatataaggcctgtcccgtcagtatgtatcaaccgctccccatctctaaaaacttctttgccatgttcatcctgagatattacaataaaaaggtgttacattccagaagcaagaccaaatattggagaggatggagaattaccaagcaaggctcatcatcaatgagtttgacaagaacttctgataaatcaacatccaatgtgatagttttggagactatcaaagcaaacctgcaacgttacaacagaagacatgaggtttaatgtaacagaacactcacatgcaagaggtgaaagcagagtccaacagttagttttcttctattaagtgggcccaatagttcgatagcaacaataatgaaaatgaacaataaggtaggcaatggacttgtggaaatacaagcttatctcccagtttaagaaatttcaatccttctaaaatgcacatccttctattttagagaaaattccttatatgccactgaattttcactgttttccttaaatgccataaaaatgagctattcctttctatgccatcgaaataaatttcagtgtcatcttctggcatccacgtcaccatggcactattaagaagagaaataatgccagtattgtcaaaagaatgacaaaatttgcccttggctccctcgtctctatccccactactgtcttccctaaatccacaatatttcccattggtattctccctttgcccaagcaccagcgtcttcccagcccgtcattggcacgtttctccacatgctaccagcatcatcctccctgcaccagcaccccctgctccagtcagcggcagagcggtggggtcccactcccatcatcccaatgccaggcactgttgtcctctgcatgcccattgcccccacagccgcctcccaatgcccattgcacagagacagcattgttgcccctcatgcaccggcgtgatcgtcatcctgcgcacatacaggccatgataattaatcatggtatgctgctccaaatctgaaatatggtatagcccttctgtcctaagatccttgtctcaccgccgccaccgtggatgaggccaacaccaaacaacacaaggaacctcttggcaccagaagctcagctcctccatttcctaggtccagctgatggaattaatgccatggctcagccagaggagtgtatccatatattgctggatgctagaaaagagggaaataaatcatgcccattaaccttaaccttggtttatcgatgctgcctacactacttgcagatacttttgttgagcggagctaatgcagttatacagaaaagcggaccttcaaaatgatcttttttttttgacagaggaaaatgaatccaggagagagaagggtacataaggtgaagaagaaaggcagatctcctgaaaaaaaaaggaaaggaggagagaagggagaagggtgattttgtacttttccttggcaactgaatatcatggtgatgtactgatgtggatagcataagagagcatggaaattctattcgatggctcaccattaatacaatggttaaaaggtagagcttctctacctttcgcgtcaaaaagaataactaattttcgatggcatataaagaaaccggtgaacttcccatggcatataaggagtattttataagaacacatgttgctatcatggtagcaaaaccattttctgcaactaagctcgacatcacccagtaattgcacccatgctgcatagattaactgatattattcaaaagtcaaggaaaaacctgagcatatatttcgccaaggtgagaacagtacggatgtgcatgaataggtcacgagcctgaccaatcgttctgccagagagtatgtaaggttcatccatgttccacccagactcagtgcgaacaaagtagcatctgacagatgaagtacatttcttgttttcttcttctctattctcttctttcattttattctctttcccgccgtccttgtaaactaaaaaaggcacattaatcaatgcagatccaatcatgaaacagtgacaaattaggaaccatgaaacataatggggacacttggtaacaatacaagagtttacaactcagaaaatggcactagtttctcagcaacaaattgacctgttggcaacctcatactggttactggatattgctttctaatttgcatataattacagtactattactagtaatccatttttttccgacaattctaaaaaaagcatgtgtgtcatccccatgccagttaacatgacccaaatcaccctaagttcatgtcttcaaaaaatctgttaccattgtttgtatgaagacattagagaactttgaccctaatggcatatcataaattgcagtaaccatctctacattatgtgtattcatcagcctaccactcgtattaaatccaaatagatccagcattgcaacaaaaggtaacttacggaaaaatcgatagcagcgcaaacccaaaacaataccctcttcagcaaccttatggtagtgttccaaataggtagacaaatcagtctcagtgtctgaagatatctccataaattttactacaaggacgttatcatcaccaagaactttctgaagatgagtcctcctattctcaatatatggtccctgcacccagccaatgttaaaaatataacgatggcaccttaagttccttacaaaataaattatcacagagtgcagcatttgttgattttggcgccttgacctttattgcaattagtctttatattagaacttccagaaaaatcttaggcagcttaagaaggatgcatgggtgatatacacctttatgtgaggggtagattcgcaaacagtcaacagcaatgaacatgaacattacacaatcatgactggtagataggagaacatcaaatagtaggccatctaaaaatatcatggttaaacaatgagcacgtataaaagtatcaaaagcaccacacaccttgaaaattttgacaactgtaccccctcttatctcaacattacaatggtagacttttgacatacctggaccagaatcaaggttctgcaagcattacatggagaataatttcatcaggctcaagttataacttataatagaggaaaaggaacaaatagtggaaaacagaaaaataaaatgttagcataatattctcataaggaaattgtgaatgaaaaacatgcacaattgtattgctagaaagatgtaaaagatataatggttgtggataacatgtcagccagcccagacttatcgtaggaaatgaattgtgacgtcccagcattctgaagaactggccactcaaaacctgggtacaaaaggtagtttttgttccatccatcatggtatgcagtgtcatatgattgtaatcaagtacccatttcaatttttttttgtagttattaagtaaaccaagtcgacatttaagttaggaggtacaagtcagaagtacatctagcaaacctggacactagaatcataatgaagaaagggtgatatctggaaggcatcagaagctgagagccaatgtgcactagagtaagcatgtattatgttatctacgcacatacaaaattcaaggacaatgacttgcgtaggtggttccatttacaatgatcatgatccaatatgaaaagggatcatcatgtttgatcatttttagagacctttagtgaaaattattaagagtactggtgttgcaataacctttgctctatctgaagatgatatattatcgtgaccaaatgtgctccagattcgtgactcaaattgagccatggacattgacttcaaggatctgatactgtccacggagaggacatcttctatcttactactttttggtgtagataatggaggctttactcctttcttattcctgtaacaaaaagagaaaatggtgtattagcaacagcataacacagataaaagccatattagccttagaaaatagtccatgttctgctataaaaacatctttgttctttattatgtaaaaagcataaaccgaagagaatctaaccaggaaagataagcaaaaatcataaatatcttcctgaactccaactctcccagcgctagcatctgagggctcactacctccctcaacacattggtcgtgtcaggacagattgctggaggaatttgcggcatcacccaaatgggacatggaggacttcctgaggggccagccatattctcgacacatcttgatagatcccgcacagggctcggggtggaaactctttctggagtagaaacgatcggctggatggggctgtcaatctccatatgtctctgcagcccagatggcatgcggtggccagggctaccaacctgcatcataacatcattaggcaaagcatgagccattggttgggtaggaaagttaatctgcacagccacctggttggacgcaggagaaaccattccacgggaaggcgtataaccttcaacgcagttctggttctgcagcagcacagaagatattcgaccatatgggctcccaactgctgggttagcaaggtccggaaccacacgagcaatatgtccgacagaaccgccattgtcatgcaaacggagcggcatctgttggttgggactcccaacctccaccatgtcgttgggtgtttgagcatccatttgaacctcattgtagtacagtggagtggatatagattcctctgtgtaaccacaagacttattagtaagaagtacttcacaatttaggatatgtataacagctacaaagaccttagaaagaaacaacatgcaaaccaaatcaaccataccaaatgggcgaaatgcaaaggtaaaaagaaaaaaaaatagaaaaatgccatcatactaagctgaaccaacgaggctaaaatcaaccggttaccaaaaccacgacttaagggtggcaaaattaaggagaaaaaaaatacgatcgacaagcattgaattcgaaaactgagcgtcaccattacagaatgttgctccctatcacaacttggcaagattctccaaatcgagagcaggaatcgatagcccaactaaaaacaaaaacaaaaaaaggaagatactcccttccgcctacgaaaagtgcattagcattaaacaggggcgtaggcgcaacaaaaaaaaaagagctgaaaaaatctcccaaacagtgcgggttttgcagccaaaaaaacacgctaaaacgcactgccataggaagcacaaacgcagctaatcctcctctgcgaccatccattaagattaaaattcaaaaagggttttcctcacaaaaaaaaaacgaaatgggcggtgaacaaaatattggcctcgcatgagaaaaaaagagtcggtgaacaaaaaatgccaagcagcaaaccccctcaccttcgcggcaggggccggagatgcatgcggcgctgtgggcggtggggatgccccgcgcgttgcgcttcatcctctcctggttcgccatgtgcctgatgaagccggagagcgtacggacctggcgcgcctccccaatcgcccggagcacccgcgccgccgccggctcgccgagctccgcgagctgccgccgcgcctccgcgcaggcgagctggcccagcctcgcctccagccgctccagctccgcgccgaccgccgccgggagcgccggctcgcgcatttggttcccaccgccgtggggattcatggttgagagggtttagggtttaaggcggccacacacacccacccacgccgcgccgcgcctctccgcggcggtggagatcgaacgaggaatcgatcggtttggaggtttggagcgaggaaatttggaaaaggaggagaaggcgcgagcggggtcacgctggggggccaggaggaggaggaggtggtggggggggcccacatggcagtgggtgtgggaggtggattgattgtggggggtgactgggaggcgaggtactcaactgtgactactccctggcacggccacgtgtcgcgcttcggagggcggtgccgaatgtgggacccaggtaccagagagtggaggattgattccttttggttgcttggactggagtatggagtacacttccggcctccctgtgctagtgcgcttctgcggcagaatcggcagatgcagtgacgcgtcaaaagttactagctagccatctcatccgaagttccaaactatagcatccaaagcccttgtgtaggccatgtttttcaaactttttcaaacttagaacttttcatcacattacatcatatccaaaactttcctacacacataaactctaaccttttttttccaaactaccaacttttccaaacttctccctaatttcagaaactaaacacagccttagttccaaactttttttttcaaactttcaacttttacatcacatcaaaactttcatacacataaattttcaacttttttatcatattattccaatttcgaccaaacttctaattttagtttgaacttatctctgtagtggtagtaggaggggtagtactcctagtagtaatgaaaaaaaaaagtaaatttcaaaaaaactacaaccgtaacaaaagtaacattagtaatatatatttcaatttattgtaacgttaatatatgaaaaattatcacaaaactgtaatttttacgtggtatgcaacaataaaatatgtaggtgacaacagtatgcttgtgacatgtaaaaattacaattttatgataaattttcacgctattgttgtaacaaaccgataattttctcactatagttgtcattttctgaaaattactctaatgaaaacaaccaaggatacccgtttgaccgggagttttgtttttgcaatttaaatggcatataaaacaagatatgctatatcgtatgattaataaaatattaattattacaattaaaaatatgtatttgaatttttaaaaactatacaaatttctttaagaaaatgtacattttagcactttaaaaaccgcgctcgtagtaaaaaagaagttgtaaaagctaacaaaactacggaactaatagtctagcagtactagttatttataaccaatctaataactcacctatatataatagtttttttttcaaaatacaggacacagaaaagcataaacaaaaagaaaaggatagaattacatgtgtaaaacagttgtttcgaaaacatacggagggaatagcgacgggattcttatcaaggttgacaccaataatattgacacagtgaccttatacctcaacgtcaatgagattcgctttgagcccacgatctatttctgcaattagtttttagtgattttcacctggagccaccttctattaccaatgttttgctttaaaccatcctttaaccaatgttttactttagattggatacaaatctttgtgccagtttggaccatcctcagctcttttatccatctacacaattatcatatgacaaaaaatggctatttttttcaattttttaggtctttttgaaaacttatttcacgaatagacccttaaaacttatttcgaaaataaacccttttttagaaccaacatcattagcgacgtgatcccatatgaccaccaattacaatggcatcatcccactagcctctccatagaaactaagctagttatgcaaagggtgcaacgtcaatatcattgatgtcgaggacatatgtgaaatatttttttttcaaaaaaagacttatttgtaataaaagaatatttataaataggtcatcggccagtgtcattgacaccgtgggcttatttgtaattttttattggaaacatgtcgttttcttatattttttattagaaatatgccattttcttatctggacagagagtctatctaaaatgcattgtattaggaaatgtctcatccaattttagattattatattttgagacggaagaagtaatccagatacattgtactccctccatctcataatataaggtatggtcaaatttgacacagtcttcaaaactaatgttatatactacaaggtttattgtaacaaaattataaccatctcaaagtaaatttaaatgtcaatacaatgatattaattttagcaaataaaatttaattttatattataataattgttggtcaaatgtttttaaagttgaatcttggaacgtgcgcatgccttatattatgggatagagggagtaataggaaatgtctcacctggtcctagattcttatattttgggacggttcttatatttcgtaacagagggagtaatccagatacattaaggctgagttctttccccaagttcccaactcatctcaatcgttttccacgcgcacgcttttcaaactactaaacggtccgtgttttgcaaaaagtttctatacgaaagtttctttaaaaaaatcatattaatattttttttaattttttataactagcacttaattaatcatgctttattctatcgctttgttttgcgtgcggatgggagggggttctcaacccctccaaaagaacacagtctaaacgttccatttatagattcttatattttgaaacgaaaggagtaacattttaagtaattctgtatggataagccagaaaaacatataaaccgtagtgctgtgtttagttcctaaaattaggaagaaatttagaaaaaagttagtaatttagaaaaaaaaataaaagtttacatgtgtagaaaaattttggatataatgtgatatgatggaaagttgaaagtttaacggaagtttggtgtgccctaggcatggccttataatagacgtccgatccttccgtagttgggtactgaaaactttgaaaaccctaaaagcaggcagcacacgcataccctattgccctggacgggagtaggcacgcattcccaggattcgtgacagcttctgctgttgtgcggagcccgaaagttgtgctgcacatgtcactcaatataggacttgtttagttataaattttttcttcaaactttcaacttttccatcacaacaaaactttcctacacgtaaacttctaacgttttcgtcacatcgttctaatttcaaccaaactttcaattttagcatgaactaaatacacctatactcccaattactcctactccactctacttgctctaggggtgtgtttagttcacgctaaaattaaaagtttggttgaaattaaaacgatgtgatgaaaaagttaaaaatttatgtgtagaaaaattttgatgtgatgaaaaaattaaaagtttaaagaaaaagtttgtaactaaacaagatatctcactataccaaatcgctgccagtattgcaaaaggagatagaaagaagtactcctagggtgtgtttggttcaattttttgtttggtttgcatgatatggcgatccaatttcttttgtgttggaggatatagcatggatggaaaaagacaaaagttagtgagactcatttgtcatatatatatttttttatcaaaatataatcatccgagatcttgttttaaagatttaattgtaacaaatataatggtgtaatcaaatcataaattagataaacggtttaggagaaaaaatcatttggagcttgcttaacagaaaatcaaaccaaccacgaccaatcagaacaagacacatcacccagaccaaaactggatggcttcatccagcaaaatcagccggatacactcatccagcatattgagggaatattccctattctgggccgccccatccaccctgccatccaaccaaacaccacagaaaatcgggcagctatctcccatccaggctcatccacccaaccaaatacacccctaatgttcaaggaaaacctggattactggagcatttgctactgcggcaattaataaaccattgatctgaatgtgttaagccatacagccgcactgacagaaatttgttaaccacgtttagatcagataagtagtagtactccactacttaccagttaccactaagcaagctacagcgatgaagtgtcatagcagtccacaagaataaatagtcggaaatcagattatcattagataagagagcaaaatcaacagtcatgcctaccgcatatttgggtgcggtaatcagctcacctcctcaagcttactactcctactcaataaggtccatctcttttttttttctctccaaaatttaccaagtctaaaacctaatctcacggtacagaatcactaagtttgtctatacatgtgagcaatgcagttttgttttttcttttcttttacatattgaataatttatgcacaataaatcagtaatggaaatggttctgcactcattatacaaaaacaaaattagtctttcatcatattaacgttagctttggttagttaggatagttagtttatatttttgaaggctacgagtaagttaaagtttgcacttcaaaatccccccattatcttgtcacaaaaccggttgttcatattattagatcttaatcttacaaaggaccagctcgggaaaatgcacttcacgacactgatcttccatagcatatggagcctaaataaagattttttgcccatttttcctgcaaatagatttatcagatttatttgttatgtggagttcaaacaaggcacaagaagaaggtatagtcacctttacatgctggccaggaaaagcagatgttctcagtgtctcctgtgtttcatcgttaggctttcttctaggtatgctcaagatcaaagccacctggtcacatgtggctgctgttgcagttatgcgataaccactatcccagcgttgatggattccttcactcggatataagaaatcaagttctactacctacaaaagagatatgcgagataataaaatctcaagacttttacatattcaattgatagtcagtgtagcttgctgctaaaatgaattcaattttacaaggctcttggacactccaaacgtacctgatgtgtgaaaccagcgttccgggacataaccacagcccatcggcttcctgctgtggccaaggcagtgacatagaacccctccttccactttttgtttatccatttgaagggaaatgaatcacttactttgtaggattgctgtgcatatggcgttcctgagaagcattcaagtcagttcttggcttcttgctcataataaataccaacagtaaacattacaagacacccaagtgtttgcgctgtgaatggcttctcactacacatattaacggtggtactttctgaatactttgatgcatcaacatttaacaaatttcacctcaacagtaaacattacaggatacccaagtgtttgcgctgtgaatggcttctcactacacatattaacggtggtactttctgaatactttgatgcatcaacatttaacaaatttcacctcatccagtattatcttggtcaaggtaacaatattaagtggtatgtttatccaaatgttgtctagcagtttatagtgatttcatcatagctaggggcaaaagattgacagcctcatcggttgcccatatttcctaataagccaaaatgatttattagaaaataaaaattaatttataggtaaaaaattgtatatgtgttcttagcaacttaaaagccaatattaaaaaaactatgttcaaaatatcttaaaattaacttcaaaattaagtttgaaaattcaaattttggcttttgctttggcttattaggccaaccaatgaaaccttgattttatatattaaacccatgtcatgtactaatgttatcaactatatgctgcttagcatagtgttgatttaccccaaagagaacatttgtttgagaatttttctttattaaaatcaaatatttatcatggttttgattaatatccagttcttttagtattcgattacgtgtttcagtacacatttgatgagtttactgtagttcttctctgagatgaatcgttgcgcttgttacataatgatcctggcaccgaacatgcaaattcaggactaaaggcatcaaaatgaaactgtatacctgttgacatgatcaccaccgagcttccattatttgaaccagccaaagaagtaatatagtaatttctctcccactgctccattatccattcctatcaaagcgcacagttaaagttgtgattatacatttatctcagtgttctaaaagtcagctccaggcgccggttagccgccgcgattaggcattagatggtgcattaagaggctgaactaacttgggtggtgtttccttgctattttagtgttatatagtcttgtttttatgcaatatgcttgctaatttcttggatttgactagttagcctaacctaggcgccccccagccgccggactagtgcctggcaccttgttgtcccaaaatataggcaattctagagttcttcagggggttaaggagaggtgaaattaaaacagggatggttgtgattggttgagatgaggaagtagatggagaaattaaataagagatggcggtgattagttgagatgatggaatgggtgaagtagcaacattttgagacaaattttgaatgcaagaagttactatattttgggacggagggagtagaaaacaataccatgagatggcaattaggatagagctgagtatgcttgattagtaaccaaccacagataggaaaaaaaatacatactcaatagtaggatgacacgcaattatttaccttgtgaagaaagtaatgggagagttcatgtacttgggcggtaaaaccagtgccagcatccataattaaagcccacagatctgaacaggatgaaactgaacttataaacaaaccatcttcatttcctttttgaatatgtggtgctaatctatcatctgctacattgtagtggtatctgaaaaataaatgtggtcagacaatagagtattattttactgctaccaagcagattactgtgccatacctctgtttcattggccgacgggcattgtacacactaatccactgggtcgctggcattcccattctaatctttttcttaggttgctcctcatcttcagccgctgtgaggcggcctctcttctgaccaacctgatatacaagctggcagcaatccaacaaagcattatgcaggtagcccgctattacataaagaaataaggaattatttaatatgtcactagattttgccagttaactattttaccaccaaaatacatttgatattgaatatgtcactgtctctaaagaccaatctgatcatgtggtcttaatggcaggacattgactatgttttagtctatgcaggtcatactcgttatttggtgtttcatattacagaaagctaggacaggaagttcaaaggcaggttcacaattgagttgtttcatagtgggacatagatttccttcactaaaacctaaaagcacaaggttggcattgaactaattggaattcttgggaaataatattagttataacactagtgatgactctcaagcccaaggatagaatcaggtaactttaattatttactagtgctttgaattttgatccgagaaatagggaattggaactgagattcctacacgatcattttttctgacagatgatacagacgcagattaaaatggttgaaggaataatgtaccttctgggcaccatcggtgtttaatggtcttccatctggatttggaccaacaatgccatcaaaaagagcaatgcactttgcatagtttggctcttcgtcgaacttcaagttcacaacatactcaacaaattgacgaaatggtggtggaccaatgccacataaagattctggagaggttgccatctttttcttgcaaacaagaaaacctttattctctccctaagttcattcatgaattacaaaacgaaattagtgcatgtagcaacaaaaaagtcataaaatcaatcaaaattaacctggaatccttgccaaggcaggcggccacggagaaggaaaataagtgtgtatgcaagggattcaaggtcatctctcctgcatccagttcttcccaagtgggcatgcacactagcataacgaacagtacccctgtttacagtagcagacaaacaggaagagcgcatcaataaagtaatgtgcaaaatgataggcatcgtaataaactttctattcaaacctaaagatatcaggtctctggtcatattcaacatgctttcctgtaccagcatctttccatttagtagctgcattggaacaaaacaagttcataaggaagcaacataaataattacatgacaacaaattgacacaatataaagataaaagttgattaagaattacctagtccaagatcaacaagaaaaagtttcttcccttcaggggtatctggaggaccaagcaaaaagttctcaggtttcacatcaccatggacgtacctgtcataaacaaaatttattagctaaaacttcagagacgccatgtgaaacactcttacggaacatctgaagagcaggtcgagttaccctttagcatgcatcttctctagtatggagatggcctctatacctatacaagcaaccatctcaacagacatcctgtaaaagaaggccacaaattaaaaaattgaaaaggctgcattgaactgtcaagattaattaggaagagtcaaaagatgcccacgagtgggaattgttattccaaacatcccacaggctcggtcccaacatatccataacctgcatgaaaaatgtgtatggttagaaaaaacgtagttgataattcttaagagaaaaagaaaccaatcaaaccataaaccggaaagcaaaaaaaaaaaaaaatctagttcatgctccattaccatgatgtaaaacccgccctgctttcctttgtagtgtacccgtgggacaccatgatttccactaagagtactgcaagagaaggtttatcataagtaatcaatgtaaacgtatccaaataatttggtattcacaaagaaaaacttacacagtagagagccagaagaagaaatacttacttgtagacttgccattcatagggagctccatagctgcaacctttgctggttcgatgttcgaattttagcgcaacctgacagaaatgaacatgagtactgacgcaagtacgaatagtctcagttccaactacttcaatcattcaaggagatacactgacctctaatgcatttgcaccagaatttctgttaccatgagtaggagaggaaatacgccggccaacgtatacttgtccaaatcctccctttccaagcttcctctcaagcttatacgttggtgaatttccgatttgtacctggtccaagcacacaaccgcccaaaataaatatatggttatgataacatgatgtaaaatcctataaacatgtgaaaaaggagacaggtcagctattccatgcgtaataaaatgatacaaaatttcatcatcagaacagccattgcaacatttctgatcttttgtgagctaaacaggtttcaagcagtcaactctgagtgcaggtgacatgaggcaccttcattcttgcaacaaatcctgtataatgactaatcctgctttgatctaatggaaagctaccattatcctaaagaatgcctatacagtagcatctacaatatggctcaacatagtgcgcaataaaattaaggcactttagattctcccgttcctaggcagatcttttatctgcatgatggtagctaatcctaacagaccgatgctcaatcaaatctccgcttggaatttaacacaaacactcagcatgtgaattcaacaaatgttaggaataaaacaggaacagagaatacatgaaacagtaacaacactcagctaaccaattgaatttcgtatacatggcagaaatgaacataattaagcaaccgacaagatctacgttcagtaaaaacacacaccaaacaccagaaatggtatattcatggcacactaattataagtgccatcaaatgctagagattaactagatggagtctagaactcaagatgttagctatctcatcagttttctgcttgaaatgcacaataagcttctggtcaacatcacccgtactgatgctatcctagatttacacaataagcattcttcattcacatttagtcaaaagttctaatttagttccacacaattctctacaaaatcagttctgtgcagctgctatttgtaatcaatacatctgctatcctccccttctcttgtcaccagttggatcagagttaattgaaagtaagctaagaatccagaacaactagtagttattttgccacaagcgtaaaactccaccatcccatcccgcgtgtacagtttgcatagatcaatcagttcatctacaccagcggcagcgtctattcaatcaatagaaccctaaaccaaaaaaacaaaacgccccctaaaaaaaaatcgacagccatatctaggtcacgcagcgggggagccaaggggggatagataatccgcgattaccgtctccgggagcggcgcggggctcccgtcgtcgccggcgccccccttgtcggacccttccatccccttccgctcctcctcccgctgcttcccctccggctgcctcgcgtccgctgggcccgtcggcggcggcggcggctgctgctgcttccgctttccacggcctcggcgcgctggcatgcttcagcggcgcacgcccatcggctcgccgggggatcgaggcgatcggccgcgctggggctagggcttggcctccgcgccggcggcgacgggtggggggtgagccggcggcggtgacgacgacgagacgggaggagggggagattgcgaggtagggcgcgtggtgaaaaaaatcctggtaccacagccgtgttgtgtagtaagtggggattacgccgccgactcgagcttacgtactgtgtagaatacgccttctctcgaacacatgcggatcataccacactggcgtgtagttgtaagtatgatggcttcagaagttcagattcgtcctatcaaaaaaggaaaaaaaataaaaagaagttcagattcgtttcaagaaagatcatatactactcgtcatgtttgggttagcttgtatccatgtggggattttgtttcttacatctcttgccactaaagattatactcatattccttcgagaaagattatattcctacttgagttcttttttcgaaggaccaaaaatcttttgtgactcatcattttaatctctagtatactgcatcattggtttcatattataacccttggccctgttcctttctccaacaaaagtcggataaaattttaaatactcgtgtcacatttttcaaaccgctaaatgatatgtttcatgcgaaatctttatatacgaaatttgctttaaaatatcatattaatctatttttcaagtttgtaataattaaaactcaattaactatacattaatatcaccttattttacgaaaaaaaacttaatcttcatcttcatgagaaaataacaccaccctagtactttgattattttcctattgaagcccttttatgttctaatattttttaaaaaaacaatttaacaacatctacaataccaaattaatttcattatatgtaacattaaatgtattttgataggatgtttgttttgtattgaaaacaatttgatcaaagttataaaagtttaactaacaggaagttaaagcgatttataatataaaccgaaggagtatgtactacagtggcgaattggatcgacttcaataaccaaggtatcatctacatttgggagaaaacaaaatttagtttactcgcatgctcaattgttgtgaaatatcgcgaaaagaaaaaatctttatgaactagagtcccgctccggtgcttttctacttagagtagaaattaatccgaaccgttgatcgtatttaatcatatggttgagatcgagttctactcccaccaaattttatgggagtagaaatgtggagggatatatttgtccaaaggtaataattcgcgtagggtattatcgtaatttgtttttatctaactcttcaccctctctctctatcctatcctaatcgatgccattctcctccatccccgcctccgtcggtgtccatctccttcgccgcctccgtcgccggtccttctccctctccacctccgtcgcctccagcgccatcggcatctccttcccctccagcaccgtcgcctcccccggcctcaccgccttctccgccccctccatcgccgtccgtatcccccgccgtcgccgccttgtccgcctcctctttcaccgtccgtctcctccgcccgcgtcgccttcttcggccccctctgtcgccgtccgcctcccccgccctcgccgcctcctttgacgccattctgggcctcccgttcacctctatcgtcgcctccgtcgcccgtccatctccctcgccgcgttcatcgcctccagcgccctcgcggccctctgccccatccaccttctctacctccagcgacctgtggcggctgcggcgtacgtgctcggcgcctcggcaagggcggcggatccacgatgtgctgcttgtatggcagtccggcggaggagaggctgatgatgcaacgtcgccctcatcttgatgttgccgttgattgttcatcccatctcttcggctgctactggttcgagaacaggtaacgtcctgtcccattttctcccatcacttcctgataaatgatacagtaatgttgtaggatcactattagatcctccaaaagtagcagcctgacgcgagcaaaattcagttttaacaccaagtagtacttcataagcacaacctgctagatttctactgaggttgttgtcccaactatacaaatttgaaatgtgtctgacaaatgttatcaaatcaccacatagataattcttctgtgaccattagcgagagatgatttccgcttgtgcttcattctattttagttgatgagcagccgacaacggtttaaatggttatgattttgcttcagtaaaattctagtactaattctggagttctctatacttcgtaaattacacacagatcgatttttatttgattcgttgcttgtagaaatagttccactccctgtgctacatcacataagtcaaatttcagaagatactactagtttatagtggttacggccagcatggaacagttaaggtccataattttgtaaggctctgcagatcattttattttggaggctttccaatgtgtataattttcttttcattttttcagccatgcagtggagctccaatggtgagtttgcctttcattgtcttgttggagattgcacgttggaattactggcaaaagtcatgcttcttgcattcaagagttgtatcctgttctgcgagtatgatctagcagcatggtatggggctgatattttataaaggacaacgaccaatgtctgaattgatatatatatatatatatatatatatatatatatatatatattgtactcgccataatttaatgtctatcacagaagcagtaatatactcccttgcgatatatcccacgtggttttctttggtagacagtgttcgtgttttaaaacaaatgaataggcaaagatgatatatatttgcacttgggagttgccgtggatggttactgcaagatgctttaattttgtccatgtcgcgaggggtcaatcccagtaccacaccacttctttttttcaatcatctaacataactgcaactatcttttttatcttcacctaacagaaattaatctgcaatcaccacggttaatatatcctgaaacttggcttgatagagctttattttttgctaattacacccctgacctccacatttacatgcatatcacttaagaagtatataatcatctgaacaaagtctctgatacaacaaaataaaaggctgaagaaacgtcagtggtccatccccaaccttcaattgtgttgatgcttcttacatgctccctctcatagctccggcttgaggattacttcacaagttgcaaacatgttcaggaaagtgaacaattctgtgatacaagtgaatctgacagtcgcggctgctttaaaatctcatctcataatgaaaatattctagcagttaaagaatatatatcatgatgatttatgagaatgcttgtggacatacatggacaaattagtaattaacactataagttagtaactatatggaactgctccctaaaaaaacaactcaggaactgagtttctaattcagaaatgttccctcagataaaaactcaggaactgtgtcaacgatcctaaaattgtgagtattttcttttcaaacaatacttttagatttttagaaatataccataacagaaattaacagtcaaaatagtattttatacatactcaagttcagagattcagttgaattgtattttattcaaataatattataatagctagcacattacatcttcagaattaatatatactccaatatattgcatccagcccgaatcaaaattcagcatccatccatatcaaagtcacatccgataaatcgaattggaacttgtatacaacgctatacatgcaatctagtagcaatagcattagcatgttcctcttcttgtgcggttcgtttcaaaaaagcaggttcctcttcttatcaacaacgaagaaatcaaattcgattgagagcaaacgcacaagtaccatgataatcgaaaataaatactagctgttagcttgttcagtgggaggaggagatcaacgcggatgtgaacgcggtcgtcagggccgaagaaatcggcatggccgtggtcgatagggaggagatcggtgcagtgcagatgcgcgtggtcgccagcaacggaggttggcacggccgtggtggctagacagggatcagcgacatcgacggcgggaataccaggggtggaggatggcaggataatcgaggtcaccgacggggagataaaacggcggcggcaggatgaacgccggctgatcgaaatgggcgccaccaccggaatcgagctgtgcaggaacggacggcggatggatgcggcgagacggtcggagcaatacgagacttaaaagaaaaggaaaacacaaatacccaaattacccttaagcacataattagtaagtactaatatacccttccaaacagatggttcagatcatttctactggtagtagaatactacgagtagaaagcaccgtagtcaagctcaatgaactaacgttcaaagttataagactgtccgggtaaccaacaaaaacagtttggggaacctgactgcccatgctcctccccttcgtgcaaataccggctcactctttgaaggatctttggttttacagtacagtacagttttaccataagtaatgcaaatgctactaagatagttagctgtagctacctgtggaactccaaggtagttcaggtgagggctccaataaaaatcatcaaataagtgagaactcatgaaaatcatatttaaaagtcttataaatttatgaaaaaaaatttaaagataaatataccaaatcttaagtccaaactcaactttatttgagaaaaacaaaaaagacaaatttcagatgaatagtgttatattactattcgagtaaaatgcgttgcaggtactacaacttgcaaggtgggtacaatttagtcacccatcttgtaatttgctcaaataaatcactcaacttgtttggaggtgcaaatataataaaaaacgtgtcacgcgtattatttttgccaaggtggacgatacgatggcagacgtgacgatgagttggcgaaagtaatacagttttgtagaaaaacccttctactatattactctttgctaatttaattggtctatttagatatgttatgcccgtgtgctaagccatgatcgtaggtttttttgttggcgtgcgcacgggataggacggcgccagatctagcgagtcgcggtgatagcctgcgtggctgcgtatgaatccatcatcggcgaaattatcaacgctagccacgagcgctcctatttaatccatgaatatgatgtcaaattaccacattgaagagtgcatataaaaattggttttagcacaaggaacaaaccgctttatttcccaatataaagacaaacatatatccttgtacatcaggcaagattcagtactggcagcaaatcacgtattgaagatttggagtatcaaacaaacatatgtactcaaacgaaaaattgaaacaatataagggctaatttgcatctttgttccttgcatacaaggtgaacctgtcatgctgacgtggcgtccaccttggtacaaataatattgcacctctaaacaagttgagtgactttttttttagataatggaagttgagtgacttatttgagcaaattacaagatgggtgactaaattgcacacaccttgcaagttgtggtacctgcaacgcattttactcttactattcactcaaaagttatctcttttttccctctataatagagttgagtctaaacttaaaatttagtgagaatgtatttcatacttgcatctatctacagtattcttctcatgaatttatacactttttaggtctagtctcatgggttttcacttatctaatagtcttcattggatatgtcgccgttctgattagctcacatcaacttctcctttctgcaaagctaaaaaaaaagggacctatcaagtcttgattataactttgtacagcaacctgtggcggtgcgtacgatgatcacatcatcgcgattcactcatctttttccgtatagccatattccttggatgttgtcacgatagcacgagtgacaaaacaaactcggcaaaaaaaaaaaaagttcccattttagttcaccatcgatttcgaccgtggattttcttcgtgggtcatgacacacatcataaaaaaagaaaagaaaaagaaaaagatgaggtcgtatgcgtaatgcgttcactaatcactcgtcgaaatcaatggctagtggtaacaggctaacagatagtgccggccgctatctgaaaagattatagaagaaaagctttagcttaatgctaagcgtgtgactggccggaccggaggaatgacaggtttttgggctggttgggctcaaagtttagaagaaaagggtcgcgtcatgggccaagtcagcagcccggcccacctgcagccgaagcaaaagcaaagccagctgccgagctgcgtcgtaaaggcgaaagcgaggcaccagctaacccctctctgccttttggttttgtgtttttttcaccttttgcatgcgtttttgcctgcctttttccacatgctttggagcttggaaggcgcgcgccttcgcgctagtggcaacgtaaaaactattgcaacggagacgctcccacattggcctcgtgccaggttagccggacggtcgtagaaccaccacatccacaggtctgtcaacgagttttctctttcttaaaaaaaaaatcataatgtctgcatactcactgaaaaaatcaccaccgacgacgttcgacagatatatcacctactacttaaaaaaacaattatctataatgtttcatacataaatctggatgaattggcttgacgataagaaacctagggttaagctacgctcacttcggatgtcaacgatttttctaacgcaaaatagagggagaaaatcaccagaaaataaagtgtcgccggatttgctcgatttcctcgtgctcttgcctctccttcctgcgcccttggcgtgtcaaagcagccggtcactcaggacgatgggcgcacgcgcacggtgtgccaactgccaaagccaaagcagcagcaaaagcattatcaaaagcgcacgagcccgcgccaaataggcgccctgcatgagcaaacgtgcatatggttgatttctacgtgaattgagtgaatattagtggagaacgtttgatttgattaacaagcgaggatgggttttaattgcgatggtgttatgataaagttgtaggtgtatgactctactcagatcaaatattgttctttataaattttggccgtatagtactctgagtgtatccataaataatgagaagaagaacttatattcttttttctccttcagcccgtacgcagagtgccagggctatccatggccatgtgccacctgatcaaccgcacaactttcccctcccaaaaaaaaaaaaagaaaatagaggccccaacattcttatatttcaatacaagccactaatttccaatatattattatcctattaattttatttgttcaaaagttcctctcacgttgatgtactgatttgcctagaacatatttatattttctgggtccaatagatgttcgataataatcatggcatctaatttatagcaactacatgaacaagcgttctagtactaaatattccatttttcgcttggtaaagaaaatcaaataactacattaaaaagcacttaattttcttacttaaggaaggcgttgctaccatttacgtaatattttttcatggacaatttactatcctttttattgatactttttaaacataaaatcttgttttatgtttcatattagggtctgaaattgctaggtacggtcccgcccttattatcttcttcctcttcctcccctttcctctctttccttctctatatggggatcaacgggcaaagagcttaatctgcccgtgtgtacaagtaccatggcagagatatttgtcacgatatcttccatctgttcacccatgagattgtacggtccacctgtcaatcaatatacgggaataaagctaatccctccattccataaaaaaaccaacccagtactaaataggattttccctttttaataatttgctatcctattgttgacagttttcagaggtgaaaattttcgaattttaaaccatccaatatgctttgagatttgtgttgtggaggaaaatggaaaaaaaaatcagatgctcacggcaaggatcaaacccgaggcctgcagcttgcatgctcgttcaactaaccagttgctccatcgatattttcagaaatcacttatattgtagttacgtagtagtagttagtacaatgtaactacatagttacaattgaaagttttcattttaaaaactatcgaatgttgtatagctactcctattttttaatataaacgaattcggataggctataaaacatcgtatttaatactagattggttttcggtggtactaaaaaagtaagtaggggacagcgagtggggatgtggagtacgtacgacacggtacgtgcaggcgtgcagcaagacaaggcgaggagacacactcacactcacagacacacgcgggaaaagcgaagcgaagtctgtctgctggggcaattatagaaggattagcgcgagctgcccggccgaatactaatcggagggagtatgagagcaggtacaataagctaattcagcagggatcatccaaatcctagctggaagggagagaatgaa

SEQ ID NO: 8519 - DNA, 44274 bp, Oryza sativa
  unsure (1)..(44274): unsure at all n locations
gccgccgtcccgaggcgttcggctctgactgacgggcatgggtgtgcatgcatggtgcaggcacgggagcgcggtgttcaggtcgcacctgttcgggtcggcgacggtggtgacggcggacgcggaggtgagccggttcgtgctgcagagcgacgcgcgggcgttcgtgccgtggtacccgcggtcgctgacggagctgatgggcaagtcctccatcctcctcatcaacggcgcgctccagcgacgcgtccacggcctcgtcggcgccttcttcaagtcctcccacctcaagtcccagctcaccgccgacatgcgccgccgcctctcccccgccctctcctccttccccgactcctccctcctccacgtccagcacctcgccaagtcggtacgtcctccttcttctccctctccggcgagctcctcgacgagatagagtgggtggatgaattggaggaggagcagagtgggtgggcgtgggcgagcgccggcgtgcgtgcacacgtgcgcgcccgtgtcaccacatggaagtaacttacacaaggccgggaaagggaaggcccaaaaggagtgggcccaatcacacacactctctctctctctctctctctctctctctcatctcatattctgactctagagagagagagagtggctcacctccatgtgggccccaccccatcggagtagagttaccactaccagcagccgaaaatccacgttcctgttcgccaccagagcgtgtgtttgtgcactcgtaaatgtttattttttctctgcgtattcctctggaagagatgcaaatacagtcttgaacatttgtaatttttagagatgaggatggaacgaaatgtaattgcaagaaatggtgatgaaatgcaaatgcaggtggtgttcgaaatcctggtgaggggcctgatcgggctggaggcaggggaggagatgcagcagctgaagcagcaattccaggaatttattgtcggcctcatgtccctccccattaagctgcctggcactaggctctacagatcactccaggtactctctctctctctctctccctctcatctaagttctctttctctctctacctgtagtactccatgtaaacctgcactgcaccacacattgatctctactactctcttctgtcagccactctgtctctcctttatgtctgatgttgctcagccctactccatgcagcatcagcagcagcatgatcagtgtctcagctgccatcaccattaacctctcttaatatgttctctctgtttcacaatcttggattaaatgtatacaattgcactcgatccattgcacatttttgacacattattgtgtgtgtggtcatcaggccaagaagaagatggcgaggctgatacagaggatcatccgggagaagagggcaaggagggccgccgcctcgccgccgcgggacgccatcgacgtgctcatcggagacggcagcgatgagctcaccgacgagctcatctccgacaacatgatcgacctcatgatccccgccgaggactccgtcccggtgctcatcacgctcgccgtcaagttcctcagcgagtgccctctcgccctgcaccaactggaagtaagcctgtatacctgaaacctctcttacaacacagtaagctcttaattggatcaatacctgcatataattagatgctagagatgaatcctgaacagaaaagaaaaataaaaccataccctaggaagtaattaaggatcctctgttgctgggcatgggcagtcagcaaaaagggtccagaactgaaaagagttggattttctttcttttttgtctgaaaggaacatgatcaactattcattttgtcagagccatgtgttgtgcatgatatactactatcactattgtctactacacacaatggcagaggatctgtgtccccaaacaaaaactagatcataaaaagcctacgaataagggagagatacgtaggtgggcagaagggatcagcagcatataaagggttgtgccaaccttggtccatccctttcttgttggcatcttagagctatcattattatttgttatctaatgtgccatctgaaaagaaatactactactacttgtgtttggaccaatctttgcaagatgacgtgcgttgcatcattgtcaatgtcaggtcgggtacatacatatcattagaacagagtcgccttctcacaaaagaaaaggcttactatcatgatgtatcatctacttacatatcattagtttgtgctattatgcgttttttttttctaaccggctataaacgcatgtgcaaggaatagtttttttggttgaagtatggagggttttttatcaactggggaaaaaagaaggttacataatttggctatttattctatggagattagaaggcagcagtaatatttcctagctagcatgtcctattacaccagtagcattgtgtcatatgctagattccatttacatcactacagtgctaagaaattactcgcgtgtcgactgtgtttctgttttgatgccatgtgagcaataaactcattgaaacctctgcatgtctaccactgttagagaacatgcatatcgcggctgaagataaaatccaccgtcagtaattacttgttgtaacaatgatgaataataacaccaatcacattctaatgctaccaggaggagaacatacagctcaagaggcgaaaaaccgacatgggtgagaccttgcaatggacagactacatgtcattgtcattcacacaacatgtaagtatagttcattaacactgtaacataaatttctatagctcaaaatctactggccccgtgtggtttttttcccatgaccccatgcgatttggaaaattggagtgtaggtgataacagagacgctgcggttgggcaacatcatcggtgggatcatgcgcaaggcggtgcgcgacgtcgaggtgaaggggcacctcatccccaaggggtggtgcgtgtttgtgtacttccggtcagtccacctcgatgatacgctctacgatgagccctacaagttcaacccatggaggtggaaggtaagaaagagccccacatttggtagagatgttcatccaattgctacccctttaggcaacaccagcataataaggatttgatgagtgcggttttggtgggactcctaacatgtgggcttacttctatatcagtaatctcatgatggatttgacattgccttgtactaacacttagtattgcagaaaataacagagattccctcaaagttgcattagtgattgatatatacacctaggcagaagtcaattgaatctcccaaaataactggatttggtagttctttgaactggtaaattcagacaacataagcttaagctgtccaggaaaggaatacacaccctttttttccctctattgtgtactttgtgtaagctctgaaaatgatatgcaaataattaatctaggcaaatgatggtgctgtactactgttgaggcatcctatcattatgatttgatttgggaagtctaataatgtgctaattggtcaagaaatcaatcaatctcaacaggagaaggacatgagcaatggcagcttcactccttttggtggtgggcagaggctgtgcccaggcctggatctggccaggctggaagcttccatcttccttcaccacttggtcaccagcttcaggtatggatcaccacatctcaatcttggccattcttagtgcagccattgattccaactccttagctttgtttcatgatcacttggcaacaatagcttttttttctttctagataatggaatacaaactacaacttttgcataattttccatgatcgctcggcaccgatagcatttttttctagataaaagaataaaaatcacgacctctacatcatataatgaatggaataaaaatcacggcctttgcatcatataatgcacgcaaccgggcaccaatggcatgcatctcatgtagtcatgtccctatcatttggccatgccctcttcgcatgcacattcatgttcctagtaataactaatctctgtagaacaatagaagagcggaacagtagatgaattatgcgttgattgacagaataattgtgggggggtatatagatcgggtacgtacatgaggatttgaagatcaagccgaatctttccagagataaaaaaaaaagaaaaaaattatgtcagataataactggtcctaatacgtcactagggatagcatcacgaggctttctcccatgcttatacctcctctgttatcatcttccttgagggagtgatcttactgtgcttaaggaggtatctaaagcggtggtgaagccagcgacatcgtcgagcccggataactaatagtgttttgtagtgatcaatccatttttacacgcgtcaacggtgattggtagtggagacgccgacagcgaagcctagacggtcgttcgacctggagccgtctccacctctgatcgaaagatatagtatggtattttcgcctctcacactgggagatacaactttcggcctacaaaatcaacttctggttttaaatctaagatatagattatttctagattcaagcttagaaattgttttttttaagagacagagatagtaccaaattctatttctataattttcttaaatacagtaaattatttcttctcgcgaggaggattacactgcgtaggaacactaggtcatttttcatgtgaaagaaaaaaatggaagctacgaggaagacaaataatttcggcgcgcggggcgaaaaagaagaagatcaaggaagatacccaaggtgggaggtcggtccagcctctattgcgaatagagcggggtgttgttccgcgcgtggggccacacgtgcgcgcacatgcggcgcatatccatcccttcccccccacacccacatgtgtgcatgcatgcggactacgccgctgtacgcgtgcgtggcttacggcgcccgctgctacagctacagcgcccgcacgtgtcagctaccacgccacgccctgcatgcccaccgccgctgcacctccccttgagacgtggtcgctgggcggtggtgggtctcacatgtcagtacgtctttcgtcaaaaaaaaaattcaactttaatttgtttttttcatggtctcacaaccatgtagcttaccaatgcaaacagactaatctaaaaaaaaaaaaataagcttagctataatgcacgcttcgattaagcaatgttacgatgcgtgtgcttagctcaggatagtgcctatattgacacgaaaatatactacatccatataaaaaaatataagcattttttactataaatttatatatttattcatatttatagctaaaaatacttatattttgggtcggagcgagtatcatattttgattaccagtcgtccatcagctatggagtctgtatagggctacgtcctacgttcgggaggtagaaaatatggtgatttattttatttttttgcggggaaatatggtgatttattaatatatgattaattaagtattagttaaaaacttaaagaataggttaatataaatttaaaaataatttttatataaaaaatcgtattgtttagtagtttagaaaatgtgccggatcgggttgagttgggaaaggaggcgggaagaagcgtggtgtagtaattggcgaagggggtaagaagggggagaccggagacatgggtgtgatggttaggcagccggaatgggctctctatcgactcgaacagttggatgagatgagacgagatgggtgacatgcgtgcgtgcatgcatactttgtgccttgtccggtccgtgactgaactgaatcccaggaacgcgaatataatactgtagcacgcacgcacgcacgcacgcatccagctgatctagccggccgagatgtgccactttgaccggtcgtcagacacgctgcatcaatgtaggagcacgtgccagggtatggtcgctgcatgcctgcctgcaaacaatactatactcctcccataaacaaatcaaactccaacaagagaatccgacttgctagaaaaacatcatatcactttaaacaatggagattggagagtccatcagtccaatgtgtttttctgtcttctttgaccatcttccaattccccattatgcttgtgctgacctctatctaattgatcctaagagaagcgttttgcaacatcttgtaaaaaagcaaatcacataatattactcgtgctttatgtagctaagctacattggatcaggatcctctgcagtcaaagtcacgtgactttgtcactgacattgtgggtccgataatcattgggtccacatgtcttacaaagacaatccggctacatcatcatgccagtttccgtaataaattgaccagtaatttagtactatggactttagaacctggcacatgcatagcacagattcatgcatgcgtgcactgcatctgcacgcatttgcattggttgcacaagcagctagctggcctacatataacatattactgtgttatgcgagcaactggccactgtccacatgaagccagtaaatcaactatcaacattgatagtagtaaagctcttgttcagagttgcaggcatataggtgctccctgcatggtttgctcaaacttaagatagatgatactacattctaaaaatgcaagtatttctggtatgtatctggacaagatggttaggactctagctataacatagaaaatgcttatattagaatacacttcattcgtctcaaaatataaggtattttgatcggatatcgatcccatccggttaaataccttaagtagggagtggcagtggcatcaccatcgatcatgtgttattgataaatgattatgattatgagatctcttatctacaatctctttctgaataatcgacctgctgatccatccattgcatgcatggttgttgcctgacaaggacattgaaatggactgctaattgctgccatggatgcaggtgggtggcggaggaggaccacatcgtcaacttccccaccgtgcggctcaagcggggcatgcccatcagggtcaccgccaaggaggacgacgactagccactagccaccactactactataccgatcaccatactcaactagtagaggagatccatcagatgcatgcatggatcgatgcagatcggtcggtcgagtacgagtagcccacacgagtcgacacatgcatgcaacaagccaagttgcacacaccaagatgcacatatatatcatctatatgtcgatctatactgctacctacctatatatatatatatatatatatatatatatatatatatatatatatatatatatatatatatatcacacgtgtactagtactactctagcaagggatatgatcaggaggggcaagctctgagcaatggtccctgcaagatggccagttgctctagccattgatagaggtgcttacgtatggtgtaattatacaggaagggtaggccagcattagctaggaggcagctttgttaatttagccaacatgtattgatgtataagctactgatcgattaattaacagtactactattgtagaactactgctcattggcctttgatttgatgctggtgctcatactatattagtggtgaccactcatactatagtagggttaatatgtgtacatggaggcattggtccacaaggagcaagtgaaatgaatcaatgggcacaggaaaagggaccctatgcaagcagcaagctgataggactttgaccactgagaagctgggggcctggggcagtgtggtgcagctgcggctgcatgcatctgctttgctttggagtgggggaaggaagagaagaagagataagcatatagggcctagagagagaaatccagcatggaacatactgcactgtagtatacatacgaatacaggacaggagaaagagagaatggactggtgaattgagtttcccttgatgtagcccagctttttgtgtgatcttttctgcaaggttcagctgcagacttgcagggggggtaaaagccactggatccttttgggagatatgccttcatcataaggctgatggttaaggcaccacacaacaaatgaagagcaacctaggggaaccaaactcaggttgccaaacataaaacgtcgtggctaatgattcgtctcaagagtcaagatcagatcagctgccctacttgtttgtttccctttcttgagctagattttcccggctttggaacatttataccactgaacatgtatcaccgcctttgtcttcctcgtgtcagatgctattggaaccctcatcttctctcacgaggatgatggtaagcatgatagctcgatgtcctacggcacgaaaatatgggtgacccaagatcaaatagcggcagcacaacgatctaacataatatctggactggacctcccttctgcagttccttccaaggtatgcccagtagagaggctaatgagcccagcttttggggagcaagggaggcaggcacgcacacacgcttgccctgccctgccttttcaattaactctcatgtggcctaatggtccaattaccatgggctccttactttcattaactctcctgtggcataatggtccaattaccatggacaagcctcctccgtttatttctttctttcctctggcccacccgcatgtgtgcatgcttgccaccgtgcttttctaaactaaagttgcataggatctccctcttttttggaaaccactacatttccaaaaccgcggccatacatatcaacagatgattacagaaaacatgctaatatatgcagcagcaagctcaactacacaagctttaaacacccctctcttattagcattattgaattcttaccatattgccaagctgtacggtttgcagctacagctcttggaccaccagagaagccctcctagcgaaccaaatgcatccccagatttattgtagctctgcttcaagacggtcctgcaacagaatagtacaatcgcaacaaaaaaataataataataataatacggctcaacgtgaccaccacagaaccaaaagaacatcgaaatatcaagctgcaaaattttagcatagttactggttaatacacacaaataatacatcaggtcatgtgaactaaggcatgtacatgaaccaacagatggactcaataacatcaaagcagataagatgcttaaagtccaaatcagtccactagctagacacaaaaattcaatgatttgttcatagccatgattttaagccccaaaaaactacccaccagaaaagcctgaatagtagtgatgtcatgaaacatagaatgaaaactagcagattttgcaaaaagtagttaaggcgcaaacagaatgcaaactgtggacctacattcaaaacagatagccaattggcactaagagttacggattgatgtacctatggtgataagattcatacaaattgtggatgttaacaaagtattcatggaccacactgcagcaaaagggtctctcttcatagaaacaaaattcaggtttctggttatcatcatatcatgccaaataactccaaatgacagatgtattagatttgcaacagcagcaaggaccacaaatccattgttctggcagatccttgtttaccatattatcttggattggtacagtaaaaagctggtaagaagctgaaggccgtactagcaaagatgtggatatatcaatagcagccactacagagggaaccacacgccctacagggccagaaatttcagactgcaatttcactccaggacattgacttatgatgcacagcacaactgactatgggacaaagttcctaaacccccagtcccagcgcacagagatgtttctcaaatactgtaaataactgcaggaatagtatagatacatatgaagagcatcctatgttcgggagagagcaaaaattaaactgtcttcataccagccgcaccgcatggccacaccagacagcctacagttattgtcacatggcgatcatgagctgttggtttggctttcagaactcagaaggcaagaaaaatcatactgtccaagaaagccatttcagttgatcaccacacagcagagaaccaaaaggaagtgtaaattgggaaaaggagaagatatgcagagtaggcatatattgtacaatgctaaacaaaatagtagtgaaattatgccatcagtgttcaggcaatcaaaccaaattgcatgaaaccaaggattcatcaatgtctggtcaaaatcggtaccacaaatatgattaaatgatggtctaattaactatctttctaaatggaaatcaaaagggcttcatattaacattaatggatccaaagtatgagtcggcacactgaaaaaaatatgatagagaaaccgttctaataactgtaagcaaaatattatatgccaatgccacagtttgagctattgacacagtggatgagaaggacccagtcatatctcataaaaggggcatggtgtttaagttatataaatctacctttaccgatcattagttaaaagattcagtgagccagaaatacacatagccatccacaaagaaaggccaaacattgctctctgcaataacaacatatgaaaatcagctccatgaccggccacctccataccctctatatctatcacggtggcctgcaaagatgtgacaatagtcagtcacattcagaattttcaaattcttaggcagcactataggtgaaaagaaagtaggcagaaatcagaatctgtaaacttgcttctacaataatttgaaaatagttagataaacagagagcttgcctgaagaagggggtggtgcaccacgacccatattagctaattcagggctgaccttttgtccagcttcttctagtatgttgatcagatccttggcaaatctggcattagcagcagtgaaaaacgtgtaagctgttccttttgctccagctctgccagttcgaccaatgcgatgaacataatcctccaatgatcccggaaagtcatagttaatgacatatttaacatccttaacatctgtttccagatataagtggcattagtttacagaaataaatataattcatcgatctgggaggatttttgtatacctaagcctcgagcagccacatcagtcgctgtcatgatagggcttttccctgatttaaattcagaaagaacccaatccctctcagcttggcttttgtcaccatggatagacagagcaggccaaccatccatccgaagctgtctagtgatttgatcacatcccttcttcgtgtccataaatattaatatccggctgccatccattatatcctccagtagattaaccaaccttaacatcaaagaatttcatcatcaatgcattctgaatgaatcatttcagtgtgtaatgaagagaaaaggtcacgcggatcctacttattgtacttctgactctcggataatatctccacatgttgagaaatggcatgattagctttcaactcctcagaaccaattatgacctgcagcacaaaaaaagcaattgagttcacatgaagcagataccgtagtctgccataaattcatctgcaaaatgatgcattggcaaaaataaccaccttgtatgggtcgaaaagaaagttccttgctagctgttcaacttcctttggccaagtagcactccaatataatgtttggcgatctggacgaatctgaaaaggcagatggtaatcccttaacactatgtaaaacaatgttggtatgttgtaggcacggttcatggaggaaaactctgcctatggctgggcagtgttggctgctagggatgagaggactaggttgatgcaacaaacttggggagagattataggttgatcttcatctgattgattactaatggatacatgctaccctttcattctgttgacagtgtataagtaaaagcatgtaacatgtagcaagcataattattagaaaattgttgagaatggaataatagattcagaagaagaggcatacctgagaaacaattttcttaatctgaggttcnnnnnnnnnnnnnnnnnnnnnnnnnnnnnnnnntaaaacaaggtaagtgaccctccgcaaatttgtatgatgtgattctatcatatcaatcagtcttcctggcgtggctataacaatttcaacgcctggatgcaaacagtgacaaattaaactaaatatactacacaggatgaatgtatcatttaagctatagatcaataggatgtccttttgaacagtgtcatttcattattgaccaactgaatgtccttcaaacattgttcatgacttcatgcgtgcagtacaaaagattccttctggttgttgaacttcctagcataagaaagaaagagaacctttttgaagatcgcgaacttgaggaccttttggaacaccaccatatatgcaagtactttttatttttgatgacgcaccaaacttagttgcctcttgctgtatctgcacagcaagttcacgtgtaggggctaacaccagaacaattggaccatcgccaggtgctttaataacacacggaaaaatgttagtagattaccacaaaagaagtccagaatgtatccaagaaaatcggttaagaaacataagcaacatttcgcacctagaatcggctgagcattaacatgaacaatggcaggtaaaaggtaagcaagtgttttccctgatcctgtttcagcaatgccaataagatcacgtcccctcagtgccattggccaaccttgagactggataggagtaggttctacaaacccagcttttgtaatttcttgcaaaacatattctgcacaatggaagttaagtatcttggatcaggaaatatagaatgtaagatgtccaagattaaaaaagagcaaaataataaagaatgtagttcagaaggtaaaggggctcataaattatcaatggctcaagtccaagaatgcaagcagaataatctttgaagagcacaacagatcttaaatgaataacaagtgacatattcatatcctttcctcctgatgaatgaattggctgatgaagtgatgataatgggatttaatgagaggaccaacaaatcctaatcggagttcaaagaaaaccaaatgatactttcaccatttagtgttcagcacttgagctggttgcacatgttatcgctgttggctgtttttctttggaaaaatcattttacaactgttaatcatggcctaactccagtttccaaccctcaacttcgaatagttcaccttttgaccattgactattagaaccacctactgtttaacctttggcctcattctagagtggttctgcagttacatgtcactaatgtgacaatgtggctcaaggttgaaatagttttgagtatttacagccaaaacaaattccgccaaagcagaaattgtggtgtgaaataactgttatgatacttcaattctttgatgattcaatgtagtttacaacacaaccagctaacgaaacaaatagacctatacattcccctcctgaagcacgtccatctaaattccaattcctcctggagcacgttcatctaaattgcatacatagtactatagtaagtgcaggacaagggtagcagtagcacgcagcaaacgaaacctgggaatccgacatcgcggaactcgcgcactggcttgggcacgtcgcggccctccacggtgatctcccggcggcgccggtaggcctccacctcctcctccgtcatgccggccacggagggggactccacgtagaagttcttctcgaaccgcggcagcccatccaggtcagcggccgcggccgcggagtccgccttgctcgtcggggcgaacgccctcgtcccgcccccgaacgccccttcgctgcaaccaaaccccaacccaacccaacgagcaatcagaacccccaacacttagggcttagggtttagaaatcaaaaccacggtggtggagcggttacctgcggcggtcgcggtacgagccggggtccgcggcgcggccgtcgaagcggctcatggcggcggcggcggtcgccggcgacgagagggaggcggggggtgcggctagggtttagggcggggcgcacgtggccggagagtttggtgggttctagaagaagaagcgaagcaaacggaggacgcgaatcgaatttggaggatttggatttggagggcatttcagtggcggcgagttcaagcggaggggaaaagtgtggggagaactgatggagcctatgacgtcgaaaacgtactctgaaaaagcacaaaacccaccagaaaaacgtaatactccctgtgtcttggtgttttttttttcaaaatattgttttcttcgcttcttaaaacggctcaagatggggaaaacgaacttttgattgagccgcggtcgattttaattaaatttagacctagataaatggtttatgggtttcttcatcttccttctttaattatttttcagccttttgactttggactgataacagtagaattgaaaaactacgaattacccccccaactatcatgatcgaccgaattaccccccgaaccataaaaccggacattttttaatcccaactatgcaaaccggacgaattacccccctcgacccaattcgcggtggttttagtaaacgtgggagtacagtcagcaattcttttaatataaaatcagtgggcccacctgtcagttcgccacccctctatctctctatccccaatcccccccctctctctcttctccctcccctcaccagctcaccagcatggcagcattgagaatggcgacggaggagtggagggcgatgctcgggcgctggcggtggcgcgcggaggcggaggttgctcggacgccgatggcgcactcgtgcaaccagcaacgaaggcggaagcgaaggcgagtagcggcacgcacggggcggccatggcggagaggcgatcataccacctgtcatacctcctcccccctctctctctcaggcataaagctcgcacagcggtcggcgtgtgggcgccggtggcgcgcgtcagacgggcagtcggcgtgcgggcggtggtggagtgcggggaggacgcggcagcggcgggcggcgtcgaggagggtgttggaggacgagggcggcaggacagcggtaggggcggatggagcttgggggcggcgggcggtggcggaggccgctcagggcatcgaggacagcggcggacagcagtggaacgacggcgagcgagggaggtaggacggcggcgaggacagatgtagcttggggtggtaggatggcgacgggcgatggtggaggccgctcggggcgtcgaggacggcgaggctgaggcagctcggggatgggcggcggaccgcggactcactgccggagcccgatgttgtgtccctcctggcatccctcacccgccctattaagcagaagaggggaacaacgctgcaagcggtggcagtggagtgggggcggcgacgaggggacaggggaggaggagctcatcctcggccaccgacggggtgcgccgcgagctatgtcactgcccccattatgcccgctctcccgacggtgccacacatagagagagagggggggaggaggagggaagccgcgccgagggggtgactgctcgtcgtggccgcatccgccgacgctgcctcctcgttccccgtccctgccgccaccgccgctctgtgtcccccgcctgccaccgacccgtgagagagagaagagagagagaggaagagtgagacagagagtgagagagaagagagaggaagagtgaaagaggagtatgacaggtgggtcccacacatttttataaatagaatattgactggactgccacatattatggattgggtcgatggggtaatttatccggtattgaaagcatagggtaaacgatgtctgattttcgggtttagaggggtaattcggtcgaccgtgatagttcccggtgtgtgtggggtgaggggggggggttggttaatttgtacttttcccgtacatttttatcctagttcgtttttaccaatcatgtgtttcgacttactagacgtaaccgtgatggccaccgacgttgatgacatctatgggcgcaaatgcatcatgcaccttcttacaggagatgatgttgatgttcctttcttcaccttgctgccttgagagttgagaccacaaaaatactttccggctatggtctctcagtttgtacctatgtctcgtgaatggcagacgaaacataacatttcatgcacaaatattctattttgctttcccttctcgtcatcgttgaagcatgctaagagtgatctactgttgttatgggtggggagaaaaaccttgcataccgtggaccgtgcgaagctggtgaatataaataggctctgtttatttcacaaaacaaaaattctcacgctgtcatattgaatgtttagatacatgcataaaatattaaatatagataaaaaaaacaattacacagattgtgtgtaaattgcgaggcaaatcttttaagccttattgcgccatgatttgacaatgtggtgctacattaaacatttgctaatgacagattaattaggcttaataaattcgtctcgcagtttcctggtggaatctgtaatttattttgttattagactacgtttaatacttcaaatatatatccgtatatccgatgtgacaaccaaacctaaaaattttccccaactaaacaagtcctgattagcaaacaaccttcttttacatcaccgtccgtacgttgcctccactcctccgaattgtgtccaagttgaaattttcacatgcaagtacctcaagggtgtttcagatatatttccttgtattccctctcttcaccaaacaaaatgaacaaaatagtaataactgtatccagtagcaaatatttaacttttgataacatctttcacgatgttctataactaaaaccacgaagtcacaatgtcaataaaaaatatcttattggaaaaaaaaccgttttgacaacaaacacacatgaaaacacttgaacaaactttgactgagatcttataagcatttctcacgataaccaatgggttcaaatcttttcgccatcatacgttgcaccggttactcttacaaataataaaacatcctcatctctgctattataaaaaattgaagatatttttatcggtacttttgatacatcatccgtgtttaataggtttttaagttcaatcgtttttagaaatacaaatccatctttgagtcggtttttaattttgttcgtttttaaaaatacagaaggagtcgtataagaaatctctttaaaaaatttacatgctaacttgagacgatcggacccctaattgcggcttatgattttgtaaaaagaatatccaagcgaatttccacgataaatttcaccttagctaaaccgtataataataataagattaaaatagtcttcacccgttgcaacgcacgggtatttttctggttgtataataaacttatcatgacagtaaattaaagattggagagaacttagctaatatggtggtggactcagacgtgggtgggtatgaagtgatcaagagtttatgctaggcctttcggcagccaaatacatagtgaaagtaagagcaggtataataacaggctataagtcggctgtaaatatattttaagaagataaataaggagagagaaaagcagcgggctatagatttgtagccatatgtagcacggactccaagacacagtgtgtgtataacaggtgagaccaggtgttaattgtgtagtatgtaactattgtatgaatgagttattagattggctatagatgaattggagctagtagttagctataatattaaacttgctctaagagtgtgttcgctagttcccaaccagaaccctccgcacgaaaaacggagcaatccattagcacgtgattaattaagtattagctaacttttttttttcaaaaaatggattaatttgatttttaagcaactttcatatagaaatattttacaaaaaatgcattgtttagcagtttgaaaagcgtgcgcgcggaaaacgagtgagaggggttgagaaaaagggcatccgaacacaccctaaggtagccccactctctcctaaacaccccctaaataaggtagcatgtgcttttacatcgaggcctcatagcggtccacccctgagactgagtctcaatctacccccggtcgtgggtacacgatgatcccatctgctagggtataaatttggtgctcatagacaatgtactattgatgtttttagataatagaagcattgttgtgctcagttaattaggaaaaaaagattcatacctggaatactcttagcctctgtataacttggacgcatgtaaccaagcatacacccacatgctagcttttataacaaaggaaagtatagaaaaaaatactaagtaccatcaatccacgtaatatactctcacctagcgaaagtgaacataattcaaatggttagtttttttaacctgttcatgagtatatctaggttttaagttctagaattagcacgtgtactcgtatttacgtctaattatttaatactgatgacatatctgttgacagtgaaacgcgtatattgaccaattcaacctcaagacatgcttataaagataggatgtgtcaaacgctgaaatgaacccaaccaaagtggatgaacgttcactaaacaaaacacatcacacgtcacgttcaatcaaactcatctacaggctgcaaccaacgaagaccgagtttagttctaaactttttcttcaaactttcaagttttacatcatatcaaaacttttctacacataaacttttaacttttccgtcacatcatttcaattttaaccaaattttcaattttagcgtgaactaaacacacccaaagtaaagccctatatcggtctcttcattctccacctcgatagccgccgagatcgatactttgggtctatttggagagctaaaatcacgagaagcggctggttggttgtcagctttataaaaatctagaaaactagaatttttagtttttaacttccaattcattctatagtctgtacaactataacttttattaagatttaaaaatctggataaaaaattagactgtttaagatatattgattcaagagactaggatgtatttagttcatactaaaattggaagtttgattgaaattgtgacgatgtgacggaaaagttggaaatttgtgtgtatagagttttgatgtgaaaagttttctttaaactaccaactttttcatcatttcaatcaaacttctaaattttagcgtgaactaaaagacatctcagacctagtagctaacagaaacgaaacagatcctttgatgtttcatccttatccgtagaataccttccattgcagctccaccactagaaagtctagactctagagtagctcgaaacaccgaagcaagcgaaagagcatcgccgtgccgcgcggagcttttaaaacgccgcaacttccttccttccttcctctcctcccacgcttcccacttcgatttcccaaccgcactccagcgagagaaaataaaattttaaaaggaaaaagaaaaaaaaaagatatatcagctcccgcctggggatgacgacgagctctcgccggcgatggactcaccgccgcaccaactagcactcatcgtcctcctcgtcgtagccctcgcggcgctcttcctcgccctgctgcgcggtcgctgccgctgtcgcgagggcgaggctcatcagctgcccgagcaggcggaggccggcgcgggggtggcggagggggaggagggcgggagggagaggaggaagcggcggaaggcgaggaggcggcagcggaagggcgccggggacgacgacgcggcgggcggcgagggggacgaggcgctgcagctgcagctgctgcggcggcggccgcggttcccgctcgcctcggtggccggcgcgctgcagcggcggatcaccgcgcggtacgacgacctcgcgcgggccagccaggcccactccctcaccatccatcaggtcagcagtgcgccgcgtctctgattccatatcacaaatgtcgcttcagatgcaaggattttgtgcattgcgattactcgaattagggatgtataaagatgtgactccagtagcatgcttgacttatatatatatacaactgggtgccgttcattgtttgtttgtttgttttgctaattgctttcatttcagactttcaagatagaatcagacttaggttttgatattatggatttaatgatgttggttggtacattttcactagtgcggcaagtattaaatcaatggttttgctgactctacatgcggcaagtttgtttaggacagaaataaaaaaactacactagtgttattcacactgacagcaatatatcttcagggttacagtgtcactgttacctgctgaaaaagaacccaaactagagcagtggtagacttctattttgctgtgttggtaaaactagataaatgcatatatgactttggcactatgcagtactcaggccacatgacagtggtttggcaaaacctcattttatttcgtagtttttacgtaggcagagggccatttcctgtgaagtataaattgcacggcgtggtttcatctggtaggtctgcgtcctcttttgctttcttgggtggcacataaactggaatagattagcacaaaggctgagcgaatgttttgtttgttttgctcgtcaattcttggtgcaactttctaactttattggtgtcattggctgttaaagtgttcacttgccttgaaaatttttagaaaggaaataaatctcaaagttgaagattgaacaacgaactattcaccatattcaccacacgcccttctgtaattcatactgaattcatttactacgtgtatgattcatgagatgtgtgacacaccacctatgtattttagtagtagaagtgctgttccatgctccacaaccccgggtcattgacccaatcgacacacattcatggtaactgtgcacggcatatctaatcagaactgaagcttttaatgaaggaaagcaagcaaaagccattttcttttttagaaagcaccaaatcctctaccattgactcaaacaagtgccaagcaaacggagtcatcttaacccctcccccccaccgcccaccgcccaccgcccacccacctccgcacccacgtggccacgccctcctaggaacaaataaacaaaaacaaaataatcgaaatagatctagatatagcttgtgtgaccggctcctacggccctaccattgagggttcgcctccgatcttctgccggaacccatagccatgaggacttcccttgttcgtttcttccttactatcctcgccaacacgtttctccattccccctaccagcactcctcacctcctgaatcatcccaatgttcgacgccgcttggtagcgagagtggaggaaagaggaggcgggggaggagggggaagcagaagggcttgggtgaggtggtgtctgttcacgagaaaaaggaggcaaaaacatcacctttccccctcctgctgttgtgccgtgcaacgagacggcggatcacagaggtgtatgatgagatgtaccaaattgttcgtgctaaaaggaatgatactggcaaggttagtaatattttcttgtatttgtgatacagctagatctggtggatttatttaacagtcggattttagtttgagttgggaggttggtctgttttgagtatatgcaagaacaagaataggaaattttggtgaatgtgtgaagtgttcaccaccaaattattcatcgcctgtagtttttgtgcaattcaagcaggtgctatcagaatttgcgtttctaaccagtgattcagtgaaattaaggtgccagtgtttccaactttctatttttcgcagatgaaccttgattttctattaaggtgccaattatttaaagaattccatttttatgcatcttatgggggaattttgctacctagctagagttaactactccttacagcctcactaacttggtatggatccaatgtatgatccatgtcataaaaagatcactcttagaagttagacccttgtctttacccaattaagtagtatggagtttctattgtgcttgtttcagtaaaaaaatgattcgtaaagaggaatcaaagtgtcgagtggagctcactaatgaaagggagacctaactgtaagttcataagtgttttttcttgcttttatggacataatcttctttattcatcactttgctggataatgatatgttgagcacgtactccctccggttccataattcttgacgttttggacaatgacacggtctccaaagtatatcgttgactttgttttcctattataatatatatacaataaataaatgcatgtttacttttcttatactttgaaagacaaatctatatatgttgttttagttcctttaaactaaatatttttgaagttattgataatcaaagttacaaaagtttgacctcaaccttgtccaaaacttcaaaaattatggaaccggagggagtagtatcttagctgcttgctctgttcctgggttgatcacaatattttggaccatataatctgattaaatggccacttcttcagtgattagattccttggtctgtgtgctctacattttaaccaactatataccagaaataggaatcctgtttgtcaaccgcctttttgtagtagtgttaagactccagaattttgtttcgagttaagagtgaagccaccaactcaaaggacaacacacaattcatatgttctgttatgctgcctcaaccaggtaatatgggcttgagacaacgttgagctgctcaaaagaaaccaaagcttcttttgttcagcgactatttgtttcttttggcttttagttttctacattctgtaacagcctctacgaattagattctaccctgtaatgttgaagtgtatcatgatttatatagcttttaactttttttttcaggttcacgagttcattaactgtttggtagatgcaagaaatgaactgctgcacaagtatgttgctatttgcatgaaatttagcttcagacatccattactccaaataatgtgttatgcctattaggtcggagatggttcaaagaagctgcagaataaagaaggccttactatccaacccttgtagtcgcagggctaacagttatgaccgcctctgcgaacaggtgatgcatttgacaaaaacaaatttcgtaccaacacgactaagtgatacatttgcgaccagaagatctattcatgcaaatctttgctaacaacatcttttgatgtctcttttatatactgacgtctcgggtattggcataggtgcataaattggaagccgagcacaaaaggctaaagaaggatgcggatatctacaactatattcaagagcagcttcagatgtcagagtcatacaaactggtaaacttttactatgttcttattaaaagcaactctgccctgttatattgaaatatgaaggttgtgataacaatgccatttaccttggcagttgattgagcttagtgcgttggtggagaaggccgaacgtgaggatgcccttgccaccgaggccgcagagatgacattcgaggagctgctggctcaggagaagagcgacgccgccttctggcagcgtcacaggaagctgacctcaatcttacccaagtagagtttgataactgaccgcgcgatttcaccatcgtcaatagtagcccgaacccgtaaccagaatttgttcctggtggagcttttaatgttgctagttgcaaccgtggtgtaatgcgcttgccaagctcttgggcgcctgaaagtccagagtccttgaccataaaacctgagagattcaggtggttggctgacgaccagcaaatgctctcatatatcctatctggtacttcggccatgaagatttcttgcctgtggatgccctgatggaattgagctttcttcaatgcagaaacaactgggaccgagccatttatgccacagcctgcactgatgggtgaattggtgatggcttgctgcttgcttcggatttcttgtttctcttttgaggaatggcttgagaaattcagaggcagtagaaggctactaggctagcagtatcatccatggtgcattgctgttcatctttgttcatcttccatctctgcatatagatcatcgagcattccgaagacatcctcagctccggtgagattcggcggcgcgctcccggcggcgaaggcgaccaccttgttgtccacttcaatccagctctgccccggattcttcctcaatccggcctccttcgtcatcaccctcaccttcttggactcgtcccacatgccacacatggcgtacaggttggtgatcagcatgtggttgccggtgctctggtcctcggattgcaggacattggcaatggtggcctcggccatggctgcatcaccatgaatcctgcaggaattcagcaatgctccccacacgcacaggtcaggtctcaccggcatcgtctcgacgagctccgacgcgtcccggagcaagccggcgcggccgaggaggtagaccatgcatgtgtagtgctccatggatggggagatcttgtgcgctctcaccatgcgatcgaacaggcggcggccctccgtgacacgcccggcgtggccgcacgccgacaggacggcgacgaaggtgacgccgtcgggctcaaccgtagctccggccatgtcggtgaacagagcgagggcttcgtcgcacaggccgtgcatgccgtagccggccagcatcgagttccatgagatcaggtccctcgtcttcattccatcgaacaccttccgtgcgccggagaccttcccgcacttcgcgtacatgttgatgagcccattctcgaccagcgagtgcctatctagctcggctttcatggcgtggccatggagctctcgacccagccgtaacgccagtaggtcgacgcaagcggagaggacggtcgccatggtcaccacgttcggcgagagccattgctgctgcattcgccggaacagctccagtgcgcggtcagtgtcgccggacgacgcgaacccgccgatgaccgcgctccagctgaccacattgggcgcgaccgtgccgccgatctgctccatctgggcgagcacgtccaacgccttgtcgcacagccgagccgcggcgtagctggtgatcagggtgttccatgtcacggtgttcttcgccgtcgcgtccctgaaagctttcttggcgtcgtccatctctccgagcttgccgtacatgcagatcaacgagttggtgacgaacaggtagccatgcatgaggcccttcacgacgccgcagccgtgtatcgccttccctttggccaatgcaaggtcgccggcgtaagggcacgccgagagcgccacggccatggactcggcgttcccctcgcagccgctcctttgcatttcaccgaacagctgaaggacatccgcgtgcttcccgctccgcgcgtgcgccgagagcagcgccgtccacgtcacggcgtcgggacgcgcccctgcggcggccatgcgcgcgaacgcgtccctcgccgcgtcggggtcgcagccgctggagtaggcggagatgagcgcgttccagtggaaggtcgtcctccccggcggcattgcgtcgaacacgcggcgtgcgtcggcggcgcggccgagcctggagtaggcggcgaggatctggccggcgacgtcgtgctgcgcgtggaggccgaggtgaagggcgtgggcgtggacggcggaggcgacgcgcggggaggcggcggcgcggagggcgagggggagcgtgtaggagttcggcagcgccggggagagcgcgcgcatgcggcggtagagcgcgagggcgaggtccccgcgggaacggccgaggtgggcgcggaggaggcgattccatgggacggcgctggtggtcggagggtggtgatggtggatcggttggtcgccggcggcggtggagagatggcgcgcgccgcgaggccgatggctgggacgagaggtagagccgcgagcgcgaaggagacagcgcatctgggagtgggtcccacttgccagtaaaagcaaaagttatgaactccggattatattataaatcgattgacttttttatttatcaaacttttttttaagtttaatcaaatttgtaaaaaaaatatattaatcaatacaaatatatcaaaatatatttaatattaaatttaatgaaactaatttaattttatagatgttgctatttttttctacaaacttgatcaaacatgagaaactttaacaacggaaaaaaaatcaaacgacttctaatataaactgaggaatggatggctgaattgaattcagggcaaaaattagcactgcaatctcgccgttaagtacctttttttttaccctcaaaagttaacaaaacacgtacaattctgggttgcttcacaaattacaacatgaacatacaaagtcagggaggggcacatcaatctggaacacatcagggtgtaggagagaatggaaaccaagggaaaaaaaaaaacaaggataaggtagatgagttagctgtgaagaaagtttttgtcagctgcatcggtggccgtcttctgaacattcagaactttgagatgatccctgaccagcagaggatgtcatgagtctctgcggagatgtagaatagaaccaagattagcatgaggcatataacttgcattttgcacaaacgatttcacaggcatagtgtactaaagagatgcttcaggatatgcatactatttactggaagtgtagagcgatcatgtccttgagttgctagacctatcataatatggaaaaaggttgagcagaactattctatggaacagccgttcaaaaaatgtacctgacgatcttaacatttctgaaggacagcatcacagtaagaatcaaggtaaccatcgcgaagcaaaggtgctccaaggaatggccgctgatgaagtaccggttcacactgtatacctttctgtcagcaaggccttcaaatcttgcaagaaggtaaaaacctgcaccaagatgccaatcaaacaacagttttcgttcaagcttttttttgtagaaagagtttctgctaacataaccttactacataagatgttaacggttacctgtggcaagaaaccaaaatcttgagtgtgtatattttggaggaaacaagaatagcattgcaggaattgcaatgcaaggagcggaattcaaaactacccataaccgcatatcatcaagaaccctgaaatcatcgagaacagagcaagaggactcattttattatctgatatactgacatcaacaatggaacacgctataggtgctggggcactattacctttcacatgcgctgctcaccagtatgagagataagagtgatagcaaacaagataacccagccctttcatcaactctttcaattaccaatatagacaacattgaagaagctgatatcatcatctgcgttcatagcatccagtgaacattcatatcgaggaaaaggatagatacatattcattaatagcattggttatgcacgataacatgatagtcagattggctgcctagcacagtagtatggaaactcagacacatccttttttttctctttttgcctatggttaatacttcgatgatattaaggacattcaagtaggtgaactgcattttttgaacatgaactacttaatacagttttttctcccaatggactcgaagcataaaatgacaacatatcaaaaaaaattccaagtccagaaaccatggaaaacaccacgaaataagtaaacagtagatggggaaattacagaaagatgagatatttagataccggcaacctgtcccaaattaagcggtcatcatctggtttgaggtgatagtaagccgagccaaatgctgctgctacattcccagcatagaagaggaaccatcccaaggcctcccatctcaagctgcacaattccacagtaaaaacaaaatattaaacaccagatcttacctgctgatctgtttttctgttaaataaggatagcaaaataggaatatctctttaagcatcatgccctcaataccagcctagttgtacaataagcagtatttcaagaaacatgaagatcacacacttgttaaataaaatttcaacatcaaatttaaagatttgagtacacggtttggtggaacaccctagctcaaattccattatatacccactctataatatagcaagattacagattattaaagcaattagatgaataagcatgtaatagctacaggcccaggcaaagttatactagcatagcagcaaaaatattatttcactggtcaccaacattacagtccatctttctctcagacagaagcagtttattagagccaggggagttcataaccaccctttcactttggtggtaactgtaaataagttcataaccaggggagtagtaaaatgagcagttatgaaacaattaggcacaagctggcctcctctctctaggttttcgagcataatcagggtaaattgacctcctatataattttgttcaagctcgtggtactcgattctcgaatactttaattacagctcttccctcgctgcaaatcacgaaacaatgtaacttcacgcacttctttataatcctttaggcgagacatttcaccgaacagcagccgagcaagggcaaagggcggagcgcgcacctgatgccgaagcacccactgccacagaggcagaggacgagcccgggcacgcccgccaggaggagcgggtaggcggtgagcacgttgagcgtgttggggacgccgaggaggttgcgcatgtcggcgaagaggtggagcgcgggggagtggcggagccgcggcgtggccaccaggagcagcgccgaggcgaggacggcccccccggcgagcgcgcggcgccggtgctcccggcggagcgccgcggccgcgaggtggccgaggccgaggccgagggcggcgcggccgccgccgccgcggtgggggtggtcggcggcggcgagatgcatgtggccagggggagtgctcagtggagcagaagaatgcggtgaattttttctggtgttgggccgccttgcggttgtgggcctgcttttcttggggattcttttttagccaggtcccttccattcatcggccatacaaattagtccctgggattcttttcaagttcggatgagtttatagaaaaatttagaaatatctagagcattaaattagttttatctagtagtattgaatatattttgataatatgtttggtttgtgttaaaagtgctaatatacatttttataaaatttggtcaaacttaaataagtgacttataatatgaaatggagagggaattgtatctttttaatcatcgaccaaataatatttttttaagaaatattgaatttcatgatcttaggattatacagatttgttgtccatctcggattgatatcttcttctccaactttggtgagctcaaccaactattttaaatatatatggcaccattggtttttctctaaattttggccaatgatattattcaaataaataaataaattgaataaaattactaatagatcatcataattaatttaaacgtgacttgtacctcaagtgtatttgcacaattatctataaaaagccaaattaagaaaaccaacgatgtcatatatgtatctaaaattggaaatgttgcatttcatatataggacatttggaagagcggtagagtctgagaaacaagttgcgaggtgtgtgcagtaaaagtctaacaattttggtagtttggagaagtgggagactctcttgaagcagatgtagctacttaaaaactcttctttgcacaacttttccaacttcactatattttctgcacgcacgtttcacaaacagttaaacatcgtgtttttcataaattgtttctctagaaaagctgttttaaaaatcatattaatttcccttttcaagtttttttagcaaattttattaactaataatgcgctaataagagatctcgttttattccatgtggaggagattaattagttcccaacacaaggaaatgaaacagcctatatggtaatgggcatgaggcatagggcaagaggtgtgttcatggcgtaccataatatgtttagggggtgtttagatccaccccaaaattttacaccatatcacatcgaacgtttgaacacctgcatgaagtattaaatataggctaaaaaataactaattgcatagattacgactaatttgcgagacgaatcttttaagcctaattgctccatgatttgacaatgtagtgctacagtaaacattgctaatgacgaattaattaggcttaataaattcatctcgcggtttactaacagattctgtaattggtttttttattagtgcccgaacaccacatgcgacacccagccctatataatatccgatgtaacatgccaaaactttacacccctagatctaaacacccccttagagaaatctaagattctcaaaaaacaagcaatttactagtgagaaacggccaaaatatttctctaatatatatatttctccaatttagattcgcaattgccgagtatcaactgccgagaaacggccaaaatatctctaatagcattaatatttcatatgctatattgtttcaaaaaaattatttcatatgcgatatacttggagtcagggcaaattttactttggcgtaccacatctgctatataagttggggtgatcatttggcgttcaaatatgggaagttgggcggcgtcgcggcggtgaccgaaaatggaatgctcatgcaaccgcactgcccggctgcagatctccggttagatacgcagtactagtacttgtcacattgctatcccaatctttttcttaaaaattcagatcaccaggtactagcttactactccagtgatactaaccactactactcctggagactataataaacatatatatatatatatatttagatttattctctatcaatcgccttaatttgaatcaattatgtgcacatgttgtacaattaattcacgtacgcatcgaccgacgccggccgttaatttgtttcagttaattaaagctatcagctaagttattatgtgagtgcatatatatagtggtttcttgtcatgcgcagacagatcgagtgttccttgtgcaaacagaaagctactcgatcatatttcggtcctcaaattaattaccaattaattaattgataattaatcaagtcgttgttggaactaaacacagattggccagctcaaaagcaaccaacaatgtcgttgttatccatgtgatatatcgatgatgatgtgaatctccggtgtcgttagccgtcgtcgtcaattgtctttctgatgattggcttacatcgatcgatcgagctctgcaaggtatcaggaaaaggccagagtttctttccccagattcgcctgaagatatcctttgcttcgatctccctctttctccatcgatcttgactcgtgatcacgtacgcctttctgggatctcgtgtctcttgtttccatatggatcgatcgatcgatcttacgtcaattctggcttgatacacagtacgtgctggatgtggaagatctgtaagaaaagcgggtagatagctaggtatatactgtatatactccccctgtctcataaaaaacgaatttagatcggatgtgatacgtccagtactatagatctgcatagatatgtatattcaaattatttatagtgctagaaacgtcacattcggtactagatagttttttatgggatggaaggagtaaatatatatactgaagctgcagacgtcaaaccaaatgtgtacgttttttcttcgtgattatcttgcaagatcttcgtaccagatcctgatttaatcgcatatatcttatacggtgactagaaagtactacagcctcgatctttcggagtaaacgattgatactgtatttgtttacacataaagcaaacagctaaagctaacagatttagccgaaacagatcccaaacagtatcatacaaaataaagctagataggtctatatacctatataggtcatgatcctacatcagccaggaaaatgtcctgaattgatgcagtttaatacaaggactgagctactaggtgtatgtatgtgattaatttaaatggatatcataaaatttgatacgatagagtacgatgatacaagctcttacataaacacgtaaatctaaattcgaccaaaaataacaaatgctaattgcactgcagatgtttagcgatgtactacggctagctgatttaacttttttttcctagttgtaaaccgaatttagtttatggacttattttatcatcttaatcgataataactaattttatatttttttaacatacttatttaagtctcctgtaaatatcttaggtataaaataaagtaacttttgtccatatatatatactcctacacagttatgcatgcagtactgttcctttcagcggtagtaccatcggagatctggctcggatctagcttgtacacccaacatcgagcactaataattcaggataggtgacaagtcgtcactctcacagtacagattgctactgctgctgcatgtcgcacaaaatctcttcacgtcacaaatctctccacgtcttcatgacgtgaagagattttcaacgttggattttccatctgtactacgtacagcgctgtacgtacgtgcacgtagacgtacgggccccgttgtcacgtactccctccgtaaaaaaaaacttaatctaagagaaaaatgtaacccctacatcttctcccggtataaatttaaacatatggttgtctagattcgttatattaggaggtgccacattcgattcaagattgaatttcttttggactgatcgagtatgtgataattattagtataagctgacttcccttttcgtgagaaatactgtatgagaatggactttggagcatctagatctctctcccccaaaacaaaactctctcacacacacatatacatatacatatacatatacatatacatatacatatacacacacacatatatacatatatatatatatatgaatgaatttagatatacaagtattctagaagtaaatttttttttcttggacgtaaggagggatatcttactagcattcatatgcatggaaaaatattgcaaacttataatacatataactaagattaatttagtttacacccacaagacgacgatagatatgcatcatgatgcattcaagcatgccgtacgtttgagatcgacatgcatatgaaggcatccatgcatgcatgcaaattggctggtagtacactagtagtacgtagtactgtactatatatttacatacatgacctaattaattaattaaaaaccaacttcttctaatcatacatgcggccacacacacgtacttatcacctattagttggcatgcatgcatcacagtactactttgcctctccttttagtaggcaaacacactacttaattatctcgcactacatatatactactactccattatttatattagcttgactagagcattgtccattgatcgatctccctgtcaagcttaattagctgcagtgtgctataacgtatgcacagtacacccatatgtgtatgcatacatacgtatatatacgtgtatatatacgcatgtagatatgcatttgcatacatgtgtcatttcatgcgagtggtgacgtgaaaatcccctggccacgggacaggatggcctttggatcatacttgctcttccgctgcacgaatcttggccagagattggcaccgaagtgccgcttctgccactctgcctggctgccgtagtaaggcaggtactgcttgtaggctatcccggccacctcgcagaaacccaagatctcgtcgttctgctcctccagcctccccacgtcgccggccgccgccgccgaccgcaggatccccaccgtgtagaacacctcgtcaccgtcgtcgtcggtgatcactgccgacatgttactgtcccacctgaaacatatccaggtgtgtgtatgtttagttaccaccatatatgttaaaattaaggaaagtctattcatccttcaagagaacggacattgtttttcatgtcgtaaaagaaccataaaaatactctggaaatatataatataccacttcataaatatgtacgtttaaattcaagtagcatactagcataagtaaataaataacttagtacacactatttgcagtcaaatttgtttttttactacttgtgcaagttgagtttaagattacaatgtttatatagtgatatataatatatttatgtatcatattaattttttatttaaacattttaataagttttcagacgacacgcacaatatgaggggtcgtcattttgaacgaaaaaatccaccccgtaaaaattatatacatgtgtatatgtagtaaagctttttattattattattacttgttgcggttcatggggtagatgaggacggggcccatggcgggggtgcggctgaggatgccgtggaagacgccgtcggcgaaggcgaggacgccggagcgggggaggaacaggttcagccatgggtgcggcacgtcccagagccccgcggcgcggagcttgagctcgccgtcgtggacgcggtccaggaacccggcgtacgccacgtcctgcgcgaacacgaacccgcgctcgtgccgcagctcgcgacgcagcacatccatcctctgcaaataaaatcaagcaaagaaattaaagcatatatgttggtaaaattcatcaaattctttgcagagagatcaccgaaatttgatcgagttattaattttgccagcactagcagcgtggatggacaggtggcgacgtgacgtcatgcaaggataaagtgaggcagtactttgtccacatgtgtgtgtgacgtgtcacgtgtgggcatgcaggatcttctcggatcacatagcaaaagctatagctaggaaatgcaaactgtatatgcatggaataactagctagctatctatatagagccaacatagttggtcggtcgtgttgcaaaagatgggggctcatgcatgcatatgcatgtgtgtgctaaagctggctagctagggttataaccatacaagctgatgcatgcactgtatctagtggcgcacagatctttggctggcctgtcatccatgagagatccatcatatccatcggtttccagcttctagcctagctagatacatgtaactatgatcaaaagctagctagctagcacatactatgtgatgtgtcaatggccacatgatgcatgcatggatggtaggtccaagctggcgatgctgatttctttctggcaaagctctaattcctcagtcccgtaataaggcagcgttcgtttggacgacattgagggagaaagcacctcgttttccgcaagtacgctttccaaactattaaacggtgtgttttttgtaaaaattttatataggaaagttgctttaaaaaatcatattaatccatttttgaaatttaaaatagttaatactcaattaatcatgagctaatggctcacctcgttttgcgtatcttcccaatctcctcaatccccttctcctcaaacacaccagtttatattttgctcattccatttattctaaaataagtttatttttaaaataatcattgcatcggagtttgtgaaaatagagaataaccgaaatttgtagtactttctattggtatgtgtgagatggatgaaaagtgaacttattttgggatggaggtagtacatggtattactagtatatgtccatgtctaaattcattgtattagggtatgtcccatccaattttaaattcttatattttaggaccgatgagtagtagttttgtgcagaacaacagatatgtgcgtagacatacactaatctagtctagctacatgctcaaaattgatactccctcactttaaaaaataaagtatttttatatgcatttgtctagatgcatataattagaaatgcttatattttaaaattgagggagtatatatatgaaccctctttggtcaagatgaaaatgtgatgtttaagtcaacttttagtaactttgaacatcaatatgtatatcttcataaacttttgattggttatatgattttccttaaaaatatacttttacaataccataattttattacctttatttttttttaaaaaaatataatacaaaaatacctgttaaagttgtgcgttctgaagactgtaacagtgtttaaaaagacaagtttttccttgatgtgctacaaatactgttaatgatataattcgtcctggtagctactacctacactagcacgcatgcttttcactgttttggacgaaaaagttttcaccataagtagctaaaagaatatgtcacgatcagacgatgcatatattttatacacctgtttaagcttagtgagagcgactaacctaatactccatatactagcttactaagttgctactatagtatctaatctttgtctctccgggaactaaggaagataaaaaaaaattaacacagaatcgaataattatttaattacttccagttaggtgtgtgatagcgagaggtgcatcgcgtggcagacaaaagtggtaggccaagtacgacgatgtcgacggcgcaagagacttcaatttcatgcaccgttagggtctgtttggtttccacggacttattccaagtccatgtcacaccagatgtttgaatactaatttggagtattaaacatacactaattataaaacatattccatatcttggactaattcacgagacgaatcttttgagtctaattatgtcatgattttgacaatgtgatgctacaataaacttttataattatagattaattaggcttaaaaaattcgtctcgcggattagctctcatttatgaaattagtttttttattagtctatatttaatactccaaattagcgtccaaacatccgatgtgacatgggctaaaaagttttagccccatctagaacaccccttaattgcatgcgtgcgtaagcgtaagccccaggtggcgccaaaagtttttgcagcttagttgttcccgccatcatcacgaggtgggacccgctctggtcggctcagcgcagagcaagctagtagctagctagtataccttgtcaacgtcggcggcggacggcccggcggcgccgccgaagtagatggcgccctcgaggaaatacagcacgccgccggcctccttggcgagcgcggcgacgcgggcctcgtcggcgtcggagaagaaggatgaggaggaggaggaggacggcgaaggcggctgcggctgcgtgcgccaggtctcgaccaggccctggttcaggtggaccgagccctcgacgtagtccatcagcccgcccaccgcgccggcgccgccggcgcgatcgacggcgatgaggcgctcctggtcggccgtcatcgccgccgccgtcgtgtacacgaaccgcacccaccgcgccctcgccggcgccggcgcgagcgggatgcgcgcccgcgtgatgacgccgaactgccccagcccgcccagcaccgcgtcgaacaggtccggcgccttctccttcgagcacgtcaccatctccccgacacctgcagatacatgtatacgtcaaaacacctataccttaattacctcgatcatggcggcgcgtgtcttagtagatgtgatggatctacgtaccggtgatgacgtcgagctctagcacgttggaaatctgggggccatggcggaaggcctggccgctgatgccggcgttggacagcgtgccgccgacggtgaggtggaggtagtctgtccacgacaccggcgtgagcccgtgcgccatggacgcgcgcagcacgtccacccacagctgctcgccgccggcgtcgacgtaccgcccctccactgacacggcgaggcgccgcgcgccgccgccctgcaggcggccgagcgacgccatgtcgacgacgacgccgtcgggcgcggaggcctggccgtgcaccgagtggccacacccccgcgcggacaccgcgaacggcgccgggcgtgcgcacgacgcgcgcagcagcgcggcgatgtcggcggggcgcgacgggtagagcacggcggcggcggcggcgagccgaggcgccccgacgccggcgacggagaggttgccaaagtcggcggaggcgcgcgcggtgcccgcctcgtcggcgcggatgagcggcgcgatgccgaggtcgccgaggtcgtcgaggaaggaggcggacgaagccgacggcggccatggcggcggcgccgtggccttgacgaagcagttgagcatgaggagcactgccatcctgacctgctcttgcttcattatcaatcaatcaatcgatcggtttgtgtgtgtcagtgtgtgtgtgaatttgtgtgttcttgcaccattgtagaagggacaaggtggcctataaataagcagattcttgtgtagtttgtgtgctgacgatggaaggcagctgatagatagctagatagacagtagagctgtggtgaccgagacttgaggctctctgagatctgtgtgacaaggactgaaagatttggtttggtttggtttgtcgttttggagattaggggagagtctttttaaaggctaattaagggtgatatatatccttctagaatctagattacatggtgttgcatgcataccatggtttgtgagaggtaattaaagtcgatataattaaacacgtaaaagaattaatacaagtgggaatataataggtcacatatatacatacactaccggaatccagaattctgggcggccattaatttgtactccacaagggagttgtatgcaggcagttcggccggtaacacatttgaaccctcgagggatatcctattatgtattcgaaaaccattcatgaaaaattctcaaaagaatttaccactcgacaaaatttagtcaaaaaaaaaactaacttgggcctaatggctagcagcacggttagtatagccaccctaggtttgattccttccttctccatttttttttatattcagtccaaactagctagaccacacatccaaaaataaattaaaaaagttgagacaaattcagcatataaaccctatactattaacacattgagatgaaagagcattagacaaacaacccgttaattttacaaggacaaatatataagtgaaccagtaaacttaaaatggaagataaagaaatttcacatcccccgcatagaacgctaggtatgttcagccaattagttcacctaattagctttctcaaattaattagttattaggttctaggtataatatttttaggataaattttaaatagtagaaacacatcctttttgagacggatgcaatagtcgtcgttagcccttgcatccctaccatgcaatcgatccggccatagagaatcccataagaggatgagtggtatagagagattgcacgtctatgctgcatagtgtgccattacctatagcttctcgttcaccctgaagtgcagtgcctgcgataactaatcttcactattataaacattaaaaatatttttttatctaatattttggtaccttgctcgagtccatactgatttttcatccatcggccctggcccgattgtttcggtgctgtgtgtctttgtttccactcctaatcagtgtgcgttgtgagttcaagtgcacgcgttgcgcgattcagtcacgacgtccccatatctcctgctgtttccaggactcgacatatgtgcactttggcacatctcctagatggaccgaggaaaaacagaaaagacgatacgtagagccttattatacatacggaactggtcgaatattggtcaagacatgcttatgtgatgcattagcgatcaaatattaattcgtggataatttttttttatattttttcgtgccgacttaaaagctcttgcttaaaaataagctacgataaaaggaaaatcaaaatcaactccgaaaattaaatttgaaaatcagctatatttgttttggaaggggttagatcatgaaaatcaaaccgtgatcatctaaatgctaatgcaatattagttttccctttgaaatgcacggatcttttttccagtgcaaagaagaaaacaaattggtacgagagatgacattttgccttgcctcccattgtatcgcgtcgcgtcgcatgcaagagctgccaaaacgaaacattgtacgattatatatactccctccgtcgctaaatatttggcgctgttgacttttaactatatgtttgaccgttcgttttatccaaaaactttggtgaaatatgtaaaactatatgtatatataaaagtatatttaacaatgaatcaaatgataggaaaagaatcaataattacttaaatttcttaaataagacgaacggttaaacatattttaaaaaagtcaccggcgtcaaatatttaggtactagtattatatttgcgtggcgatgggagctactccatccgtttcaaaatatttgacaccgttgactttttagcacatgtttgaccgtttgtcttattcaaaaaatttgtgaaatatgtaaaactatatgtgtacatgaaagtatatttaacaataaatcaaatgatatgaaaagaataaataattacttaaattttttgaataagacgaatggtcaaacacatactaaaaagtcaacggtgtcaaatattttgaaacgggggaatatattggtcggccaaaacctagtacgtgcgtgcacacagcgaggcggattcgtagcgaagcatatgcatgcagcgcaccgacatgtagatctttgattctttggtcgatcgtttgtcgtcgtgcagggcaggtggcgctgtcgtggccgttgatcgatcgtggtgacagccaaacgcacgttcgatcgatccacggatccatgattttatttgccgctggcctgcgcgcggctgcagacgtacggccaccggccggccacctgatcgcgctctcgctctatagctctcgtacgcgacgcgcgcgggtaaccagccgcgtgtgcttgcacgtactcgatcgtatacgttgcatccagctgtccgcatgcattgcagccaggagagccgaggagtgtcgctgctggaggttctcgtacagaaactttttttttaataaaaaaaaacacaccgtttagcagtttaaaaaatatgcgagcgaaaaacgagaggagaaagttgggaaccagccgtgccgaacacacccaaagcttgtccttaacccttgtttatttccctcctctcttatgaatacatgccactctatacatttagttctttctttctaaaatatatataagaacctatagtatcggatggaacactttagtttttattactacgacacatttttgtgaccgactctggaatatatataactttaaactgatcaaattaaacggttcaaaactttgttgctaagttgattttttataattttaatttaaactgattaaattaagtgcatggttgagaactttgtttataagaattttatatgtagcagtgctcatccgagaaatataacctatcattatctaatcagtattacagatcttaaccaattaccttttcttacagcagaagagatgcacgtagatgagtgaatcatatatatacaagtcgcaatcaaagtaatggatccaatcaaggtgaaaagacgaggtgtggccgccgtggaaattctgaattaggagatatattgcttaacacagtattatatataattagttgaagatcgtatcctaattaagtcatgaatgaatgaatctctatagctacggtggtcgaccgtcaatggtcattcctcgacgtactaattaacaaatgaatatattcgattgtgtacgtgctagatcgatcgatgatacgcaattatttatgcttctttgtccaacatgactcatttcacatcctgcccgaatcttgtcgccttgacaattttggcacatgtacgtacagtggcgtcttgatctttatcttagtggcctctctacagatagatatcgatccagctgagaacttgtcaggttttatcgaggaccaagttgccctgccatgtgtatagtgtttgcggatggacagcttttacggtatgcagtccaaatatatcacataaatatacaaattgtatatttttcttattacacgaaagatgtgaacacatgtgggagttggtttcattcctttcccaatcaacctcactcgttttcatgcgtacgcatttttaaactgctaaacggtatgttaaattttatttacaaaaattgcttttaaaaattatattaatattttttttaaaaaatataacacttaattagtcatgcactaaacatcactttgttttgtgtgctaggagtgaaggttcccaacccttgcccccgaacttagtctaaagttctattaaaagtgcacctcctactatgtgcatgtgtatcataagggagtgtctaaattctagctacctgaaactaaattttctatcatttttttcatgcatgataatccaatatggttctcatatcactccctattatttattcatttaaataaaatcccttcttagtataaacaggttgaacaaaaaattggtaacatatatacaaagatttacaaaattacatgaaataaaaataaagtaaaaacatatataacaacaaaattgctgttaaaacggagtaaaattgcacatatatctaaatattctaggtgtccagcgcttgaaatcaaccaaataccatgtatgtgtcatctaactaaccctacattcatgcatgtgttgaaataatatgaaagttttttctgtttacgcgcactatatccgtgtgttgtgacggagataagaatttaagatcacaagttgaagaatggaaagcaataaaaaaatacaagagtggcggaattggtgcagagcatactgtcaccctccaattccaactcccccttttgaaacataatttttatatatttcgcacacatcatctcgatcagatttgcagaaacatatggtgcccagcatatctaaagcaagagatgcagatgacgtcaacaaaccgttcaatttgatgagatttgttcgtataagatcttcacgaggatcctgaataatcctgatgcaggcgtagacttaattacatatagcatccagtgagtttactcgcggcaaaaggtgaaatttgcgatctccaaaaggaaacaatactatatcaaaccagaatataaattaggacaagcagttcggttcgatcagtttgtcactgtcacacacgcactacatgcattttttaatacgatttcacgcaggacacattatacgatatgcatcaatcttcaggatggcgatagtacacattttacagctatatatttcagatcacaagcttttacacgtgtcacatacacaacatactccctcgatctatcccaggaaaaatagaaaaaaaatcaatttttagatttgaatctggatattgcctactccaggtcctaaaataaaccattcttatacgggatgttaccagggtttcccaaaccgccggggccggggttactgtgccccggtggtaagcacgtttaatgtgcgataactgtggaaaaccgtactgacggagcgtggggctcctcaccgggagaccgcgcaggtccccctttaccggttcggccgggggcgctaagtgaggttcttcgccctcgatctgaggaacgtcagcgagagaggaagtgcacaagacacgggcgacgtagacaggttcgggccgctgagaagcgtaacaccctactcctgtgttctggtggatctgtgtgtgaaggaatacagagagccggagagcgagagagagttcaggctctagaacccattccccagagtcccaacccctcttcctctttttctcctcttttttctccctcttttctccttttttcctctcctaggcctgggcctcctttttatcggg

SEQ ID NO: 8520 - DNA, 31157 bp, Oryza sativa
atcgaatcccggccatctcgggcgcgggcgcgagcgggacagagaggggagtgggcgcggggaacgcggcgcacgcgcgggcgtggtcgacgtggcctggaggaggcggaggcgtggacgcggcggcggtttcgggcgcggcggttgctggcgcggcttcggccggaggtgggggaaggacccgacaggtgggccccacctgtcggcgaccccgggagaggagggcggcgggcggcctggctgggcctcggcctgcggccggcccaacagggagggggggaggaaggagagaatgggccggcggcccattcgaaaaaaagaggaaaaagggaggaaaaagaaaaagaaaaaggaaaaaggattttccctggaattaaaatattgcttgctcaattttaattggttaaaattatttctagagctctgaaaatttcactaaaaatcctgttaatgaatttcgacatgtagaactcaagaaaaattccacatgtcaaatccgattattatttgcattactttcttagggttttttcttgatttgcacctgtattttcttgggggtcgtttataaattaaatttttggcttgggaggagaacttcggggtgtgacagtcagacacgaagtctgttgcagtccccatcaagtaccgatcctcactgatccatgcatgccaacacatgatctcagaggatcttgagaatgtagattggggtgttgatatcatgtgatatatttcacacacaatgccaacgacagtatagctggcgagtcatgtggaagtcgtctctgaacctgatccgaaacatggtacagattctgctgtagatgatcgttcaaaggaaggtgatccatatgtatcagtcatcgtgaccccatcgcatctccccaaagatacgatcgattcggagctttgtaagatggagaagccaccgtatacctatccatgtaactaacgtgagacttcattttcgtagacaaattcatgctacctccgttttttcatatatgatattgttgattttctaacaaccgttagaccatttgttttattcaaagtttttgtgcaaatataaaaaatttcaagttatgcttaaagaacatttaacgataaatcaagtcacaataaaacaaataataattacataaaatttttgaataagataaatgatcaaattaaaaaaatcaacgacgccatatattaaaaaacagaggaagtacgcactatcatgccaatagatatcttttatggatgagcttttatgtagcaggttaaggatctaggctcagttaggctctattcgggagcgagggttgggaaccctgtaaccctaactccccggcacacaaaacgaagcagtgttttagtgcgtgattaattaagttttagctatttttttaaaaaatggattaatatgatttttttaagcaactttcgtatagaaactttttgcaaaaaacgcaccgtttagcagtttaaaaagcgtgcgcgcggaaaacgaagatgaggagttgagaacttgtactaacaaacggagccttagtcgagggatgcataaatctagaccacccaagttttaagttctaattgagataaatttgggtgcatgccctttaattttagggtaagtcgagacatgtgatcgaagcaacaaaaaataatttgagtttttttagtcatgcccaatactccctcaattctaaatcaactttctaacgaatttagaaatatgttatatgcaaattcctatatgaaagttaatttattataggacggatggagtaacttataaccgagatatgagatcgaggcaacggaaaatagttttagaagtcaaatatgacaaagaaaaacttaaaatttaagcttgaggaaaatttgggtactgcatatagatcatatggctgcacatgtctttcccagctctccttgattcgttgttgtccaaacactgtactggtcgcgggcgtatctccatgtgaatctcgcgaggcagatgcatgtcgagcagtcgaggtaaaatagctagctaggtgacgtccctgtccatcaggagcacgtcacggctgtcgttagctaaatctagctggattgtattgctagctcactctttgtcactcagcttgcccgtctttgtctaacctggctaaggccctgtctagattccaacttttttcctcaaacttctaacattttcgtcacatcgaacttttctgcacatacaaacttttaacttttccgtcacatcgtttcaaattctttagacttttaattttggtgtggaactaaacgcagcctaaagttgactcgctagtacttgtaccacatgtgtcgcgcgcgtgcaaactcatcagtgcaattgcaagtgcaaatggcatgtgatttcgtcgtcgtctcgcaccggattggagagggaaagatcttgccaagatcgctgggagatctgtagggcgctctctctctctctctctctgtgtcagggagatcagagatcttgtgacggctcagggtgtcgttaattatatgctataggccacggcgacttgaccgcggccaaggctgactaattagcatgctgtaaatcgtcttgaaaacgaaaggtagttaattagcacgttaatcgtcttgagaagggaagatcgagtcgggcctgcgtgtgctcgtgtgattctttgacggtgttggccggaagaaatcgtcttcacaacgaggatttttttttactttgtagtccttttttgaaaacttaatttataaatatatacctaaaaaaaacttaatcttgaaatggaccttttttttatgacgctaatatcattggcgccgtggttcaacatgacattgcgccgtccctctttaccccttcttagaagctaagacaccgatacaaaggggtggatcagcaccaatgtcattgacaccaaggatttatttgtaataaaaatatttataaatagatctttggtacaagtgaaaaattcctggcttcaatctacctactgattcctgaaagagaaaaaaactccttttaaatcctatacgttccagtcaggattttaaacaactctagttcccaacagagataacctcgtaccatacagaatccatgctgtccattttgcacaccaacagtgatgcatacttgtgcccattgtcacactggacactgcgcttacagataatcactagttcactacagcaggttcacttgaagcagccatgccggtataaacatggcccataataatttttctagtagtactttgtcccacatgttcatgagaagtgctaaatcaccagcttaaaaagtctgctcctaacattactgctacagtacacacatacttgatacaatagatagttaatttggtggtagtagtccataaacacgacactctacctgcgatgatccttcttgatgatcttgcgaagaagtggaagcgagcagagcgcggtgtcaccctcgttcttgagcgcgtagaagtggcacagcgcgcggccggcgaccttccaggcgaagccacacctgctggcgtcgttgctccaccgtgctttctcatacacaatctggtagatcacgcaggcttccgagaacacgtcgtcggggtccctctgtgtctgctcgaattcagatgcatcgtagagcatctgcagcaggttcaagggttcgttaggttaaaacgaaaacggcgagccgccaatttcattgaatagagaagaataaaaccgtacagaaaacaaacatgtacaaacatagggccacagcccgactaagggctaattaccgcgccacccaggcggcgagatagggttcgttaggttaaaaagctagctgtaattaattcgaccattgaaaacgctgttactcaggaaatttggatggatactcacatgcttgtacttctcgtagagttcttggaacttcatgttcctttcttctttatctaccattgcgcgatagagcattgtactgtcagtcaagtactcctcgtagcggtgttgccagaggtgcctggctgctggaggtgcttctctttccatgaaacatgggagcaatgataccccttattattgtaaaaaggaaaagagggaaaaaagtaaggcatactgttagagagaacattcatattatagtactattctcatcaaacatatgaaaccaatttaattgaaaccgtgttctatgccaaaatcatgtctagtgcttctgcagaatggtaactaacctctgcttctctcattgaacaattttgacatctctccctcccattcattttgttttgaaactaggtggaccatatgagtaaaaaattaacggttgagtgcataagtagatagtcttctccataattaaaaacagcagatgattttttttgtaactttttaatacaattttagaaataaatctttccacaacttatttctaggtctgaataagtgtaaactattataatttaagattatccttatgtgcgtaggtaactaattagaatagatgtaattgttcatcatcacttctataaataaattaatatatataaacatgaaactataatggtttattaattactatttccaattaattgactgccttacaattaatcattttttcatgcaatgaatgcaaaccgtttttttttaaaaaatggcatagaccctttccatgataccacatatgtatatactgagaacaacatcacattttctcaatatgcttgccatttggcaataccttaactactgcaagctcagctcataagttatagcctatgtgctacaagcagaacaaataatgtatgtcatctccctactgcagataaaactataaaagaactgaaaaaaggaacctaaataaaacagacaacataccgattggttgaacattacaagatcgcagagattctacatcttctgctttatcatagatttgtccaagtatggatgatgaatggtacgaaaaactgcggcccatgaagtgggggtattgttttaccatcagatcacttggaatattgacctgttgggacagcacataaactgttgaagtgcaatatgcattcccatgtaatgaactttggtcttacaaagcatcaaatataaaataataaagatacacctgcacatttcatctattatctttatcttgtagccctacttgatctcactgcttcatacgttaaacgtattcctgtcaccatgcaactattccaaccaccatggtgccctggacaccgggtagctggtccatttctaacttatattgaactatgttaattacaacattatccaataatcagcttattactatgtactggacacccactgcagctatccgtataaaatattggcagtttatgaatcattgtaatgaatcacgagttgttcagataactacacttggttcatccgttcatgaatcattgtaataaggattcagtactgtgtaaaagcatttgaaactgaagaatgtgtaagcccaagattggaactaaccttgttcccagtcttcggagcatccaaagccaaataatacaggtcaactaactttagcatcttttcctctattagtttcttttcaatttcgtcaagtgaatctgtcaatagtcggtccatatatgctaaccagctatcagctgccgtaccaagtgcaaaactgaaaggagaaaagaactccaaaatcatgttagattgtataaaaccaataaaggttgcatatattgaaatactacaggaggtcaccaaaactagatttttaaaaatgtactgatcaggttcatataaaaagaaattcaagcacttctagaatattgaattcaatcaagtgctgaactcctcaataaattgcctactaaaaactaaatgagattcatgctgctaagttttctttatagtgaaatggttctagttaccattccaaaaaggaaggctggtgacaattattactgtgcatcagaaaaatcaagcttggtattaatacctgggagtaaatcttgttttcaagaactcatgaaatagcagcctttcaagtttggattcattacaatcctgaggtttcttttgcttggtcttttttggtttaatagcttgtacccacggttcagaaggtttgaagtgttctaataactgaaaagaacattttcaggatcagtcagcaataattctttcaaaagttaaagacagaatgtgctgttattatatcagtaccttattatgcaagaattataatttaaagatacagtgaaacaacaatgccaaatttactaatgaatcatgcacagcaaatctgtaatcagtccaagaactagcaagcataattaaaacggataggtcaatattccaacacttttggccactgaacttgggcttcattagcgattggccacctgaaaccattctacattcgggccaagtttaaaaggtgaaaagtgaatggcttcgatagtctaaatttaggaaaagggtccactttttaggtctgaagatcagggttgtaaaatggacactttcctcattaaacatgaaggcatgcaatattatttagtttggtaaccaaattaacccctcatgtctaactggcatcccaaccaagccaacaccttccagctatccacttggcggtgtttatcctctatgaaaccttgcccataacacatgtttggcaaaaggtccaattttgcccttaaggtttaacaagggccacttttcttacaaagaagagagtgtttccaagaagactacatggatagactcaataaatatagaccatagttaaaatagcatcacggccatatggatggaacaactacactatgaacgagggtggaaccaagcaaaacttcactacggattttaatgagaatgaaagataatcaagcacaaaggcacaataaggcaaaatgtcaattagaaattaacaaacctttgggttttttgagacccaataaatgtcaccgtcaaaatcactgttggccatctcatcagccaaagaccgcggcccagaaatagggaagagtatagcatatttagcatatcccacatactccttttctagatccctaatatatgttgctttcaagacatgtatatcaccaaaatgtaacccaggatgtttataaacaagaacatctccagaaaactggccattttcactgttgaacagcagataaagctaataagtaaagaacaaaccagaatgcgatcaaacataagtgatacagtaccaaccaatggatgcaaggaagaaatatgacaaagaacattagttcttaacattgacaaattcaaaaccttttaataatccataatatcttctatttgagattttttttctatttattaaaaacagtcacacagatttcctgatgtctaaaagactacatgttcaagttagtctaaatttgggaaaatgaacttaaaaatgcaattgaagtcctgaagccccaaatacccagatgtatttagtatcataagttactagtctaaacattttctttagccgctgtttaccaacgaacttcacaattgcaatcaaaatcattgccagcaatatataattgtttgaatacaaaaatgcgttctcattgctaaaaggaaattgcaaaaactccatctcaccttgttaaagtgcaaaatttatggtgctaatcagcaagaacttggaagaaagcatggcaattttggtgcatttctactaaacaaaattacaagacattaaagcagttccagtggtgtccatgctggatagtggatattcctatgctatatggtgactggtgaatagtaaactgaggatcactgatacatataaaaaccgctgaaaggatatgcagatgcaaaaggggtaattctgtaactaacagtatcacgcagacttcattaggtctgagtgttccggtagggtctgtagtatccattagataatagcactcatcaattggtatctttccttgcttgattccttttctttcctgttgagccatgaaatccagcctatgttgcaaatatgactcttctagaggaattccagaaagaatcatacgtgctgacattgaatcttccatgtcagcatagctgaatgcaactgtaagaacaacatgagaataatagtccagatcaaacataaacaggtgactgaaaaacataaataaaatggaaatcttatgacaacatgtaaattgcactgaatgcaacaaatgtattttgaacttacttctcagtgcatcttcataatcgtaacatgcattctcagccccttcaattgcactttgcagaagctccaaaaagtactcttctggaactcctccatagcaaagtaatgttatcaagaaccttgatgttaatgtccttctgggtcgattgctgagcaaaaaaaaaaaaaaccatagtactgattgtgaacaaaaatataattgattaattgctgccaataaaaagcttaaacagtggaggaaaaatgtaaagtcctcaacatgctttaccaccctcccctcaaaaaacatgctttaccacccctatctcatcaacctaatcagccccaaccatgaagaacgacatgtgacagcacttggaaccccttaagtaccaccaaccgatgaatgaaatgcaccggacgtctgggctttcatacacaaacaaactcatcccaaaaaaacatgaactattaagcaaaggaaagtaatcccatttatagtacaaaacatgtgtttttgttctgatttccatgctatgccacctcatagaatcagtagcagttaaatgggaaaaagatatcaagtactcccttcctcgggggaactgtgcaaatgatcgtgacaaattcaggaaagagaatggcaaccttgacacaaaaatcaatctatcagccgcaaagtttcaaacagttcattctgctgaaagggaatctcaaaagagagatagaaagctagaattcactgaattttttactatttgtttaacctagcatagtatagattttacattgaattatttttggaatgcccggttatccatgaaccatgcacccatttcttttttttttaccttttgcaccttttcatggccattaatattgtgtccagggttcacctctccgatatggaccaatcccaacccctggcagtacaacagctttcaccaaatttcgctcgaatttactgtttcaaatttgaacttctcaaaaaccattcaaaagtttgctcaaaatctactttcgtcccatgccaaaacctcaatattatgtgaaccctggttggatctctaaggcgatgcacagggggaccagaagggtgggatgcaccggaaaaatatctaaacaaaattaactgttacttttactgcgctggtagaaagccagagcacaaaaaccagagcttaagtactaaaatgtattagtaaccaaggatgctctacatataaaaatagatgtaacaactaacaatgcaactcagatttttggtaccttgtagagactatttcaaaggaattcacggactgaacaccagataaacttttcttggcatttcgtgcagagactatttccgatgagttgacagaccggacaccagataattctggatgagtttctatttttaccattgatggtcggatgagtatagttgcaggaggaagctgcaacagaaagagatctattcttattcttacaaaatacacttgaatgctagggatagtagctaagataagatagcaaaagaaaattatctgtacacaaaattgtgtaaaaattgaatagattgaaaaagacagtgcatgatgtacaacaagaggatatctgaaaagatgacaacaccagcattgaacaaaatgaattaatgatcaacaattattagaaaacagtgaccttgtatgagataacatgtctatcctgaaagtatataaatcatgcaatgatattctgaatattgcttgaatttacacaatcatatagtattagttaaattgccagatccgtaatagaagatccgattgtattgctatcaggatacaaggaaggcacgattgcatagatgcttaagaaactatgaatcaaaattgggaacaagaggtgataacacaagagcaaacaaataacacaaaactaccaaatttcaatgtataagtaatatcatgtcaaaaactcagtacatacccgcctgtcaactaggactgttccctttacagcagatccattatagaacagacggaactgcataagaagaggctaggaaaatagaatagacaagaacagcaaactcattagttgaaaacacagcaaagtcagaaaagagtagatcggaacaacaaggcaatagttaatacagtacatgttcagcggtgagagatcgatgcctcttcaaactgttaggcctcatcactgtttcactttcatcacaagttgcaatgccctgaacaaggcataataaaaaaaaaagtatatcagctagctacaagcatggaccaaaacatcaccattaagtttgagaagcatgattgtccagaaaggaaaacataactaaaatataacataatagggtggtgatgtcatgtataacacacagtaacggaacttaatgttggttgatgttgattactggattttcgaattctgagtcagtagcaacaacttttcagtccacccttactcaatgcagtggacagtaggaaaaattcctaccaggcaattgttacagcagtgggcaggccattgcagttacttagcactttagcaggtaccaaattaggaataagtcaaataaagtactccctccgtcccaaaatataacaacttttagcccttaaggtttgtcccaaaatataacaacttcttcaccaacattctcttcttaaccaatcacaaccctccaccattcaattttctcacctacctccacttcttaaccaatcacaaccttctatttaattttacctactttcttaatacccatgtccaaccctaaaaattgtagagaatagaatagatgtctcaccaatgtgggggaggtgatctctcatatatatagctgaattacaatgaatgctagtgctgagatacaatcaatactagtgagttacataagaccaaaggtctagaagagtaactatctaggagagtaaaggtctaggagataaacaggcaaacagcctatagattaataaataatcctaataaaaatccttatattctgggacggagggagtaggagattatctcctaacaaggaggtttgttatattagagatcgagagagagagagagaggattggtttaatatttgatattagttccatggaaataaatctctatctctaagccaaaacaggatcagtaaattcctagtgagtgatgaaatgaatcaacaccagtacaaggtaaattaatataagaggtattttggttaggaacaggaaagaaagtcacacagcagtaaactggtattgcaatacaatgtgccaacaattaactgttcgcccatgaaggacaccaagtatggccgtatatatccggttggatttagaggccgggtaaaaaatacccttctctaaaaaaatggacaccaagtatcaatttaattaataagaaggataagacttaaattcgagctttagaggacccaaacttgggtggtgagggtgtacatccacacctcctaccaactaagctcgattcctggtctgcttttctctgcccacatgtttgaaactttatctaaaaatttgtaattatgttgcatagtatctttatgagcaactccacaaattctgctttctgcacattcatgagatgtgtttgtcaaactttattgttggtttgcatctgttcacattataaacaatcaagtaatccgaatttgcttattagtatgtaataacgccttcacaaaaccataaccatcaggggaacacaaacatagaatgtctgaaaggttaatgtatatattttagataatggacttttcattaatccggcctctatatccatcaaggaaatacacagccacaacatacgcgagttcttggagtccaacccacacgcagaggaaaacacataaacacacaaaaaaagaagcttgaagacttagcttaagggaacagaagtcttagattattcattcaaggtgtatggagtgaggataaagcgcacctgtggtttcaaaaattttcccttgaagatactcgtggggcaattgagagccaaatccacagatacaaggccagtcccatcagtatggatcaacggctcctgatctttgtgaacaacattgccatgtctgtcctgaaatgttacaataaagaaaaatgtgattccagaagcaaaaacaagtattggagaggagggaattaccatgcaaggttcatctttaatccgtctgacataaactgctgatagatcagcatcccatgtgatagttttggagagtatcaaagcaaaccttgttacaacagaaaacacaggtttcgtaagtaagagaacaatcacatgcaagcacgctcaagttgagtccaataattgtgtttttctatttagaaagcctaatagttcgatagcagcaataatgaaatgtacatggaaattgaaaatgtaggcaatggacttctggaaaaacaagcttatcttctgactaaataaatcccagcccttctatgcatctccttttgtatctaaaaacgatacgctgctatcatggtagcaaaaccagaattaccagtaaggcagtaactaagcttgacatcgaccagtacatatgcccacattgcatcaatttaattagttgacactactaaacaaagtcataaggaaaaacctggccatatattttgccaaggtgggggcagaacttatgtgcatgaatagttcacgggcctgaccaactgttctcccagagagtatataaggttcatccatgttccacccagactcagtgcgaacaaagtagcacatgacaggtgaagtgcatttgtttttgtcttctatcttctcttgtttcaatttctcctctttccctccatccttgtaaactgaaaggtacatcgatcaatgtaaatccaacaaaaaagcaaccaggaagcatgatgggagcacttggtaactaggatacaacttgtaaagtagaattggtgtctcttagtcaaattgacacgttcagactcttaatggatattgcttccaatttgtgtataactacagtcaatctattttttccagacaccttgcggggaaaacacatctatgccatctcacgcagccacgcaggaatgactggatggacctgttcacacaaccaaataaacccaagtgtgtcttcgaaaatccatgaccattgtttctctgaagccattagagaactttgaccctagtggtgttacatcataaattgcagtaattatgtattacatgcattctccagtctactacttggtaataaattcaaatagattcaatgatgcaagaaaaggaaacttaccgaaaaatcgatatcggcgcaaacccaaaacaataccatcttcagcaaccttatggtaatgttcacaatatgtagagaagtcagtcttggtgtctgacagtttccccataaactttactacaaggacattatcatcaccaacaactttctgtagatgagtccttgtattctcgatatatggtccctacattcagttaaataaggttacaaatttagcattggcacctgaagttccttaaaaaaatatcatgagtacggcatttgttgatatgggtgccttaatttttgttggcattggtcttcatactactactattaaaatcttatttgttggcattggtcttcatactactactattaaaatcttaggtggcctgcaaaggatgcatatgggtgatgtgcacctttatgtgcaagctagataggcaaacagtctgaacagcaatgaacaaattgaacactatacaatcacgattagtagatggtagaacatcaactagtaggccaactaaaaatatcgttattaaacaacgaacatcaataaacgctatcaaaaggctccacaaaccttgaaaattttgactacagtatcccctcttatcgcaacattacaatgatagacttttgtcatgcctggatctgaatcaaggttctgcaacaattaaaatggaggaatggagaatgatttcatcaggctcatgttataatatactatcagaggaaaagaaacagatagcagaaattagaaaaatgaaatgtcagtataatattctcatgatgttattgatagatcttgatgctcaagaatgttccaagttctagggaactgatgaacttacaagaactaggtatcattagcagacagtgtttctaataaggaacttttgaacaagaaaatatgcataagtgcatccctagaagattgtaaaagcatgatgcgttgcagaaaacttattacaggaaatggtttgtgatgttccagcttgctgatgaaccggccacagaaaatcacggtccaaaaggtggttttgctgcatttatcatggaatgccttgctagatgattggtaccgtttctatttgtttttgtagttctgaagtaaattaactcgaaatggaagtcaggaactacaagtcagtagtaccacctgtatggttctgctttcaacagaagcaggcttcttttcagcctttagtcttaaaaaaaagtcaaaagtgcatgtaacatacctagacactaacatcaaaatgaagaaaacatgatacttttaagatattagaagctcagatcagaatgtacaacagagtaagcatgcattatgtcctcgatgcacaagtaaattcaaggagaatgaacatgcataggtgcaaattatatatatttacttatggctccgtttagaattatccaagttctactatgaaatgggatcatcatctttgatcatttttagagatcgtcaatgaaatacaggaaatagaagtactgccattgaaataacctttgctctatccgaagctgcaatatacttgtggccaaatgttctccagatttgtgactcaaattgcgccatggacagaaacttcaaggatctaatatagtccacagacagaacattctctatcttttcactgaaacataaaagagaaaggtgtattagcaacagcaaaacacagacaaaagtcatctgacttaggaaataatgaatgttcaggtacaaaagcagtttttttttgttctccgttctatagaaaagcacaaaaatgaagagaaactaacctggcaaggtaagcaaaaaccataaatatttttctgaaccctaactcttccagcgctagcatctgaggactcgctgcctccctcaatgcattgtctgttgtatggcaagtcgttgtagggttttgcggcatcgccgtaatggggctcggcggacttactgaggggccagccatattctcaatgagtcttgaaatatcctgaacagagctcggggtggaaactcttcttggagtagaaatcatcggctggatggggctgtcaatctctatatagttctgcaggccagatggcatgcaacggcatggactaccaacttgcatcataacatcattaggcaccgcaggagccattgctcgggcaggactgtcaatctacagagccatttggttcaacccaggagaaaccattgcctgggtaggagtcccaacttcaatgcagccttgattctgcgacacagaagatgtatggccacatggactctcaactgtcagctgagcaagctgtggaaccaaacgagcaatttgtctgacagaaccaccattgccatgtaaatggaacggcatctgttggttgggactcccaacctctaccatcccatggtttgagagactagtagccatttcattgctggggctttgatcgtacatctgaacctcgttgtcgaacagttgcgtgtatactgattcctctgtataacagaagcctcgttagtctaacaagcattacagataaatcagatgattaaataactactcctctgtttcatattataagtagttacgatttttttcagtcaaactacttaagtttgacgaaatttatagatggcaacatctacaacatcaaattagtttcattgaacatattttaataatacgtttgttttgtattgaaaatattacttatttttttaataaacttggtcagaagtttgaaaaaagtcacaacttataatatgaaacgaaacggagtgaatactacacttcacaatttggaaaaaaaatgtaacagctacagatctacaacaatctgagcaaagacattagaaagaaacaacatccaagcgaaatgcatatgtaactgcaaaactaaaggggaaacaccatcataataacctgaaccaacgaaggcaaaaccagcaaaatcccaaaaccacgacctcaaccttaaggatggtaaatcaagaacgtgaacgactcatcgacaagcatgaaaaccgaaaaactcggaaggattctcctccaaaatgagaccagaaactgaaagcgcaaacagaaaaatggactgaaaatacaaaagcaaaagagaaatccccttacatagtgtatgaccttgtgattacgagcaagcgcgtgactaccagacgaaacattccccaaatattgtgttactgtatgcgctttgcaatgaaaaaaaaaagaaagaacaagaaaaaaaaacacacacacacacaaccagaggaagcagaacgaagagctatccttccactgcatccagtgccactaaacagcaaaaaaaaaaaacgtgtttttccctcacaaattggtgcaagcaaccctagttaacgagaatggcatcgcaacccaactccagaaaagaaagaaagaaagaaaccgaaaatgtcacgcggcgaactaaaagaaagccctgaccttcccgggaagggccggagatgaacgcgggggcgctgagggcggtggggacgccccgcgcgtcgcgcctcgtgatcgcggcctcccgcttcgccaggtacttgatgaagccggggagcgtccgcacccgccgcgactccgcgaccgcgcgcagcacccgcgccgccccggcctcgccgagcaccgcgaggtggcgccgcgcctccgcgccggcgagctgccgcagcctcccctccagccgctccagctccgcggccaccgccgccgggagctcggccggctcccgcgcctccgcggagccgatggggttgtacatgacgagggttcgggggcttctagcccggcccccccgcgcctctcggcggcggcggcgaggagagccgaggaggaggaggaggcgatcacgttggcgttcgcgttggggcgcgcgatggagggaggaggttgggaaatttgggaggaagacgcgcggaggtgttgaaatggcggtgggtgttccacatggcagtgggaggtggattgtcgattgtgggccatgcggggtgtggggcggggcccaaggaggagtaattcgggtagcttgctcggcaccctacccttcctctgtgcttgactgcggctgtggttgacacggtgcttgtgtgttgtgctgcggtagaatcggtacggggggattgaggattcggattccatttccactgtgtcatacatcgactcatcgaatttaatgttgtgtttagttccgtgtaaagtttggattttggttataattcgagttaatgtagctgaaaagttgtgtgtatgatatgttgatgtgatgaaaaatgcctgaagtttggatctaaactttggatctaaacatagcctaaggtggtgtttggatccgaactttggatctaaacaaagcctaaggtggggtttggatccaggaacttaactttagtctctatatttagacactaatttagaatattaaatatagactacttataaaactaattatataaatgaaagctaatttgtgagataaattttttaagcctaattaatccataattagagaatgtttactatagcatcacataggctaatgctcaatagattcgtctcgtaaattagtccaagattatggataggttttattaatagtctacgtttaatatttataattagtgtccaaacatccgatgtgatagggacttaaaagttttagtcccatctagacagggtctaaggctatgtttagatccaacctttggattcaaacttccaactttttccatcacatcaacctatcatacacatacaacttttcagtcacatcgtaccaatttcaatccaaacttctaactttgaaaggaactaaacacagcctaaagataaagaaggcatagcatgactggggctgtgttagttccctttaaacttgcaattttttcctcatttggagatatatataatagagtattaaatatgtaaaaaaaccaattatacagtttgcatgtaaattgcgagataaattttttagtctaattacgacatgattttacaacgtggtgctgcagtaaagattaaccaaggaggagtagcttgctcggcaccctatccttcctctgtgctcgtgtgttgtgctgccgtagaatcggtacgggggattcggattccatttccactgtgtcatgcatcgactcatcgatggcataggattaagtagctcccaccgtcccaaaatactctatctatcccactctaaatgcaaaatactctatctatcctactctaaatgcaactatgagttttttatccgattttgatcatttgtattattttaaaaaatttataatcagaccctgtttatgatcggtttagatgggctaaaactttttaatccctgtcacatcggatgtttagacgttaatttggagtattaaacatagactaataaaaaactaatttcataaatgatagctaatttgcgagacgaattttttaaacctaattaatccataattatcaaaagtttattgtagcatcacattgtcaaatcatggcgtaattaggctcaaaagattcgtctcgcgaattagtccaaggttatggaatgggttttgtaattagtctatgttttatactctaaattagtatccaaacatccgatgtaaataagtccctgtttcacaatcccccttagattctaatttttttttgaaacttctaacttttccgtcacgtcgaactttcctacaggttagttcccaactttttcttcaaacttccaacttttccatcacatcaattagtacacacaaacttccaacgtttccgtcagatcgttccaatttcaatcaaacttctaattttagcgtgaactaaacacacaaacttttaacttttccatcacatcgttccaatttcttcaaacttccaatttcggcttgaaactaaacacaacctcggttcggtattttttgctgttatgagatgataaaatatgaacggtactttactcgtgaaaaaacgaatctacgactggacgcgatatattctagtataatgaatctagacagagatatgtccagattcgtagtgctataatatgttatatccaatactaggttgagtttttatgggacggatggagtatgtttttaaattttttttcaattttttttaaacaagacagatatccgtgttcaacatttaaccgtatgtcttatttaaaaatttattaaaaataaaaaaaatagtcacgtatataatattattcatgctttatcatctaacaataataaaaatactaaccgtagaaaaaatttcaaataagacgaacggtcaaacgttgaatatggacagtataaaactgcattttgttgaccgagtaaaaaggagtacgcaaggattctttaaaaataaagcagcatatccccgagtatagtttcaaaatatactacccatcctaaaatactactaatatctttaggattcaaattttgttttgaaatcttttcaaaaagaaattgtttcagtatattatcactttgaagtgctagttgccccatcatgcatttcgtttcaaaagttttctcattttaccctcaataaccatttaacttccggtcatgtattattcaataaaaggtattataatatttttttattaaaatcaaatcctgatgtctaaatttatttttagaattcaaatttttatagaacggaggaaatatatattcctgtgagatggcggatagtagcggaaaagggttaaggcatcagaatgtagtctaaaactagttcataagtaataaaatattccattcagccacctaaccacattatggaactagtccatagcaagaaaatagcaaaagccacacataagtatatgggctgcccatatagaataaaatatgttattttctctctctactcctaatactagttgctatctatatacattgtgaagataacaataattatagtccatatatgtgggtcctatctacatggactacttttgctatggcaaaagtagtccatagagatgggacccacgtatatgaactttaattattataacctacacaagtatatggatagcaaatagtattggtaggagaaaagagatagagacaaatgatatattttattctctatggacagcccatatacttatgagtagtttttgttatttctttcctatagttccacaatgttgctaggtggctgaattaaatattatattgcttatggaccacttttggagtacattgtggatacctcttagggcaagtactatgatagatgtggttgctacctccaaatttatttatggcattcaccaataaattaagatgcaagatatacaataagtcacctataatacacaaatatcaatgcctttagtactctcacattcttcttagagtttgtgtggaggctacctcttgatttaggggtggttcatcatctctcctcacttctctccttcatcttatcacctaatcctatgtgttatttttagagacagcacatgaagcactatagcacttgcccttagggcctagtactagcagagaggagggcgggggcatgccatgtcatgtcatcctggcgtggcgtggcgtggcgtggtgtggtgaacttgccagaaagcagaaagcagagagtgcactgattccttcacaaatctggcgactccaccagtctagagaggagtagactagtagtaggagtagtaggcatgctgctgccctgccatggaacagacatgagcagcgccgcgccgcgccacaccaccccacacccactgataccgaaagatatcgtgatcagatccagtgcagttgattcagggctgtttggataaattttagtccaatagaatgtttagcactaattaaaaatattaaatataaactaatgataaaacctagtactccataatcctgggctacatgtgctaattatatattatttaggattaaaaaatttatctcgtgaattagctctcatttatataattagttttattattagtctacatttaataattcgaattaatgttcaaaaatttcagtacctagatccaaacaccacctcagcaccacatgatgagaaatcaatgactcatatcaatgcatatcactgtagtaaaaatattacttttatacatcatatagtaacgaatgtgaatcgttagatcaaaatatggatggctcagattgcttgcagtttttattgtgcagttatactcatcaatccataaggaagtgtttggcaaatgtcaaagggaaatgatttccacccatttttaaatcctaaccattcattcacccttttccatttaatcctaaacttttattcatttctcaatctcaatcccaatgccatcctccattttccattatccaaacgcaccctaaaagtatgatagtagggcagaattaacagtcatacgaaaccgtatatttgggtgccgtaatctgtaatcagctcacatcctcaagcgacaagcttatacccaataaagtccctctcttctttttccaaaaagggaaaaaaaagaaatcagttaatctaaactctcacggtatacatgcattttttttcttttatcttctacaaattaaaagttgtctatacatgagtttttcccttttatctttaacaaattgaataagacttggccaacgggcaaagtgtcccaactgggacgaattcattcgggagaacggcagaagaagtgtgcaatctgctgaacaagtggatcgtggacaacggcacggtagaagccaagccgctacagtgagcgaaattggaacatccattccctccgctgtagcaaagattgaagatacagcacgaatcagcatgcatctacacactacggtatcagctttgatatgctgcagttcatcagatgattcggtgttagaacatgtgccatcacatataaaacacaaccaccaatattaaagtcgtttccactctgaatatgcaagctcttgatatttcatttagacttcacatgtcagtcatgcaagctctgaatgtgcatttgttcagtgatacatgatgcatgcatgcatgctgaaatgattccagagctaacgtagcaatctttagcttgactgcttgtgttcacttcaagcagccatgttaataggcccatcagcttagttataaagtctgtcctgacattttcctactaaaccatcagcttaagaagtccttattagtccgctcctgctcctatattgctgttacaatactacatacgccaaacttcatacaaattaactatccctaaatgcgatgctacttcacttgcggtacttcttggtaaatctgaagttgcggagaagttggagcgagcaaaccacagcgttaccctcattcttgaccgtgtagaaatggcacaatgcacggccggcaactttccaagcgaagccacatctggcgacgttgttggcagaccgtgctttctcatacgcgatctggtagattgcacaggcctcggagaacacgtcgtcgaggtccctcggtgtctcttcaaattcagatgcaccgtagagcaactgaatgttggcaagagcgattgggtcagaactctgaagctgttttccaaccattaggaaaaaaaaagctggtattcaaaagaatacaggacactcacatgcttgtacttttcatagagttcctgaaactttatcttcttttcttcttcatccgcctcttcggcatagagaagtgaactatcagccaagtactcgttatagcggtgttgccagagttgcttgattgctggaggcacgtctctctccgcgaaacatgggagcgatgatataccttattatcaaaaacaaaagagaaaaggaatgtcatgttacagagaacattcataaagtacttgtctcatcaaatatatgaaacctgcttgtgacaccacatcacaattcacatcaaccgtgttctgtgccaaaatcatgagttgttctaaatgttgcgaagcacaccacatcggatggcatggccaaaattttttgcagcgtttgtttttgaaagttaaatagaaaaaaaaagtgatgacatacagcataccatgggttatacacagacaacttattagaatagatgtaattgttctccattaattttacatataaattatacgaatatgatcctatagtctcacaaaactgacctagagtcctaaactctttccatgataacacatactccctccgtttcacaatgtaaaactttctagcattaccaatatactccctctgtcccataatataagggattttgagtttttgtttgtattgtttgaccactcatcttattcaaaaaatttatgcaaatataaaaaacgaaaagttgtgcttaaagtactttggataataaagtaagtcccaaaaaaataaataataattccaaatttttttaataaaatgagtggtcaaacagtgcaagcaaaaactcaaaatcccttatattatgggacggagggagtacatatagatgctaatgaatctaaacacatacacatgtctagattcattagcatctaaatgaatgtggacaatgctagaaagtcttacattgtgaaatggaggaaatatatatttattaatatcaacatcctcattgccaccttaactgctgcaagctcaagctaagttgtagcctactatgtgctacaggtagaatagagagaatgtgtggagtatccctactacagataaacaaattgaaaaaagaagggagctaaataaagacaacttactggttggttgaacattatcagatcgcagcggttttggatcacctgctttatcatagatttttccaagtatggacgacgaatggtacgaaggactgcggtccatgaagtgggggtattgttttaccattagatcacgtggaatattgacctgtcgggattggtgggcaaagcttaaattgttaaagcacaatatgcattcaataccctcacattacaaagcttcaaataactaaagatgcaattgcacatttcattttgtatcttgtaattttacttaatctgactgcttcatatgtcaaatgcattcatgtggccatgcatctgtacatataaaaagtaatatataagaaccaaatatgaaataccaacgagttattcccataactaagcatggtacatccattcttaaatcacgctaatataccgagagttaacacatatggttaaaagttcacacaaccacaatcaagacgcaactaatggaacaaagaatcatcatgttatggtatattaatttaataaaagagtgacttcataactatgtacatcaagaccagtgtagtgtatccacagcagatagcaacattcaggtgcatatgactgattttgctataattttgtagtacttactaccagaatagaatataatagcaactaataaccttcacacgcactacccaatagcatatatggattgaattggataggctgacttgtcagcacattcctcagtatgatttcataagtagttcagttcatatgttgacatgtatataagaatagtccaattgatttcactccaaacttaatcaaggtgttattaactaattattactacaaggtcttggttcaatttgtttccttctttccggtgtttatcaaaataccagatgaaagcataagttaataaggatttcagttccatgtaaaagcatttgcaacaaacattgtgtaagcccaagattgaagttaaccttgttccccatctttggagcatccaaagccaaataataaaggtcaactaacttgagcatctttttctcaattagtttcttttcactttcgtcaagtgaaacagttaatagccgatccatatatactaaccagttagtagctgccgtagcacgcgcataactgaaaggagaaaaaagaaatccaaactcatgttagatcgtacaaaacttataaggttgtatatattaaaaagctacagaaaattgtcaccaacattagatatttaaaaatgtactaatcggattcatacaaaaagatacccaagcacttgtagttataaaaatattgaattcggtcaagggatcatcattggcgcatgggaggacatccattgaagtattgaacacctcaataagttgtatatactagaagttaaatgaggtaaatttctttacagtagagaaatggtttcctaatgaaaaatatacattagaaaaactgagcttggtattaatacctaggtgcaaatcttgttttcaagaactcatgaaatagcactctttcaagctcggattcattaaaatcctcgggtcccttttgcttggtcccatttggtgtaatagctggaacccatggtttcgaaggtttaaaatgttctaacagctgaaaagaccatttttattatcagagcagcaataatctttgaaaagctcaaaagagagaatgtgctgttatatatcaaaaccatatacatgcaagaataataagcaaacatatagtgaaacaatgcaaagacacaatgaaacagcgatgcacaattttgcaacaaaaagcaaacatggcataactaaaaaaacagctaccctaggaccctatctaccttaagatggctatggatccacccaaatgggcgttcaaagctattataagaaaagcagaggatttctttggaaaggacaggataaagcaactgtcttttgtcttgggaacatgtttgccggccaatacagtattgtggtcttgacatacataacctagaaaggcttcaaataattgattcttctagaccatgggtcagcttgcctatccaagtatctcacaagtcacaatgttcatgcgctcttctacgtagctacggaaactataattggtaatggggagaacaccaagttctggactgatatatggctgcgcaaaacattggctgaattggaccctaaccttcttgagacaattccccgaagagtaaggaagcaacgcactgtggcaaaggaattggttaataggatatgggtggctgatattaaagaactcacaattcaggttatttgtgagtatctacatatttgggacttggtggatgggataatcttgcaacaagatgttctggatgagcatagatagaagcttacaagttctacacaagtaagtcgcatacaatgcttacttatcaatcaagtttgcaacttgggagcgaatttagagaagttgggttcctccacaacataatttttccttgtgattggcagtcgacaatcgatgttcgacatcagaccgtctagccaagtgtggcttaccacacctggcctatgtcatcaagaggatgaaaccatgaagcatattcttgtctcatgtgtcttttccaggaaaagtatggaccttgatcttaaattgggattggtggatgcggcccctcagcctttcagtatcccatttttcaggatggtggtggaaggttgtcaaggagattcctaaggagcagcgtaaggggttgaactcgttgattatcgtagtagattgggagatttggaaagaccagaatgattacatgttcaatggatcaagtcctctgtaggttgtgagtccaccaccacaaccgaggctagtttgtggtgtctagctggagagcatgcgctccaagagttcctctgtaggttgcttgcctcgggcagctaggttgtccttgaaggtgtggtcgtgcgtcaccttccgtggtgtgttttttgtgggagggttttcgtaaaccctcgtttgtaacttgtaagtgtgttatacttcttcttaatgaaatggattttttttctctcctgcgtttacgagaaaatattttcccaagtggactttactggtcttaaacaccaccctgaacttcaaaaccaatcacctttcaagttcaccccaaatgcagacctgttttggcaacatgacgatgtcacccaaggccgaaccaattttaaactgacttagtaaactatttcaaaacgttctggaaacctctaaccagtacagtggacctagataaagtataactggcccttcaaaaataatgttaaaaaataaatacctacaaatttatataaatgttcgactaatttatccaagttttcaatactcccaacaaccaatcaaaaagaaaatttaagtcatttagttatcataaaaaattcaaaaaccatttatacctggtgtatattttttaacattcagaatcagaaaacacctgaatcagttctggaaaattctcaataatattatggtgtatatatagcctagaaaatttagtacgagaaaaataaagtataagcatctggaaaaaggtgtgttcaaaactaaataagccaattttcatttcactgactaaaatatactctgtttcacttgagactaactatactccaaggtgcgactaaagaatttgtccatattttttatgtcaactcactaattccaaaaattcaaaaataatttcaaccttggcccttactgccaccttaatgaatgtcatgtaaaaacaatccgattcaggctaaggtataaagtgaatgattttgatcgtccagattttgaatagtgtctacttttgaggtttgaggttaatgttgtaaaacaagccttttcctcattaaaacctaagcatactaataactgaattcttctaaaagcaaaggagctatgacatttaatatcatttggtttgggtgcagtgaccaaattagctcctcaggtttggcgaaagagccatttttcctggagttataacatcggacacttctcttataaagaacagatcatttccaagagcattactggataaatacaatcgacatagaccatgggtaaagtagcataactgctgtatgaatggaacaactacgctgtggactaggggcaactgagcaaaactctgtcagggattttgctgaccataaaagataatcaagcacaaaaacaatattaggtgcatctcccaagacgatgatttccaataaacttcacggtaaaatgtcaatcaggaattaacatacctttgggtttaatgagacccagtagatgtcaccatcaaaatcactattggccatctcatcagccaaagaccgttgtccagtagtagggaagagtatcgcatgtttagaatttcccacaaccttctctatgtcgctactatatgttgccttcaagacatgtatatcaccaggatgtaagccaggatatttatacacaagaacatctccagaaacttggccataatcactgtttaaccacatataaagcaaataagtaaagaaagacccaaaacataacaggcacgctacaaattaatacttgtatattgatgcacatttatgcaaggaatatatatagcaaagaacaaagttattatctttggcaaattcaaaccccttttcgtaatccaatatactctccccattttttaatagctgacatcattgacttttggcatgacatttgaccattcttctttttcaaaaaaattatacaagtgtcatttattttgttgcaagttgttttatcattaaaaaaactttaagcatgaattatattttcgttatttacactaaattttttaataagatgaatggtcaaacgttctatcaataatcaatgtcgtcatctattgaaaaacagtagtatctgttggtagaattttttttcctaactattaaaaacaattaaacagatcaaattactgagctaaaaaaggccatatacagatatactcaagaaattcaaaattaggttgaatgaactaaagaatggcattaaagtctcgagggtccaaatacatgacatgtatttatgatcttatgttgtcagttcaatactttctttagactccatttgctgacaaaattcacaattgcaaccaatattgttgccactattttcggatagtttgaataaaaaatacagtccggttgcgaaaagagaatacatgccaaccaatctaacctttgagttgtgattcaaaattgaggattgtaaatagtaagaaaaatggtaatgttggtgcgttacaactaaagaagactgtaagacattaaagtagttccaatgatgcccatggtggataatgatactcctatcttatgtggtaacaaaggatcactgaagcataacaaaaaaacacacactcaaacaccaagaagaagcaaaagagtatttccattactaacagtatcacgcagacttcattaggtccaagttttcctgtagggtctgcagtacccatcaaataatagcagtcatcaattggtatctttccattcttgattccttttctttccagtagagacaagaaatccagcctagattgcaagtacgactcttctagtgggattccggaaagaatcatccgtgctggcattgaatcttccatgtcagcatagttgaatgcaactgcaagaacatgagaatattagtccggatcaaacacggacaggtgactgaaaaatataaagaaaatagtaactctattacaactagtaagatgagtacaggttctacagaatgaagaagcacatatatacaaattgtacagaacacagtgcaatgcaatgagggtagttcgaactaactgttcagtgcgccagcataatcaaaacgagcattgtcagcctcttcaatcgcagtctgcagaagctccataaagaattcttctggaactcctccatagtgaagtaatgcaattaaattatttgatgtgaatgtccttcctgatcgattgctgagaaaaagaaatgatattacttactgtgaacaaaaaatagaactgactgcctgttgccaatcaaaaagctttactaccccttacacacctacctaatgagctcagctttactctccctcctgcctctacctaaccggccccaaccatgaggattagacatgtgacagcacttaaaccacagtaaggaacctccaagtctggccaccagcccacccaaaatcccaaataccacaatgatttaaatgcagagttcgttcctttggacatctgagtttcatgtaccaacaactcatccaaaaacctaaactcaaattactaagcaaaggcaagtaatcctatttatagaaaaaaaaaagtgagtttcacatctaacacatcaaacgtattttgttgttctgatttccaagttatgccacctcatagcaactgtagcagaaattgggaaaaatatatctgggtgggttgtgtggatggtcctgaaaaactctggaaaagaagaatggcaatggcaaccttgacaaaaaatcaatctatcagcatcaaattttcaaatcaaaattcattctgccgtataggaaatctggatagagagagagagagatacaattcaccatttttttaattatttttcttatatattttttgtttccgtcttaatgaaatgaagcacaattctcctgggctttagagaagagagagagagagagagatctacaattcaccaaaatttgtcctctgtgtttatcctagcacatcatggattttaagctgaaatttcgtacatgcctgattatatcatgaattgcaaagccagtgttttccttgtttgcagtttttcatggccatttgcgttgcctaaaagaggatgcactggaaatactcaaaaaaaactaacagcgaccgtaggcaaaactaacatctcaaagtttctggcttcaaccacacttacgaaagatgacacgtgatgcgtgacgtataactaaaaaaacgaaagg

SEQ ID NO: 8521 - DNA, 1172 bp, Oryza sativa
caataaggaaaatcaagtccatcgaaaacatgtggcttagttgtaaaaatccgaagaagaaaataagactctgataccacttgtaggattgcacagcaagaactaagccaaccaggcgggagggggtgtgaatggttgtagtgccccaaaaccaaaaacttttaacgcaattaaaagttaccctcaaatcgatggagatcggtctgaccgcatatcttgcaccggtctgaccgcgcctgtgccgttggtctgaccggtgtagatcggtcggtctgaccgagtcgcgtctcctcctcctgtcgtcaccgctgccggtccaaccgcagttgtgccgttggtctgaccggtgcgttgccgctggtgtgactgccgtgcactcgccgatgtgaccgccaaaaccccgagcaagcacaaattgaagatctctcaaagtagatcgaactttattacttctattcatgtttacaaagtacaacactccactcgaaaatctcgactaaactcgaagccctaacttttctctaaactcaactctcacacaatcgataccgggaggcctcaccctctctatttatacccgaggtagggagtctaaatccatgaacccaacttgtacaaaaagttctaatcccctaggaaaccttcccgtacaagaaataaactttacaaacttcaatcataaaaaatttggactcctttcaaattcgactccgtatctcatacacacgacatctccattgtatggcatatggaatcttcaccaacactgcattgatctttagcataagcatcccgcatgatatcctgatcgtccaaacgtcatcttctcctaagttgactcccaatccatcaccggcaacactctcccgagacatcaagactcacatacacatgaatcaaccaagaaattatatccgagcaaaagttctctccaacttgactcaacattagcacacaacagtattacgagaagccataaatatgaattaatcacaaatatccaaagaaacaaccagaaaccgaaaccgacacagtgttggtcagtcaaaccgtcgggccagccggtctgaccggctgcacctgcccggtctagccagaccacacagttagcaacatcttgtccatcatctaaaaaccacacatctccaaaaccactttgtcgaatgtctcca

SEQ ID NO: 8522 - DNA, 15866 bp, Oryza sativa
caagcaaacaactacaacattaacaaatgctaatgtcaatttaatgaatgaaagttatagccactgactagtaaacaacatcaggtttttccttctaatacaaggcagaactagtatactcaggcaactaaatgaatcataaacattcaaaaatgcccgatggagtggcgtgaagaaggataaaatcgccagaagactatctgtgcagctaatcatgtgcagaaatagctcagtacgttctatgaaaacataccgctaaaatttccatgtcgagaactggaaaagtcatttcttgtcaacgccccctgtattatacttgcatctttgccttcctgcacaaatatgtgtgtaatacgtaaaattcctgcaggaaaagagagcagagtaacctttcaaggagagtaactttgcagagttagaaaacaagtcccaaagaagatctatgtattgatcagcagcattttaagaactaataagaatatcaagataaatttccacgggcataagaggtttttgttagctgccgattccattccaagttaggcatgtgaaggtttgcactggtcctaaaaatagggcatccaataattaacgcatgcagttccttacctcaaaatggtgcctacaggatccaaacaagcttagctggtcctcgtagcacagcttcagttgtttgcgaaagctggagaactccgtaagcacaatctgctcacactcttgtataagactttcattcagtccctcttgctgcatccgattccgaagcctggcagtcgagaccgaaacatcgctttgcacaaaagttatccttccgctgagtgatcttagcgaataaaaactcctcgccaagatcaaggcctcgatccaggcaacacggtcttcttttgaatctgtcttcaaatgaagtgtctttgtgggggaaaatatgtagaatctcctatcatccgacttgctctcccgaaatgctgacaactacaacataatgtccagttagctttgctatgggagaccttgcacatgaaaatgcagagtgaactttccaacatgtaacgctatccatcagaaataaaatagagcacacacacgcagactaccatccatcgtgttaatcaacagtcaagctaaatgcttattgcagaccaagacaaataaaaataaagatccaaagaccattagtttggcattccaggaagaaaggcatgtgaatcacttccactcccttcaactttaattaaagggtgagggggaaaaggcaagcaaaaggtacatcacatctaacatcaaaatatggagagaaaaaacaacgacaacaaagatttcaagaaaaccaagaaaatacaatcaagatggtgaccactaccttggaccaagcaagtgaagtgggcaagtagagcagttcttggagatccacaaggcccctcctgattcactctaacttacacacaggtcctctatttcaacccctaacccccttactatcttgctctagtatatgtgaccactggaagcaaagcaattgtacatcctttaattgttggggacccatgagcaatggccttgaaaagactcagtgctagtacgactactgcgagttcaacagctagtaaaagacttgtggaaaagcaaccctctccctctggagcagtacaaatcaataatgcaataaaattcaaaaattaaaaaaaaaacattcgctgagcatattctgtaaccacccggatttgttcaacttaatgcacagtattaaccatgcttcattaaggattaattgtgtcacagttggaattaattatatcatctacatttttttaatacgacagcgagggacggataaacttcactgtcttcatcgttctttagagttgccacagaaccctgccatttgtaagaaattctacaggagagcttgaaattttggctaaatccactaaaagttgagggatttttgtgcaaaagatgtgtctggttgtgtgatagagaaaggtgcggccctttttttttttttgggaaatctcgtatcaggaagagaaaaataggaatcatttttgttcatttgtaccttaacctgatactgctaaatttaggcattgttctgtggcattggaccacgaatgagatgattggtcaatcaaaacctcaggtgtttaactgctccaatatgcccccccccccccattcatgtcatgaacaaagcagaaattaattcggaaattttgttccattccaagaacacacaccaagatcatgttgaacaaaataatcgtccaaatgacaaacaaaaaagggaaaaaaaacttcaagaattcgtgaggacaaaagaacatcacgtcatttcgatccagcaaaatgtgacgcaatctcccaactaaccattgcatagtaacgagatttcgacagagaatcttccagtctctttcgccaacgcaaacgaaggaacaattcacacactaacacaatgcaaaatgtgattgatgcttgatcgattcagattcggaaagaggaagaaagagaaaattcctcgcagacacagattcgcaaaccgagaaatgttggggcaaaaaaaaaaaaaaacatgatctgcgagatcgcaggagaggattgggttaccttgaggcagacgacgccgacgggcttgtccggacggcgcgcgccgccgatcctggcggaggcgccgccgatcagcctgacctcgccgccgccgccgccgccgccatcctcgtcggcggcagcggaggcgtccctacgaatcttggagtaggagagcaccccgtcgtggagcgagaaccaccgctcccgccacccgcggccgtagttggtccacttgtggagcaccccggccaccgccaccgccgcgccgcccgcctcgggctccggcgtcggcggcgcgtccggcgccggcagcgccgccgcggagaggcagcagaggccgtggtggttcaggtggtggtggacgcctccgcctccgccgccgctctgcgtcatccgcctccttgattcgacggcggcgacgagaacgaaaaaataaaaagaaaaagagaaaaaaataatgggaaaaaaatggatttcttttttctttttttgggttcgcgaagaggagcgaagcgaagggaagaggagacgcgagttggctttatttagcagcggttggttgctatttatgtgtgggccccacctccctcgcctattttatgccccctccattttttttcttataagtcgcaaaaaagcttggaggagggttgtttttttctttcccaaactttaatttggccatttcttgagttaatttgtatgttttccacggatttttctcctttttgtcctaaatgcatccaagcaactggctttttttcttcacctttcttctagatgtaatcttgtctacgaaatacggattatgtttcagttattataaatatggtttatctctcaacagtttcggcgcataactataataacgacagcgctacgacgatttaactaccgatggctttgtcagataatcataacataagacaaagccaaaagcatatctttttatatgaactaaaattgtgcaagaaatttcattattaaggtttaagttaaaacattatgttactatccatctaaatgaaaaaaaaaagaataggcaagctaatagattgagtggtcgactgaggtttttataaggttgtgctagcacatataattccttattcatttaatggtataaaacatattcatcgacagtaacacatccgtgataattctgtgaatctcaagatatatagatcggtctagtctttggaggtgtttatagaagtaggatatatgcatgtttatatgagcggttgtgttttacattgttttatatatatatatatatatatatatatatatatatatatatatatatatatatatatatatatatataataacttagttttatactagaacacaagataagctaattaaaacaagaaagaaataattataattaaggaggggagagagacgttaagcaaggacatggatactgtttaccagatgtaggggagcacaggatgtcatagggatcaggagtggttcacgtgctatgactagatttagtgggccttaatgcatagttaatagtgtaccagctagtggaggtgagtgcaacatccacctctcaacaaactccatcacataatctagaccttaattaacctttggaaccccttaggtttactctatgtgtgcaagacaagataggtaactggaaattaataatgttagaaattactgggagtaccttcaagtttacacaaaagatataaatgatgttgcatatcttatgcatatctatactactttaaaattaacaatataccaccactatcctttatcactaacatttgagcccctcaatatcgataaaatttttgtgctccctaattcatcccttttccatgacaatacacgggcaaactagttagtatatgaagtatgttccggtggcactataggtttatcaaaatatgccagcttttggctatgaaggtatttgacatgatttacaactaaaaattattatattttgggacgagacgacatgtgtttaggtgtattggcaggcatgccgtgtgtgaatgtattgatgacatcgtgagagagaagaagaaaaagtaactcttgggagaagattgctaaaccataccagtgtaaaaccgtgtatttttagcttcaaatccaagagcacggacagataacaagtgatgtaaaagttgatcaaggttgtgcatacacttataaaaagcacatgagctgcacatgatgacatgaacatatatatgcatagaaaatttcacaactcatgctagctccataattcttgcttaggtactatctccttttgtcccttctgttggacatttccacttcaatttggaaggtctataaaaaaaatgatgcaaatgtttatagcaatgccatgaattttactcagattatatatatacacaacaaattgaccatggatgccattctttttagaaccgttccaaaattaaagggacatatacaggaaagtcggagtcatggatgcatggattgatacaaatgagaaataataaacccatattcttagaatcttaatagcattttcaggtatagttatttttcctagaaatccaaatattaacttttgaagggccctagtacagaaattgctatagagcaacaaattaatacaagtcactttctaagcaatgtttgcttacaagataaactttctcgtcatccattaatttttttttaaaaaaaactactagtataatttatatattgacaattataattggtcaaaatcacggtgtgggggcccactcaacgttggcacgtgtgcttgtcccggtgtggcccgcgtgaccaaccagcctctcttctaggcttacgtggcagcacatatcgttgtcttcccaaccgacccgtcactgacaggtggcccaacaccatgggtcccacatggcatatgttaaaatataatttgtgagggataaaatgcctaaggctacacagattttccatttacaatgttattataatttcatacaactgaagttcatcaacttttctaaaagaaaacaatttacgacactttgttgtatgatattcacccttattttagaccgaatcatattcacttttttttgtactccctctgctccatattattataattaaggtgtcctagtttttgtcttaaagttacttttttctaacaaagactaaatttatagaaacatgcaccaacttctacaacatcaatttagttttattaaatcatcgtgaaatatgtctcagtagtgtatttatttgatattgttgatgttaaatatttctctatcctaaccaaagttagagaacttttaagttaggacaaaactaaaacacctaaaatatacaaggaagagatattataatggtaaattgactatttgagaaatatcttttgtatgtcaataaaaacttacaccctcttaaagagaatacaaacatatttgtctacattgcgagtccaagactaaacataaaaaataacacaaacgcatgatacaatcaatttctaacacataaaattcatgatacaagattatatcatcacacattttcatataatagatagagaaaacgatttgccacttttctttatctcattgaagtatgttaaggagacgtactcattaatgtgtgcatactacctagggaatgcgctcgtagtgatgtgtggtgtgttctctatgtaatcaagaaaaagaaagacaagcgtgaggtatatatattaagaaggcacactcgaggatatgtgttaaggaaatgcattcactgatatatatgtgtggtgtgcgtgcgtaatgccatgtgttcatacatgtgtcttccaagcactcgactaaaaccaaaataaattatgaggtcaaaagcgaggtgagcatagcaatattacaaatcccatggctggcgatgtgccacgtagcttaatatcttgttgatctgtggcccccacgcttggacgagaaaacccaacatcgccaggcgcacccaacttgttgtcactttggttctttctttttgcaaggaatgcaatggaaaaccagcctatccccaatctagcactgtacttacatgcagtagtggcaggttgattgccaatgtataaacaatgcgaaatagtgtatttcaattttagcccaatagtgtgttgattgatatcatttccgtggctagtcaaagctcatttttagctatcattttcacgactgttggtcgcgctttattgattgattctctatggcatgttcgatttttgtgatagattaatagcgtacggtgctttatttagtatgaagatatacactttctttttctttagtgaggagataatatacatattttcttaggtgttagtattaactagctagacatatgtgtataaaatggttatcaatgattgttttgtggatcagggttctctttaccacttgggaaggggttacgacatctcgacggtaagcttgattaccgtaataaatcgagaacaactgaaaaaaaataaatgtttatttcaactttttttaaaaaaaaacttagttgggttaccaggcgttatcacaagtcggattactgcggtaacaccagtaacgggtggcaagagaaacttagtgtggacagcattattgttcttgccagcataatgctttgtttataggctttcaattggagaaaaaaaatgtgactattttacatgggccttctttggattctccgagctattaaatagctctctggaatcttgttatttaggagtattaaacgtagattaccgacaaaaccgattccataacccctaggctattttgcgagacgaatctaacgaggtatattaatcccgagggctattaaatagccctccggatccaaacagggccatggacttggtatagtaaaaatgaatcattaagagcagactataagccagctgcaaacatattttaagaagataaataagaagagagaagagcagcgggctacatatttgtagccagctgtagtatggactccaagacgcagtatgtgtatgacaggtgagaccatatattaatagtgtagtgtctaactattgtatgaatgagctataagattggctatagatgaattagagctagtagttggctacactattaaacttgctctgatacggtactactgttaggcagaggtgagtggtcaagtaacgcttattttatttgttcttggatctgatcacagttgacttaatcaattaggggatggtacggatagctgctaatgtagctttgttaaaaaggaattaagtagacttaggttcacatgtcatgaaagaaaatgactagagaagccatgtcagttttgaataattgtccttcttaagatagcctaaaattgaatccgccgctaccgtaattttcttgatcgagttcaacttcagcctcatttaattttgatttcaaaacagtagctctcttgattctatcatcatgaaaaatctatttccttgaacacggtaatttcacagaattttcatatgaattactttagcttctccataaatcctgtaaaattcctttgtaccaaaagagaccttactatttttatataatagaacgaataccagtctttgcttcaaagaaattataaccacttattagttattacaagcaaatgttcttttagcatagatcaactaaacaattccagcaaacaagaaggcaaagaataccttactggtgctaagtggtgatggttcctattagtgatgaaaacggagcggatagtttccgtctgctctggagaaaaacgaatatggatacctttcggatcggataattctcagattgttcggatacggttacgaatatgaatattttctcctagatacggatatggatatggtatcggggtttccgttgaatacggataataattcggatatccggtgaacagtgctattcgaatatccgcagaagccgtgagacatacccaatttctttataaccctatgatgttcaatatacctttttagattttaatagtagttcatctcttaacactagtacacactattaatattatttaaatttttaaaaatatttataaattatactacattttatataaaatgagctaattatatatgttgatatttgtttctattagaagttgagttggttttcgtgttccaagaaaaaaatgtttcagtagtcatgtccaatcatattcgattcttattcgtatttgtttccgtattcgagctatccatatttgttttcttattcggcaaaaaatatgaagacaaatatggtatgagcattatccgctacgtttttatccctagttcctataaatgcaaatacaaatgtattcgagaagtctcaaacaccaaactaaaacattgtttttcctcacaaccaactcaaagaagagaaaaaaaaaaaccatcaagacattgttttgcttgctttcttgctgcacaaaacataggcacaccatcattcagcagtatctttaccacttgatgcaacctgagaccctcatgattttgtttgtttcagctgttgttctctagggtttcccaaaccgctggggctggggttaccgcgccccggcggtaagcacggttaccgcacggtaaccgcaaaaaaccgtacaaaaccgtgcaaaatttatcaaaaattcaaattattttttaaatttatttgaatttaaggaggttaccgcggtatttatattaccatacccccacggtaagcccggtaaccgcggtaaccgcgcggttaccggcggtaaggtaaaccctgttattctcctattgaaaaatcaaaggaaacaaagcatatgtgagaagataggagaagagaggtaaggtaacatggggcctgagttggggggacaatgcataggtgtatgtgttgggatgatatcaatcaaatcatgtcaccttcgatcgatgcaccagatgttccctcagcatccatcacggctgcatgggccttttagacccaagtgaaacaaagaatcatacattagagcatcatcgacatgattgtgtactactccttcagtacaagcaccacatgattttccttttaggaaagtaacataccacttgatattttttttctcggttacctggatgacacatatgtagacaccactatataagggtttttacagtgtggttaataatatctcagtccgagtgagccagatcggagatttgatgccacgtcaggctctctcgttgtcctgtgaagaacacggagccaagttgagccacacgtttttatcagaatttgcaggtctggcctatagttatgccccacaccactagagaaggaagaggaagtataggtacctcgtcgccatccctgtcctccatgccaaggggaggagggcaatgaggcgctatcctcgtggagcacttgggccgagccggtgacggcaatggcatggccgcagacgaggaggaggggtgcaagctcaatgggggtggcgatggcctcgatacgtccgcaacaacagcccgacggtggccgcctcaaaccctcgtcccatttgcagtatgttgtcatcgtcttgtggatctcgcccttgtcgtcgagtggtaaagaaggggaggaggggagaggggtgccaacggggagttgaggtgctaaatggagatttttttttcagtgagcgatggagatcagggatgggtcaatggagcttgctgggctgccgccggcaacctctcgcccacctcgatctgcactgaagaagcacgtcggctcgatggggaaggcggcagggtcgaagaagctcgccgactcatcctaccgtccctgaccaatgttgttgtgcttgtcgtcaacctccactcgcgtgtcagctaagcttttcaccagtccctcacgctaaactgccgagctcgtctatgcatcggttgggagaagtggagaggggaggcatcggttggggaaggagagggatagtaatctggacaggaggcctgtctagattcgtggtactatgaaatgtctaatcagatattaggcttctatattttgggacgagagagtacatgataaatcttaactatttggtggtttagttgtttaggcatagtcattctctcttttttttttgttttagaaacagaagacaaacacatgcgctcactacacgcacactcacccctataaacgcacacacgcacaccctatctctatgagcacctctaaaagactagactgacatatgttgagattcacgaagtcaccactaaagtctcgctatcgatgaatatgtcgcctaccattgaaaaaataattagctctaaatgtgaatacccgtattaagtctaagacttaaatccaagtgggttgattcgaccacagggaacctaaccagttgagtgacgctcacttcgcattcattctcatttaattgaaacaacgctaattaatcttattttctcaccgttcttgtctatcattttctagaaaaaaaatgacatataagttacttgattattgtttcacatgaataagattcattcgcaagaactaacaaccaaccaatttcacttagctttttgttcccaaaaaaatggaacatagagatgactccaagatattatagttgcatcacactcgtttaattttaatgggttgtgtactgttattctcttggttaacacaaaaatatcgagaaccatgatatgagcagggtgtacacattactcgaattaactagttaactgaactttctgacgcgttagcatctctatgtgcttaggaccaataacataggattattacagtacacatcaacgttgttcgttaccagtaattaatcacattgcacgaataaagaggtatacgctgacgtcaccaaccgtacaaaggcatgcttgcacgcgaggcttgcaaatgatgatgaattttgtttcattgtcacgatgatcacttaactctatagtactactttaatttgagtgtttttcgtcgcaagctttaagatcaaaagccactactcatattgttgcaaaaacacactattccaatatagtattatacgaattcctgagctctcgaataagtaggttcacagtcgttttcagattttaagttgggaaaaagttgcgacgctttaacgtcaagtcgcattcatccaaattctgcctaataatttctagtcattgatcattgaccggtcaacaacaatctgctgaactggaacatgcaaatgtgcagcctgttctcaggaacatggcctgaaaaaacatctcaactaaccaatgggcaccgttgatctaacaaacattgattggagtacacaagaaagggaagcagcatatggcatcgccaaatgcaatctttggatagttttgtcactgcaagtatcaggaggaattgctacagacttttttaactccctgtcaatattgctgtctgtcacaccatactccatacatgtcccccatacatcagatttagggctcctccaagggcgaaaatacggtgtggatcatcagcctccgcgagcctccctcctggtggcatcatggaggatgtcaatgtcgacgccatcctggggaagcagcacgtaccgcaccaccgatcccctgatgaagcagtttcgcacggatagctgccagagcgaaagcttgagtcagcatgctcaaatgaattctttgtaaagtgttagtgcttgattaatgtagttcttccatatagaacagtgaacacaggtgcgttgttgtatttttaacaatagaaattaacaggtgcaagtggtaaagcaatgagagtatgaagattgtttcagcaagcaaagataacaaaaggatatgaatctttccatcactatcatgacctacaaaacacagtatataacattgatctatagctttgctttcctttgggattacttcaggcatcatgtacttgtaacaactaacaagcaatctttagtaacctatgcagtacaaaagtacacccttcatacaatatcattggatggaactgaaggccaaataaatatctaggtacggatactggttgtccctgtcaagtaatgtgcttgcctggttacaacagtatttgcactggaattaccagtgcatcttaagctcctaattctgcaccagtaaggcatgtcacgaactaggtataccactatatgatctactccccattaattcctaaattcatgtcaatgtagcccaaagtttgttctacaaacatttagacataccgccttttatcattagctggtgactacttcaggacatttactacagaaccattgattggagtcaacacaccactgtgttatggattggctaaggtaagggtctgaagaccaggggatagggcactcgccctctaatagcagcggcaggacttctccctgctgagctgaaagactcattgattagaactctaaggcttagcgctaacttcagatattaattgattatagggtatatggggtccctttatatataggaggatagacttgacatccaaggaactaatctctagtactacagaaaccaatccaatatctatctataactttctaataaacatcatctctttcctaactagatactctcctatctttatttgactattcctaaattatcatgcctaaactgctgcatgggcctggcccatgcccaaaacaacagagagtaacaagtgatctaatgaagagtaatatctactatggtttataaagatggttattattatcttccttatgcatactcttggttgtgggatactgggatcctataactgacattttgggcctcactgtatgcccaaagaagaatcagctgctgccataatttgaattttagaactttttttttggagttgattttagggtattttcaacttagtttctttttcaacattggcttttaagttgctaagaagacatataaaagtttacccacaaatcaatttttggatatagtcagctcttggccaactgacggagctcctagttactaacggagagtgttacctgatccatatccatatcgtacttcttttacttatgcaactacatgtcagacgtgcaaccattctgaattgtgatacagcattcagcactaactaaacatgtaaggatcatgctaaaggtactcctttaacagattaataaatcaacagatgacaagtacatgctatgcaaacagaagagaagaaatctgaaatcatgtagaatgaggtgattttgaatgtatccattaatctgacacagaccaatcacaagaagcatcatgatctgcaacactgaatggcatggaagatgtagcacaggcattggggctccttcagaggatagtattctgacaagcccggggttagcaccgtgcatgaaccaatatctatgtataaatccttttgaaagaaggcagtgcgaccccacctccatgaactacattttaatgaatagccccttgaagttcttcaatactactaagtcaaaatatagctacttttggttatgactctggacaagtacttgtccacattcacagccaaaagtagttacatttcaagacggaggtagtacataatagtaattacaaaaaatgttatagtcctatttgaccattttgaccttatcaaattgactgagttgccacatgtacatgtgtgttgttcaagctaatttggaatagaaaaatgtgtaaacacggtaaaaagaagtgaataattaatcaactgaaaaaccatagcaaatgcacaaacgcacatgcatattgaagtacaaaaccatgaaaacttcctaaatctatcttgaacagagaacaaagcatacagagtcaatatatctacagaagaccaccgtaaagaaccaagaaacactgtgtttgctgcagagtcaatatatctacagaagtacccatgcaaacaagcggctaattgctatccatatttcaccaggacagagacagacagatagatagataaccagagcagcatcgcatcgcatcgcataccatgtgcgggtacttgtcctggtcgacaacccgagtgttctcgagcttgatgttgaggtattggtcgacggagtggagcgtgccgcggatggccaggtcgttcttgagctccaccgtcacctccttccccacgagctccttgaagtaggagaagaacagctgcacagcaaccaaatcaacagaacaaaaaataaaaatcaacacaaactaacagaacaaaaaaaatgaagtgggaagagaagaaatcaacgagcagttgaacaaaaaaaactaaaaaaaatattctaccatactggccgcagaaccctccccgccttagctccgaagaatctgcagacgcaagaggcaggattagcacccagtggacgggatccccaaacatttttgaggggcaaataaaaacaaaacttctagtcctattattaaggtttaaggctatcaaattaagagaaaatcagcttctcccagatctagaagagaagatacagttaacgcaggcaagcaaattggacacaaaagcgggtgggttggagagagagagggagatgaatgagaaaagaggatgcggatgctcaccaagaagcagcaggacgacggcggcgagcgcctctccccctcccctggtagcgagatggagatcggcgcaggcgcaaggagcggagaggatagaccggaccgccggagatggaagcgcggcagccggatcgggaggaggcaaaaccctagaagagcgcgagaaggcggaggaggaggagttgggttgggttgggttgggtgttgggtatgagataggaccaaaccatattattatgggccgggttagggtgaaaggcccatatagctttatttattaggaaaaaagtatactctgactccctcaactatcacccgagtatgattcatgtcctccaacttccaactattaaaaccggtgcaaacaaataaacaatatccctcggtggttttggaagtggttttggctgacgtggcggtcttgaccgagtctttatccaacatggcgcttacgtggcattagaacaaaaacaaaattaaaaaatgtggcgcttacgtggcattagaataaaaacaaaaaaaatatgtgggacccatatgtcattcacacaaaaaagtgggactcactgacatgagagaccacatgtcatcctccctctccttcccttcttcctcctatctctctctctcgggactcaggagcggcggtggtggcagtggccgatggggacgaggcggaggggagcgttggtggcggtggtggcaggcatcgccagcgatg

SEQ ID NO: 8523 - DNA, 1815 bp, Oryza sativa
actcgactgcgacaaagcagattacaatcaaaatgcagcaactgcgtgatggtttctacaagctaaatctatgttcatcttaaagagttcttttcacagagagagagagagagagaacataccattctttgtcgtcgttccaacctcagcttctccgcgtttgccttctcatattcaccgttctctagatgccgctggtctggccttagccgtgaatcagtaggagggagtttgtcctttgaacatgaccaatcaattcaattaggatcattgagtcttgatatcaagtaaacaattcaaagcttgtggagtattcatgactacacacatacctgaagatcaggagacagttcgttcaatgtgatagcgaacgacgatagattgtatcgcgttggattaggagaaggtttgttcttttcccacagaagtacggcacctttcaattgatcaacgctcttgaccttggaagtatctaaattactataatacatattttcatcccattttcctatcaaaaacgaaggtttgttcccatcatcatcctctacaaagccttgtacctgtggacataaaaagtgtaagcacggtatgaagatatatccaccagaaacacttgtgttcacaagtaaaaacagtgcatagtttcttacagtagcattcagaatgaactacatggaaaaaagggccaaataaatttccacaacatagggaattttcgcatggaaaaatcactactctcattgcaagggcatttcatgctactaccatatcagcatgaaaatggactagtttcatcaaatccatatacaatcaatggactgataattctaacagcaccgatgggcagctcagagtaggaacttgcaaccttgcattgagtttgtggtttaaatttatactactataacgcattaaaataagaacatgcttgtgcaattaatgtatcagatggtacgattgaaggagaccactcagctcttcatgttataagtgacccgttgtccacactccacacatgcaatgtttgacaaggaaataagcgtaatatacagattagtcagaaggtactgtacacagaaaacatggttttctccacatatcaggctaacagtaataaaaatgacagttaaggatgacaaggaaaaaaggaggtgaaacaaaacataccaggtgaggattgcgatcaagaagcgatggctctttgaacttgagtttacatgaatactggcgattcccttttatgtgcatggttccatgatggctgcagtacagcttcccaaggatgagattatgaatagttgttgtcacctaaaatggcactagcactttagcatgagacatacacaactttgttatgaagaacataaaaatcatagattccgttcaggtatcatcctacagaccttactccattggaagatttcaccgtcatcgaattccactgtcagaacaccaatcggatcgacttgaattgactgcccccaaaacttggatttgagattgctgtcgccccagaatttccagcccttgccttcacagtggcaggcaatcagcatggggtgatgactaacctagtgatgaaaatgacgaaaagcaatgtgttgcaattaaatgcttcacactatcaagatattaaattttagttcacagatagaaaaggaggcaagtgtcatgccttgtggaacttacattaattttcagtagatatcagttttgcattatatccttcacataaaattgaaatggaagataaaatatttcctttgcacagaaaaatacaataaagagttagataaccaaccttttctgcaaaga

SEQ ID NO: 8524 - DNA, 6497 bp, Oryza sativa
cggaccttaatcataaacaactcggtcaaagtttttgaaataattaacactcaaaatctttttactttttggacggaatttatccaaatttcagacaggactatccggactgggtctaaatcataaacaactcgattaaagttttcgaaataattaccattcaaaatcgttttaatttttagacagaatttatccgcatttcaaattggattgtccggactaggtcttaatcataaacaacttggttaaaattttcaaaataattaacattcaaaatcggtttaatttttagacagaatctattcaaattttaaacaggactgttcggactaggtctaaatcataaacatcacgattaaagtttttgaaataattaacattcagaatcattttaattcgagtaaatttcacattgcaccatgtattttgaccaaagtttcacaatgggtaaggtccacaccaaccttttcacttaacaccatatacgtttgcactagttggcactttgaattgggattgagcacatcaaaagaagttgtcagagaaaagatagttaaaatcatcaattttagtgccacagtattaagatacatatctttagaaaaaaaaatagcaaatcagaaaacaatttttttcagcaaatcacactaaaataatgatgtgaacatgtttaaaagtggcacaaaatgatcaatacattggggcaaatgaataaaaataaaatagaaaatagaactagttaagtaccacacactaaaaagaaggaagaaaacataaaatgttatgccttttataattatccatgtgtaaatcatattttagacatgaagctctctcacatattctcttgtgttgatcacccctagtctaaactgaaaacttttataattatccatgtgtaaatcatattttagacatgaaactctctcacatattctcttgtgttgatcacccctagtctaagctgaaaacttatgtaaagatgtacggtgttaagtgaaaacattgatttaaccctagtccattatgaaaccttggtcaaaatatgtggcccattgtaaaatttactcctttaattcctagacggaatttatctgaaattcaaatgggactgtccgccttaatcataaacaactcggttaaagtttttgaaataatttaacatccaaaatcgtttttatttttagatgaaatttatccaaatttcaaacgagactgtccggaccgggtctaaatccaaatttcaatcaaaacactccaatccaactatgacagacataaggcaacggaagaataaaccagtatgttttttttttacaggtacttcacaattgcaattacaagtagtatacattcagccacaaaagctatgatatacacagatcgacactttcagaaccacaaacttctcttttccaatattttgcgacgccgtaaccttgttagcatgacgggtttctgctgcaccagagataatataagatgctgatttataggtgaacaaagcgagaacatataacagtgaatattcagaaatcactggaatatgcatgtagagtttttctttgtcttgccactcttctatatattctctgtccgagaagaatgtgcctcactctaccttgttctgcataagttatgacatatgatcacacattgtgctgaaaatatcatcacaagctgaaaaagtttttctttgtattgcctcaccctgccttgttctgcagaaattatgacatactaatcacacattgtgctcaaaatatcatcacaaattgataaaaacaactgacaatgaaagacatttggcgtgaacaaacaaacagaagggcccaataaataatcactctgtctgtaaatgagagaagaacaaccaaagaaacacagtacagggttgcgacatagttaccttaagacggcggcatattcagaaatcactgtaatagacatctagagcatatattgtctgtcccgagaagaatgtccctcacgctaccttgttctgcagaaattatgacatatcactcacaccttatactgaaaatatcaacagtggataaaaacaactgacaattcaaaaacacacatctccgttaacaaaagtatttgttcattaagcagaactcaaataaggcatcgctggtacactgcacactagcatggcatgcaagagaactgaactaattgcaaaatcaagagatagcacataagatcaaaataccggagagaagataaattctccatggcaatgggctttttgcctgctgctcagcggcagaggtgctgctttagtgccggccacagagggttgatgctgctatggggtcgggggacggcggctgccagcctaagcccctgagcccaatggcggaggggctgcgacacggcccggtaaaggcagtgctgcacctgccggcagaggaggcgctgcgcaatgcggaggcgagcggcggcggcggcagcgggagaggcgtcggaggctgcgagggtggtggaggcggcaagtgcgaagaggaagggggacgggtggtggaggtggcgatggagtggcacgagcggcagagacgtgggaagcgattggggccggcggcaaaatacgatcatacccctccgcacattattttctatggacaataatacccctccacatttctactaccatcaagtgtggtggtagtagaagtaaatctcaaccctttgatcaaatatgatccacggttcagattaatttctactgcaagtagagagcaccggagtggagctcatctgaaaaaggaaacgtgaaaccattatcgtacatttaattttcacccctacccaatgccatcaacgctagctcgaatctctggactttgatctgcatgaacatgcaggagaatgagactaaggaggggaggtagcagtactttgtgtctcagttggcgacctgacatctcaattttgtttcctgtgactgatagtctggcattgtaagattaactggattattgtttttatctgctggtcgcacattgctatggcgagaggatggttctatggttgcttttgcaaaaaaaaattaactggtaatggcacttgcagaattttcttttaaatgaagtgagtacttagtattcttttttttccccttgaaatggcaacggaaataaaaaggactaatgagtccttttgcttatttgtcagtgaagaagacccttatttgccacttatgtttcatgttaagttgttgacattgtaggtttacaatgaatttatttttttttaactattaatagaactgaaccaataatttttacagaaacgtgcattgcacgtgcatgattactagtcttcttaatgagagaatagagtgactagatcactgaattatactagttcactaccacgcagcaaaatactactataaagaaaataaataaagagagagagagagagagagagagagagagagatattaaccttacagtattccccaggctcctgaatattgtggagttgatgctgatgatctctacattgcgggaaatgctttttttgacatggaaaatgtagagaatctctaccttatgacctttgcagatgatgctgattgctggccttcaccaatctgagttaatcagatatttacagatatataatcacatatttgacagggataataaggctaaacttattcagttccagcatgaatgcatgatgtgcatcattcctaatctcatgtagctaacattagttgtgctgcatggcttactatttgtaggaattttttccattttctttagtcttcaagagttagaaaacatgacagtgatgttaccattttacataaggcattcaaacttacctcactgttattcctttccatgaccatcttgaaaagatgctctcaccatatgaaacagaaaaggactcagaattgacactttctctatatcttgcagttcatcattggacattggtcggtcctgttttatccaatttgttaaagccaaaaaaaaacacataggacaggtaaacaaaattctactatgaataggcaggaatttaacacaggccagcaaagtcaagaacttcagtttactgatcacagctgaattaaatgtgatatgtgaccaggaactcaggcctaaaactcaaggttgacaaaaagtcatttactattctagaaaatcacaactctattaaaatatgtgaccaggaactcaggcctaaaactcaaggttgaccaaaagtcatttactattctagaaaatcacaactctaggaatacaatattgcagctactcagtgttgggaattggctcatacaattccccaaatcgctagtacctacatgtgataagtaaaatgcacttcatcaatccttccatacagtcttgatatgtattcatgcaccgatatgtactcgagggaatgtgtatattacttgtcacctagtctggaaagcataaaaacctgtcaaaagtaacatcaggaataaatcgcattggtaaattgctcacatgttgactgttgagtgcttcctgtatacagtgatcaacatttttccttgttacaggactaaatagtgctgaatccccataaaaaaatgccagtatatatctgttgtcatcgacattcttcaccagtaatcaccacatgagcaatgccctcctctaaaatggtggaatcgtgtagtatccctcaaaatgatttctcgatcctcgatcttggagatgaccttggctgcattatgacagtctccacaaaccctgagattcttgaaaatcctcaaggtcatcccaggagcagtactaatcagaccaaaagaaatagcaagcttctcactgtgcctcattagcatctgcaccttcagagtttcatccacatcatgcaggacaaaatcaagatctggaacataacccattgccttcatcctctccgctaactggcccagtttttcatggatcaagtaaagctgagggtgcaatctgtcatttgatctaaactcatgcatcacacccttaatctctatccagctatacccaggtgttttcacaactgcattatccttcatccacctccttactctagagacatcatcccactgatttgcgccagcatagatatttgcaagttgtacataggcacctgcgctctgtggatccttttcaatcagttttccagccgcaagctcagcaaactccaagttcttataaactctacaagcagccaataaggttccatatgcagaaggatgtggttcaaagggcattgagcggatcaagtccacagctctttcaagcttaccagctctgcagagaagatccaccatgcatgagtaatgatcaacccgaggctcaattccgtacaattcctgcattccctcgaaacaccgtattccaaaatcacacaagccagtgtggatacaagcagtcaatactgccacaaaagtaatccagttgggctcaactccttcatccttcatcctttcaaataaattgatagcttccttcccatctccatgctgagcatagccagatatcatagcattccacgcaaccacatccctcgtatgcatttcaccaaacagtttgcacgcgctactcaagtccccacacttgcaatacatgctcacaagtgacgtgcccaccgtcaagttcctactcaacggaagcttcatacaccactgatgtatctgcttaccaaatccaagtgcagacaagttactgcaaccaagaagcacgctgcttaacgtcgatgcatttggctgaacattggcctccctgaccatggtcctgaacagcctcaaagcatcatccgcatgtgaattcttcacatacccagcaaccacagcattccatgaaaccaagttcctcactggcattgcctcaaagtattcgatggccttcaccacattgccgatatccatgtaccccgacaccatcgcagtccacagaacggcgtcccccttctccggcgcattcctaaaccactcctccgccgcgctcatgtctctagagcaggcgaacccggaaaccatggcgttccaggaaacggagttcctcactggcattgctaggaacacggccttggcctcctccacggccccactcttggacagccccgacaccatggtgttccaggacacgacgtccctgaccggcatcgatgcgaagagcctccgggcgccatcggcgtcgccgctggcgaagtggcacgagaggagcgtgttgtaggagacagcatccggggtcggtattcggtcgaacaggtggcgtgcgtccgcgaggcggccgagcgccctggcgtagccggcaaggaggcagttgtaggtggccgtggtcttccgtggcgtggatgcgaacgcctcctccgcgccggtgaggtcaccgcgccgcacggccgccgcgacggccacggtggagagtgagcaggtgtgggaccgggcactggccaggaatgggcagcgacataggatcatgcgtacctaaaggctgacgacattgcttgcagcg

SEQ ID NO: 8525 - DNA, 10891 bp, Oryza sativa
attcctgcagccccagtcaagtaaggcgtggcaagccaacgttaagctgttgagtcgttttaagtgtaattcggggcagaattggtaaagagagtcgtgtaaaatatcgagttcgcacattttgttgtctgattattgatttttggcgaaaccatttgatcatatgacaagatgtgtatctaccttaacttaatgattttgataaaaatcattaggggattcatcagagcccaacatttcatttccccaaacaaaaataaatgaatgaataaattctaacagaatagcccaacatttctttcttatctaattttttttggtttagctagctcgaagccgaccaagatttataaattttatacagtaccagaattcacaataaaagaatggatctatcagcattaggaggcagtggcaaggcatccaatcgcacgattcatgaactgcaactgctactgcactaaaatgtggaggaagaagataacaatcatgaagaaacccctatcaaatccacgagagggtttggccctcacgaaacgtacagctaagctagaaatcgcatcaaaatcatacggctcgaacagaaacgacaaggattggggaatccatacccctccatataattgccaaaaaaaaaaactcagattaatcgactcacccgcattacccccgcttcggcctagcctccagccgctctcgtccccttcctcctccccctccactgcgcagaccgtggccgcagcgagctcgggcaaaggcggcggagtaatcgccggcggccgccgcggcggcggagaaccagacgaggtccgcgaccagagctgcgtctctcctcagccgtccgatcaaagccttcgctgtattttgcagaaagatccttatcaatatctctaccatttccaccaagtcctcaataagatcgatagttcgataccattgatcgcaatataaatttaggatcttctctactgttggatcagaatcggacggtttgtattaattgtacagtcgatataacacataaacatcggagtaaactttactttgagccttttttgtattaccgtagtgttattttggatctctttcatcaaaattttcactttggactcccttttgttgccattttgattcactttggaccccttttggcatcttcatctctagcatactcctcaccactacatcactgctatcttactggccgagtcttgagtttaaattctgattggtacgtaattaaataaaaactacagcccatttctattccacgttcgaggcttgaggggagcctcgcgtaatggagagtgttggaatataaagtgaattgcccacctctattccacgttagaggttagagagggcctctcgtgaggcggggagtgttggaatataaagtgaattgcccacccttctccatcagcttaaataggcttgagggggcctcatgcaaaggaggcgtgaaggagtgtgttgaaatataaagtgaattgttcgcatttattctaagctagatgtttgagggggtctcacgtgaggagggatgttggaatataaagtgaattgctcacatttctctatcagcttaatctttttggttgaattggtcgatgcatgcaactcgataatagccatgcaacattttccatataatatcttttattaaattattacaggagtagctatatttatggtatcatatttttcataaaaaatagtcaaatcgtttttacactataattatattcacttacacattacaatgtacttacatatttatatatttacattataattttcaaatcttgcatgtaaatcttaaaatttatactgtaatttttctcatctctaaatctaaaccataatcacaatgggccaaacgcatagtcgagtcacatctgcacgggcaaaacaagctagcactaatctcaagcagatcaaacaccatacaaatctgagtgcaatcgagaagaaaatgtgtcgacacaataataatattttagtacaagtttgcgaagagcctgagcacgccgtagcacgcggccatggcggcccacccgccgagaagcaccctggccgccgacctcgccgggctcgcgccgccgagcgccgcgccaagcgccccgaacccggcgagggcggccgaggtggcggcgcacacggcggcgacgcgcggggcccaggggcggacgaacccgccggccagcagcggcagcagcgcgcccaccgtgaacgccagcgccgacgccgccgccgccttgaacgggctcggaagccggccgctcccctcctcctcgccgtcgccgtcgcagcgtcggcggcgttgcctccctccctgcgccgggccgccgccacctcgatgtcgtactgcgcgtacacggacacgaactccccgatggccatgctgcacgcgccggcgacgaggcccggcgacgccggagaccagcatcgccctgcccgactcgctcaccgcgccgacgccgatcatcagcgacgccacggacaccagcccgtcgttggcgcccagaaccgccgcgcggagccactgcgcgcggccggagtagtccacgccgccgccgccaaacgcctcttcatccttcaccaccatcaccgcctcgtcgtcgccgacgccgacgacatggacggccgccacctcgccgtgttcttgcttaccttctggaggaggagacgtcgccggcgacggcgacggcgaggtggacacgtgcactaccgagttcatctgcatcgccatggcgagatcgatcgagcttggagctttggaagaagagggagagagagtgtgtgaagcacacgcctagaaatgggaagcaacgatgcccatttttatagccaaaaatggaaggataactgatgatcatctgataatgctttgtgacttgacaacttagtttatttgatggacaaattaaacatagctggaatatttaattaattagggatgtatatgtatgtaactgaatgtttggactctgaagaaaccttgttgcaactgattgagatgagatgtacacacatatacaactatttttttatgccaaagtgtccataaatcatgcatacatgtacatgtatctagctagaaaaaagcctttctttatgcactaatataagtttaattgtatatttatactccatatattatcttcagggatgttaacaaacggaagccctaaaatcctgcagagcatttggcagccaaactttttacccatttttcatgcaaaaaaaaaaaacgctcaacctagatataaagctcctgatgtagatatattgtttgtggaggttttggacacttgatgtgtttatcttggaagcaaattaagattgcttgctcttaaaaaaaaagttgctattttctttgttacatcatgcccaagtacattttatcaagtacaatcagttgatgatgatatattattagcttgctaatttggtcatttacagctgatcaaaacagtgatcacacatgttctcaaagctgtagctacatggccgcacgatccatgtaatctcaggagattcggaagtgaatcacagtggccacgcagcaccttagtcgtcatcatttccatttaagaaatcagctaaatagccatatgcagagggacaagccaataaatttagtttgtgtagaaaatttatttgctgattttgaccaaacattgtgcccggatcgatggggatcatggtgattaggtatttaagtgcacacatgcagttatctctcgattggctttttcaggagatcgagaagaatcacgccaacagttgcggaagattaattaactttagccttgcgatcttgtattgaaaattcttcatcaatctgtcccattctattttatttttaagagaggaacgaccaattaatatccgtctgataaatatatcctccatccattctaaaatataataatttttagcctttaaaatttgtcccaaattaaatacaacaaattctccatcaacattcccttatcaaccaataacaaccctccatcattcaattttatcacctaccttcacttttcaaccaatcacaatcctccatcatttagttctacctattttcttaatataatactgcgtccaactctaaaactccttatatttcggatggaggtagtagataacaaagaatataggtactcaaaatattatactatctccattactaaatattcccttcgtattttaatgtatgacgccattgactttttgaccaatgtttgaccattcgttttatttaaaatttttgtgcaaatataaaaatatttatatcatacttaaagaacatttgatgatgtatcaagtcaccataaaataaataataattacataaattttttgaataagacgaatggtcaaacgttgaataaaaggtcaacgggatacggaggtagtacttgttattctcactttgtaagtccttttccgtgtggcagcgtccattgttggaaacctaactcagctcttggtggctttgatggctgcggcggtggcaaagatgtggacgaacgactgccacggtcatgtgagcaaaatcaaactggtacaatgatcatcaaacggttgattttagaatttctgtttcaattcatgatttgagttagacaagagcaacttgtatgtcgttgaagaaacaatggttatacagtcgaagaaacatgcaacttgttatctctatcgtgatcttgttataagaacttttcatactttaaatgaaattgtgattttgtaatccaccgtctttatcaagcaatttatgtaataattggatgtatccttttaaagcaaataatgaatattctattaaaaaagatacatattttaactttgatcactaatttttttttaaaaaaaataataaatacttaaaaagataccgtagtatgttacgtccttaatgtaagcactaatctttcatttattgtaatctaaatatctaaaaatattagtcatcaaagttaaaacattgatattcaatagtgataagagtttcccttaccatttgagggggttatccccctggcggtaaggcggttacccaaaaaccacgtgaaattcatccttaaatatttgaattcagaaatcagcggtttcgcggttttggcgcggttaccgccaattgtgtagcagaacagaaacagtcctaaaaaattgaaaataacacttaaatgtgtgtagaaattaaggataatttgaagaatatataggatacttgcgaacctaacttttggtgtaaaataccaaaattcgagatgaccttttctatattatggacttgaagcaattcaacatttcgtagcataataattcaacaagctcacatttgaaagtatgtgtcagaggtagcgcgatagagagagataagaggacccgggagatattttctccacttatgggccttaatgggtcggatattttgtccacctagggctcattatattatttctctttttttattttctaatgtactttccgttttgccctcaaatttgaatttatctcactcctttccaaaaaaaaaaaattctacaccatctgccacttcaaatcaagaaatatataaatggattttttttcaaaattttgaatttggacaaaattcatcaaatcctaccaccggtaatgcctactgtaccatgcggtaagcgcggttactagcggtaggggaaacctgatagtgacatgtatttgagaatttaatggacggaatgattgatgtacgttaattttatgttgaattcctgattggtactttagttaattccagactagtatagtttaaagccatatatttgacacgcgataaatttcttttattaaagggaaaagtccattttataccctctaacttttgtgcttgtctaaaatacacccctgaattacaaaactggaaataatacaccctacaactattaaaaccagacactttaaccccttaatatgtttttatggtggttttggtatgcgtggatgtcagctgtataaatgctccacgtcatcagtggttatatgggccaaagccctttcggggtttgccgtgaagtgcagcggccagcagccgcgcgcgtggcttgccggagccggcggcggcgttagctggcagaggcggtggcacggaggaggatcagctacgtactgaattgttgggttgttcttggattaattctcgattttagcttcatgtctatgagcacgatttgatcaacccaagctgaccaggttcctcttgacaaagttggcaactttagtcaaaaaaaaaagttgccaaggtaaaacaacaaaccaatgtgctgccaccattgctgccatcacggtgatccggtcgggatttctagtagagatgccgccggtgctcctccttggcaacgagacaggccatgccaaccctctgcctcactgcatcaatggagctctggtcgacggcatggccggtggcggcggtgacatagaacacaccggagattatgtcgcccttgattgacagtcgcacgccggtggaacaagcagatcgagaaagatgactggctaaggaacaaccagaacgagatggaaatagcggctggtgagcctcccgctgcgtcgtctacctaacgcgaagcccacccccaagccgagcttgaagaagatggcgttggcgccgagcccgcccctttgcccaaggagaagaggtgatcggcaatgagctcaacagagaccgctcccttcgccaagctcaggagaatacaggcggcggcgtgcttgctctccttggctaagctcagggaagcataccagagctctaagcctccgacgagttctcccggagggagaggaaggaagaagatgggccagtcctcctcctccccctcgaccacggtgtagagcctcgcccccgccgaagagagagacatctggctttggcctataaccgctgacgtagatcatttatacacctagcatatacgtgtaccaaaaccaccataaaaacaactcaaggggttaaagtgtctggttttaatagttagaggggtattatatccgattttgtaattcgggagtgtattttagacaaacacaaaatttggagggtgtaaaatagacttttccctttattaaatttcgcgtaaattgagttgattcgatttcaaataatttttttctaaaaaaatgatctacgtggcattctaaaaataccccgtgtatatatatatatatatatatatatatatatatatatatatatatatatatatatatatatatatatatatataatacattataaaaataatagatatatatgtttacataatataaaaatggtatgaagataatgatttgagattgtttgtatattgagttctaaaaatacaataaaattgtaaaatgatatattatgcttgtatgatatttaaaatactgtagataataattactagtaggtgttgatgtgcacacttacacgttgagctttagaagttagtacacatcaactatctatatctatatagatagaatgaattgtgtaaattttaattaaaccttaggtatcatgactatcatatggctctttcatttaacgatggttcatttcgataccgatcagtatcgtctgtatgggcccatatatcaatggcccgaacagcatcagctaaccatacgcccgatgacacgagtcatttggatacaatatacataggccaggttagccaaaagtaagaataaggaaagagacatgtataattatagaggaaatttacttcttagagcaaataattagtagtatcccgcaaaaaaaaaaggcagaatcgaaaaaatgggggaaaaaaagaaaagcaagtaaaatcaattaaaagtcacgcccagtgggactcgaacccacaatcgcctgattagaagtcagacgccttatccattaggccatgggcgcttctctgcgtgaaagtttctcactcttttgttattaagttatgtaattctacaatgccattgctcccctctataccatgggagtttggtggtgtttgaatcttgtgaagataaatattaagtgtttcacgtaaattaatgaggtgataataacgtgtgattaattaagttttaattattacaaacttgaaaaatggattaatctgatattttaaaacaactttcatatagaaagtttcgcacaaaacgcaccgtttagcagtttgaaaagcgtgccactttaatccaaaatttcatccatccttttatttggattcgaacggggcctttgttcgatccgctcctaaattttgcctcatcccttatatacccctaagtttttattttgatctcctctgtgctattccattagttgaccatgagttaccgttaaaatatttttaaaattgactatattacctctctctatacttatgtgagtagtttagtgccaaaaacacaattcttatatgaaaaaagatctatttgtaaagaaaagggaatataattatttgacaacaaaatttaatataaatctaaaatttttaaataaatgttaaattaacttttacaaaattcatcaaaatttgaacccgataaataaataattttggttcatgatttctagcaaaactcttatatggattttgtcaaaaaataaatttgttcaacaatttaaattttctttttcaaattttacaataaataattatgccccatttgattttatcatgaattacaatttttcacattgtgaattatgaagtagatagcacgtaagtatgagaaatggatgatatggtaattttagaaaaatctaacagtcaacttacggtcaactaacggaataaggatagaggagattaaaatgaaaactcaagggcatgtagtggatgaggcaaaatttagaggtatagaaaagattgcgaaactttcaagtgtatgtagggaattttctcttgctcttaggtccttgaaaaatgaaaacgtgcttatagtttatctgttaattgccattgctctttgtatgatgggtaaagaacatacaaatttaagatgtgatgatataactcaaaagtatggcatatcaaaataaaataatcaatagtgtgattttataaaactttatggttataatatctagatttatgtgccacgtgtcaaaattccagtggttttgtacaacttaaaccgtaatatgtgtggttcggtgaaatttactctatagttagtttttgacacaatccatttacaaaataagttttacaaaagggccaaagtaacaaaatttcagcatattcatattcacaaccgcctatacatctgaaaagagggacgctccgtactatactagaaataatctaaaccgtttattttaaaaggtagactagtaatgtactaatgtaggagtactaatatagactaggggtaattttggcaccggatgttttgtccgtcaatgggctgtacggactctgggcctgtgcagactcgtgtggaccaactaatgacgtgggcccacgtgtgtatgtgattataaaagaacgtactccgtacgtccgatcagaaaagaacgtgttgaataaaaaaaaacgtgtcaggttatgctacgctacagcgtcaagaaaactggattaaagtttttaaacacaacaaatttcggtttcaattttagaccaaatttatcatgatttcatctggtctagatcgggttgacaacggaaaaaaggaaaaatatttacgtctgcaattcattcggttagtccagagcccattaacaacaaaaacacatggtttttcatagtgcacacatagattagagcagtactagtattttagggtaaaatatgctacgtccaaaattcattcgggactattcagaccaggtcgataacaaaagcacgtggttttttttgtcgtgaacacataaattagagaactactattttatgacaaaatatgtggggctcaagaaacacccaatggtcttccggtgagctccgcaagatagtgggctaggcctgacttcgaagcctcacccattctatttatttaatattataccctttcttaatatttgtgtttttaatatgtgaagctcagtcaaaatcgttttaaccgaatttcaaccggaactgtctaaatcataaaaaaaaaatctgttacagtttttgaaataattaacatttaaaatcgttttaaattttcgatggaatttattcgaatttcaaccggaattgtcctgaccgggtctaaatcataaacaactatgttcaagtttttgaaataattaacattcaaaattgttttaaattttagatggaatttatccaaatttcaaccgggactgtccggaccttaatcataaacaactcggtcaaagtttttgaaataattaacactcaaaatctttttactttttggacggaatttatccaaatttcagacaggactatccggactgggtctaaatcataaacaactcgattaaagttttcgaaataattaccattcaaaatcgttttaatttttagacagaatttatccgcatttcaaattggattgtccggactaggtcttaatcataaacaacttggttaaaattttcaaaataattaacattcaaaatcggtttaatttttagacagaatctattcaaattttaaacaggactgttcggactaggtctaaatcataaacatcacgattaaagtttttgaaataattaacattcagaatcattttaattcgagtaaatttcacattgcaccatgtattttgaccaaagtttcacaatgggtaaggtccacaccaaccttttcacttaacaccatatacgtttgcactagttggcactttgaattgggattgagcacatcaaaagaagttgtcagagaaaagatagttaaaatca

SEQ ID NO: 8526 - DNA, 13587 bp, Oryza sativa
atgattattcattcgcaaacgttaacctttggtttgtagaaaaaataaattacaaataactaaaagcatttcatgcataatattatcgaagcatactaacatatataagtatgaaattaattaactttcgctcattcagaaaagaagaaggtagtagtcaatgccaccagctaatagaaaatggaggaaacatgaattaaatcatgttcaagaaatcgatggcacccatagctagaaaacacacaagaaatgtaagatttaaaaacgccaatggaaaaaaaatgccatgacaaaagttaggcatgccattaagcaagtgtagtttggttcatcgcaactgtggttttaccacacttttgcctactacatgtaatgtgaaggatgaaacaaaacacgatattatatactgcaagataattacgtccaatttaagaataattttgaaacacaaaaaacaaattttaggtgtttctcctgaatggaacacgtgtacggcaggcaaatttgaagtcgtctatatccattgacacgtaacgtagtcaacttcaatataaattaactggtatatatacacactttaattaaagtataaattatcgtacccatacaaatcaggtttctgtatgtctttatgtagacgtgggcaatgacaataacaggaaatggatcattctacgcagcgagaaatataccatccatccatgcatggttacacgcatatattgtgttgttccatttaaaattaattagggcatgtttagatccatttggaatgacaaaagttttggtgacaaaagttttggcattgtaaaagtactagttggtgtttagatgcatgttaaagttttaccattctagcactaaagtgagagagaaagagagtgggagtggtcccaaagcactttttggcacaatttgctactatggactagcaaatgccaaattgccaacttttgctactagtgtttagatccaaaatggcaaaaaatactacaaaatggcaaaacttttgccattttggaggatctaaacagggccttggacgctgagtgtggtagctagacactatttcctccgtttcatattataagactttttagcattgtctatattcatatatatgttaatgaatctagacatatatgtgtgcctaaatttattaacatctatatgaatgtgtgtaatactaaaaaaaatcttatagcctgaaacggagatagtaattagtttgcacacatgatctttactggatggaaattgagaatctttgaccttaggatcaccaaccaaataaatgctatcttcactccgttgaattttttcaggctgtttaatttacacacacctcataaatttagtactcgatctattattccctctgtctctgagacgtattctgttttattataggagaagattcttaccaataattactctattataatatcacttatataatatataattataatcatacgtatttttaatatgaatgtaaatataattaatttataaaaaaattagtagagtaatcattgaccaaagtcttatcctaacaaaaataaaatactccacatattttcaaacggagggagcaatagatttacagaaaaaaaatagtatccagcatattcaatattgagtatatatttgccgcaatgcaactagaaaagtaattcaaacggccatcaaccaatcattgagatcagaaacaaacataactgtgaacgactagctgaattagttaggttcttggagtagaatttgtccacctagattcaagtattttaccgatttagtataactgttcacatttacagctagttattatttcaatattagataatatgtctgttgatatttaaatatctttggtaactttcaacaatctcaaaatcaccggtctaatctctcgaagctggagctgctcatactgagcagtgtgcgcatgtgtatatatgagattctacgcgcgcatgcccgctgggattgtgctttagagaaaaagaaacaatatgaccatcaaatttactataaatgattgtttatttaagcgtacattgataccgtgttttgaaaaaaaccaatataagtaggggtgtagtggctaccccgaaacttacttataggctaaaataagccgtgaacccgcttattttaatatataagtgggttcgcggctcacccacttacacccctataaccaccaatctatcttgtgacttctcatactagcggttgcaccttccagctcacatgatgtgcatgcgaatagaatgtgccatgagttggacattttcccatcatggatcaacttctgaggtttataacgtgtgcaatgacgacgacatggacgcagaaaacgcatattttctctgttttttcaaaggggaaaagaaaatcatggatgatgaagacttgcaatgttgcgtgcatgcgcgaatgcagagaggcactactatagttcattgttgtggctatctacatagtactccctccgtattttaatgtatgacgctgttgactttcgacctacgtttgaccattcgttttattcaattttttttagtaaatataaaaatacttatgtcatgcttaaagaatatttgatgatgaatcaagtcacattaaaataaataataattacataaattttttgaataaaacgaatgatcaaacgttggaaaaaagtcaacgacttcgtacattaaaatatggaggtagtagcaaagtccactcttttgttagctacaacacgtggccagcatcgacgtagatggtgaatcctcggcctaggatcacggaccaaatttaatggtgtatctggactttgagtgattccatttgcacctgtatatttatttgttttagaacgttgtgcagtgcggtcaaaacctaaaaatgctttggtatagcacagtaaaaaatatattattatttataaataaaagacaaaggtcaaatggattgaaaaatactccctccattccataatataaggcacaaccatttttcttagatgttttataatataaggcatgcatgcaagtatgcaattaaccatgacatcttctgcattaaattattatttttaaaatcatccacttccaattattatatttattatgatgatccaaactataagatgataataattattttttagtattttagttaaagtggttgtgccttatattttggaacggagagaggatcagataataaagtagaagtacacagtaaaagaagagacaaaggtgaaaggtggatcgagagcactcgaagcgcgcgagacaattaaacgggtcgaatttgtcaccatatagtacacgtctcttctcccatcataaatactccacacagtccactacttctcctcgtcgtctccctcgccgccggccgccggcgaacccaagatttcagttcagacgagcaccagccgccgccgccgtgatgatgaagaagacatccaaggagctggactacgtgctggtgccgatggggatggcggtgatggtggcgtaccacgcgtggctcctcctccgcatccggcggcgcccggcgaccaccgtgatcggcatcaacgccatcaaccgccgcatatgggtgcgccacgtcatggaggaggcgtccgggaagcacgccgtgctggcggtgcagaccatgcgcaacagcatcatggcctccaccgtcctcgcctccgtcgccatcaccctcagctccctcgtcgccgcgctcatggccagcggcgtcgcccacggcatcttctcccccggcgccggcgacggccagggcgagatcgtcgtcggcgccggcggcgagacggcgctgtcgatcaagttcttcgccatcctcgtctgcttcctcgtcgccttcctcctcaacgtccagtccatccgctactacagccacaccggcatcctcgtcaacgtgccgctccacgcgcaccgccaccgccgccgccgaccggggctcgccgtcgactacgtgacggcgacgctcaaccgcggcagctacttctggtccctcggcgtccgcgccttctacttctcgtgccccgtcttcctctggctcttcggccccatccccatgttcgcctcctgcctcgccatggtctgcgcgctctacttcctcgacgtgtacaccgagtgggacgagaagccggaggaggaagaggagctcaacggcaatggcgatggcgacgacggcggcgccgccgcgtgccatgaacaacccaagatggccgccggcaacagggtgacgcctcagcaagacgtcgtctgaaaactgaaactctgaaggtgtttgttgcctgtgcctgcatgcaggtgatctggattcagcagctcgttgaatcaagattaataattagtttatgtactttggtataaataaaatcgccgtgcctaggattcaatatctcgttgaatcctagatttgtcgcgacaaattcgcataaaaaatgctttgaattgatgttaagtatgaatgccctacttctttcatgatgataatacttattgctttggacaaagatataatcagactctaaaaactttgactataaataacattatagaaaactatatgtgtcttaaaaagtatttcaataaaatcatatatttattaatatttctatatatattgtaacaaaaaatagtggtcaattgtctttattgtgtttttcccaaaattataagtattatcgagtctgagggagtaatttggttctacaaatggtctcagatttttaattacttcttagtaccagttaggaccttcttcgatcatgtttctacgacacaagtcagtgacttcatgaatactgtttttatagctggtagtattatatcttgtgaaaagtcaattacgttatgtcgtatataagataataggagaatatacacatgcatgttgttattttctcagaaaacaaactgaaagggaactgcaaacctcagaccatcaagttcagacttcagaaagctctatagataagtacttcatccgtttctaaatatttaaccccgttaattttttaagtacatgtttgaccgttcgtcttattaaaaaacttttatgaaacatgcaaaactacatgtatacatataagtatatttaacaatgaatcaaatgataggaaaaaaattaataattacttaatttttttaataagatgtacagttaaacatattttaaaaagtcaacggcgtcaaatatttagaaacggagggagtatattcttaatgagacgacaaaatgactaaacacacctcactaccatgcagcaattatatagtagtactactcttaaagaaatgaagggagagaaaataataccttttgtttttctggatgatgtatcctccggcatctttttttatttttttgaaaactattctccagcctcctgaatctcgtatgacattaatgatacccttctcaccttctgtactctgcaaatgatgctgaatgctagcctgcagtaatgtgaattcttcagaaatttaatttacatctagattatcgagtcaattatatagacctgtttggcatagctgctctagctccagcttctagccaaacagtttcagcttcacctaaaatgagagcggagctgggtggactggtggagtgctatcacaaaatgaactagagaggtggagctgtaactccactccaaactcaactcttggagttaaattttagagttaattggagctctaccaaatagacgcatagttattgaattcaaaatgcgcaaaaattaggataaacctgttcagttccaggcttccagcgttgcgtgatgtacatcatttgtggacctctgcagctgccattgtgcaacatgacttgcaaagtgtattacactcacaagtttgtgtgtgagtaccgaactccatcgacaaaacacaaaacatgtcaataaattgccgtgtttccttatgaacaacacatgtacggtggggaaaaaaatttaaggtgatctacatcgattggcaagttaacatggtacaaaattactggagtgctaactgatacattataataccttaattttttaagttatataaataaattgaagtggcagaactaatttgtatacgtgggcaactaattactctattccgaaatatagcatgcatatacgtacctgaatccctttctacccatccttttagaatctttcggtagatgcagagtgtggtagacgctacccacatggcgtctaacagtcgatctgaaatagccaattaatcttttgaccaaggatcacgaaccaaacaagtgatgataccaaaagaacatctcatcagagatagagaattaaagcgagagcaaacttgcatcgctctggtttgttcacagggcgcggccgtttagagtgctccttttgcgaaaataatatcagcagagatcatcagtatgacatttaaaaacttcattcattcggcgttgtaataatttcaatcatctttagttatattagttagctaggatatctggatatgtattgaatatgatcagaaaagcaactcaagcactagcacgatacccaaacaaaccatcgattagatcttgcaagaaccacagcaccatcaattcatcatccaattcgagaaataagccagacggcatattcataaacgaaaaataatttatgaataaaactttgatatactccctccgtactcgtaaaggaagtcgttttggacagcggcacggtctccaaaacataactttgacttcttgtttctataaaaaatatttattgaaaagtgatatatatatatatatatatatatatatatatatatatatatatatatatatacttttatgaaagtatttttcaagacaaatctattcatataatttttatatttttaagctcatcaattcatgatttatatttctaaggtttgacttaaacattattctaaacgactttctttactaatacagagggagtacatgtttttaatgatctaaaattaaaagctgaaaaataaactataataaaaaaaactttaaaatcaacttcaaatttaagattgataattcaaattttagccgataagtataagcatatgaaaaaagatgacaccataatagagatgtacagtttattacagcacatcgatctcacaaccgctaacttggcatgtctctgtatgtgtactctatatattgtttttttagaactactctatatattggttagctagctagcgagtaccatatctcagctgccattgccacccacttaatttgcatgcctatggagtgacagataacattacaatctgcattgtggaactttccacttttcagaattttgcatgaccgttcaaatggcatatgtaagatgatgaatctacacgcatgcaattggattctcgaatacttaactactccatttgtctcattttaagtacacttgtgagtttccgtgtccaatatatccgttatatttgaaatttatttatgattaacatttttgttattattagataataaaacataaatagtacactttatgtgtgacttatttttttaattttctttatgtttttattaaataaaacgaacggtcaaacgttggatacgaaaatccagaactgcacttaaataaaattgtgacaaagggagtacttcccaacttaactcaaattggagaataacgtgtgtaatgacgacagcaacaacattcgcgtttataaatctaattaaacagcgggctagctagccagcacaaacccctgcgcatgtggccagcaccaacgtacaaggtactttgagttttcaaacgtgggaagcacttgatcgaaagaattaatttaattaagcacgatacatatgatggtcgatcgagttctgtcaccatgtatctagacatgttttacgaccacgtacacgcttagccagggttcacactttagaatcacaccgaaatttcggtagtttcggtgtgaccgaaatttcatgatttccaaactcttttgcacgaaattatttgaaatattaacagattgtaactctggatttgaatatattttaaccaaatttaacaaaaaaattgaaaaaaaaaaccccaaatattgacagagttgctcgctggtgggcagggttagaaattccggaatggaatttccggaatttcagtcatttcggactccttatacgatattattttagccaaaatttttatcttttttactttttcgtgaagttggtaatattttgtttaaatttgaccaatatttatttaaaaaccgaaaaattaaaccctgccagtgagtcccaaattaccgaaaattcaatctggcgatcagctccccctgcatataaatactacccagtccaacgttgtccggccactaccgttgtgcatgcttgtgtcgtcaacgacggcgactagcagtagcagtagagagtggcagtgagatcagaagagatcgatccatgaagcagctggactacgtgctggtgccgatggggatggcggtgatggtggcgtaccacgcgtggctcctcctccgcatccggcggcgcccggcgaccaccgtgatcggcatcaacgccatcaaccgccgcatctgggtgcgccacgtcatggaggagccgtcggggaagcacgccgtgctggcggtgcagaccatgcgcaacagcatcatggcctccaccgtactcgcctccgtcgccatcaccctcagctccctcgtcgccgcgctcatggccagcggcgtcgcccacggcatcttcgtctcctccggccacgccgtcgtcggcggcggcgtcgccggagaggccgagctgtccgtcaagttcttcgccatcctcgtctgcttcctcctcgccttcctcctcaacgtgcagtccatccggtactacagccacaccggcctcctcgtcaacgtgccgctccacgcgcaccgccaccgccgccgccgcccggggctcgccgtcgactacgtgacggcgacgctcaaccgcggcagctacttctggtccctcggcgtccgcgccttctacttctcgtgccccgtcttcctctggctctttggacccatccccatgttcgctgcctgcctcgccatggtctgcgcgctctacttcctcgacgtctacaccgagtgggacaaggccgacgacgaggaagacgacctcgacgacgacgatgacggctgcgtccccgccaaatgctaaataaaggacggccgtcttggcgccggtagggcgacgactcagtagacggatcgagatcttctatcttaggtcagatgactttaatgtcactgacatgtgggtccataacaaagagtacctatatgttagtggctcaaagttaaagttatataacttaagtcgaaggatcttaatcctcagcagacaacatagcggtatgtgagaacaactttagtgtacagttgaactagacttgctaaaggttaacccgcatacccacagtatgcttagtgcctagtaaaaagtcatgcctcttaaaataaactaaggcactaatgcatgatttgtgctctgtttttgtgtgctgtatgcttgtgaatggtgttgctagttctttgaaaatatatattggaatagcatattaacagcacataaaacgggatggttcattaatacatgattaattaagtattaattattataaatttaaatttttatttattttttcttaaaaaaaacttatatatagaattttttttacataaaaatataccgtttagctatttggaaagcgtgctaacaaaaaaaaatgagaaaattgtaatttggaggtgaagtttaggatagtatatatgtttcccctataatcacatcctagaagtgatctcagatttttagtacattggaccttattcgatcttgttcctgttaacgaccaaatttggtaatatcatcatcggaaaagaggattagatcgaagtggagtcgaaggcggagatcgattcgagaacagagcaagaatcggctggagtccggatcggctacgatcaggatcggctgggtccaagtcagactgggtgagccgatatagccgattctgacaatatgacttggtatacaacatcgggttgagttgatatgcttcaagatgattgccgcacatggatagagtcctgagaaggcaattgtatctattaattaggatattttatataatctccttagagatatgtttcgggcaaaagtctgccgtaaagacttatggtatcttagagtttgttagggataagagtcgtatccgacatggacatagtttgtaattttcgggtataaatagaccccgaaccccatgtaatcaatgaacacacacgttcaatacaatttcggcgcatcgccacccttttgcttttattttatttcgacgagttcttactttcgggttgagctgcatcggtttcgatcttcaacaagaggtaaaacttgttatgatggcttgcgttctcgggattagtacttccatctttatgatactctaatcttgtttatgtaattcgtcgagttatcatatatcttacataatctctggcaatatcgttatctaacctacaatcggctaacatctgttggtatagagtagccgattaggttatatgtcaacgttgacttagattatataagatatctaccactctatgaaaccttcagcggcttgattgtctacatattgttcttttcatacttaatgctgcatcaattgagtttgatctattaagtcgtgcttagaataccaatctctagcctgctttctggttgccgattagagtagtatcgaagtttcaaccgatcttatctgattcaactatatttgttttatatgctttattgacacgttagatctgccctttatgtcaagatattgttgcatctaagtatattaagcttctgtttagtatattctgcttgttttaacatcttaacatagagtcgtatcggagtattagccgatacatgctagatctatctgatcggctatgctatgaacatatataatcctgttattaatatatatttcgatctaagtgatttatactgtctcggcatggcgaccgatctattccagtcacttgatttaagtatatatcgatataagaattatatattgttaatatctacagccgatcgaatagatttatttctttattatctatttgcaactgccgatcgatttacatatgacatcggctcagagataaatgatacgtcatcggcacttagccgatcggctatcgtttataggtttaaccgcggtttgtttgtctttatttcttgttgattgcaggatcaaatcaactggcacgctagcatacccgaaggcgagttttggacctgcactggagttaagcagatctcctaggcctcgtgttttacgtcaatagttccctactatatatgtgacaactgataaagtcagtgccgtcatgtgctattgctttagctagtagcctggtattatattttaaatttttatagacactagaaaaaatacccgtgcgttacaatgggtgaaggctattttaattttattgttgttatatacggtccaattaaggtattttattgctgttatacaatctagttaagataaaattcactgtgggaattcacttgaatatatatattttagaaaatcatgagctgtaattaaaagttcgatcgtcttaagttagcacgcgagtttttctaaagagaattcttatacgaatctttctatatttccaaaaaaacgaatgaacttaaaaaccgactcatgcacagatgacttactaaataccgacaaaaacatcttcaatttttataatagtagagatagagatttgcatgcttgcataattataagtcaattacgttaataaactaaaaatggaaattcaaacctcaaacaatcagctctgaacatttatctccccccataattcattcatcaaatcccacggtccagaatcatcgaatccaacgggtcgagatcgtcgcggaccctctcccctccgcacgagctcctcacgcgcgtcccccaaatccccaatcacgccgccaatgagaaccccgtcactgtcctcctcttcatcctcgccgcggcccaccgcctccgccggttcctcctcctcctccgccgccgccgccgccgccgcgcagtctcgccaccacttcgcgcagggcgcccagctcctcgcccgtgcgcgcgccgccgcagggaccaagaagcggagccccccgcgcggcgctcgccgaggccgaccgcgccatcacccgtcgacgccgccacctcacccgacccgtgctccctccccgtccccaatcccgacgaatcctccatcgcgccgccgccggcttccaccacgccccccgaccatcccccctctccccaatcccggcagctcctcccatcttgcgagtcaccgatcgcccaatgcgggtttgtcgttgcagtgatcgaaccgtcgcaccgccgccggcttccactgcgccccccagccatctctcctcctccccaatcccggcggtctccgtcacgccgccatcaagtcgtcatcgattactcgccctccgatacccatcgcgcctcctcgcccccactccgctagccaggtaagcatcgctcaatccccttcccgttccttcaataattgcaagaattcgtttactcctttgattgtgacttcttggatggtcaaccaatgattgctacttccctatgcacgtattgtattgtgcccggtaggtgttcgcttaaatgccaatgaggagagttatgttaaatgccgttgagggatggatatggatccagtgcccattaggtgttcggttaaattctgttgagggatggatggatcggttttaccattaatgttgaagcaaataagtgcataggtgaattagattcttttgctgtatataaggatattttgtgtcacttgctttggttagttgattcaataactaggtttggttagttgattcaataactaggtaagaataatcggtaggtaacttgtctaagcaaccaattgtcaaatttctcatgaagtggtccttttttttcagaatcattccggtgcagccagcgaccccaacagctcctctcgccaccaccaccaccgtcttctccctttgtccaggtatccattttgtctctcttgtcctccgttggatgtctccctgagggatcgatgcactcatatgtgatgctcctgacagatatttatataaatcgctgctgtcttctcaaattataatttaccgtttttaataatttgtactggcatatcaaattaactgctgtttttaataatttgtactgatatatcaaaatcagtgttgtttttaataatttatacgcttcatggctcataataaatcgctggtgcattgatatctaaatgtttgctcatgtgctatttacagctcaggtgaccggagagaaagagagagcgcaatgtgtctttctgggccaagcgcttccagaattcctcttccctaggcccgcacacgacacgccgggccaccgtttggcctctcgccgccggtgactggagctgagaacgagccccccccccc

SEQ ID NO: 8527 - DNA, 5501 bp, Oryza sativa
tttctcataactaatggatggctttcttttgataaccttgaatacttcttttcctgcagcttttgcttgattaaaggtctgaaggtctggtgcagcataagtaattgatctgaatccatgtggtggaaatcatgtgagtatcttttcatgaaattttcaagaaataaataatgcattggaccttcagaattacattatcacacacgtgtattatactcattttagtcggaaagtatttcagtgatatcttgaactaagagtctcacctgaaactttgctttcttttcaaattgactgcttttaacatcggaaagttaatttttgaatagaaattttggtgtaagagaatcagtcaggatgttactgtatcattacattgctccgaagaggatgctcatgatggcagctatcgtgccacctcctgttgcctttcggctggttactgcgactgccccaatccaaaccatcagtgcccatgaacagaaggtcacagcttggaacaatcccagtcctatcccttttatcactgcctccttcttacttagtttgtactgattatccatgcaccggacaaaggatctcatggcccgtttctccccaacaaaggagaaaacagtcttaatatgcgacaaagtctgctcagaaaaaggtgtagtaggattaagaatttaaatcttgtaggcaatcgtttatacttccaattaacttggcttgagctgatgtaaatgatttacctgttctacaatagatgttgcttctgagactatagcattacgagataacgatatgccattcatctgtttcgtgtatgttgctccaatgacgaggatcagaggaatgaccagaaaggagagcaatgcgacttcccagcagctggcaaatgcaattatgataccagcaaagaaagtggagaagctcgcaacgaaatgaccgagctgcagaaaattggggtcaggtgcagtagtggtgcacattggaccacagtttcacaaatattatgtgcaatgttccataaatcacgaaatccattaccttctcaccaattgcatcttgtatgacactcatgtggttggttactccggtgatgatttttgcagtggtcaagtcagtgtcgaaggccccaacctcttgattaagtactgatctcagaaatgctagccgcatgcgtgctaattgtctttcacttgagtatatccagcatgagatctctgcatgcagatgataagaggataaggtaagcatgtttttgtaagatctcctataattatcatttctgaacatatatgactacttataaaaaaatagggtaaaattaggctccaaccgtaaaaaaaacatattctctaacaataccattcatctctgacatgctattatgtttcactagtttataagtgccttttatgccattgcagatgaaacaaaaatacgagtttggcactaaatccctaatagctggacaagcgtgcttgtgaggctgtaaaaacatttatgagttttatgccctaattttatacttaatgaggtaattcatgagcaatattgcagttcaacataatttacggccctgttttctattcctatgtctatgcttattctgtttaaataactaaatttagaattctatgccagggtatttatttaaccaaatgaaaagccacatctatcatggaagataaaaggacagattgtttctgacttaccgaccattccagcaggaagagtagctgctgccatgtaccacacaaacggaaccaccttcaagcaagaagtgaaaaaaggtgtaaaaataaaaaacgatcacagatcaacatattgatattcaaaggactaaaatgagagaaaaggctaatgatgtacatggatatcatgcttttagaattgagaaaaccaccttatacaatgcatggaccatgccctcctgatcatttatgttggttccataagcatcaagtgctttcccaagaaggagatatccgacggggaatgccatgccatgaattatagatccaacagttcccagggccatgaggagccagtctaccgcatcggcgtagcaaagcagcccgaggaatggaaatggcttctcgtcggtgctggattctgacggaactgggattgtgctattactttcatccatttcataaattgagatgatgaaatagagtggtcttcatcatggactgtagacatcttttttcagtgatgatcttggtgaccccttttgcagtagagtggcactgaaaggagattcatagatggcattagtattagaggtatgcacatttcatactggtgcatgtttacgtgtagatactgacaaacatgtcttccaaaatggagtgagacaaacacaataggtactctcaaggttggaaacaaaatatttctgaactggtaaagggatcagcatattatgtcaaattgtcaatattagtggtggtgtttgcctaagctttgacactgttagttgtctttgacaaacttagctgtttgattaaacaaaacatgtgaaagctgcctagctgcttgactgaatcagtgaagctaagagaaaactgagaaatgataggagagtctgcacacttcacattatattttacattttttttgtgtggaccatcaagaaactggattatcacatgatgccacttgatttgttccttttatcttgatctaaaaaattcatctggaagccaaatcaatgtctggggatctcactttaatgatccttaaccttgaccaatcaaatgcatttctcacctccttggatgatgacttgttaattaagataaaaaagatttgatctgcagattatgttaagctgtgcttacatgaccaaggtgggtttctgggaataactgtggcataatctgagcatattctgttttagactgcaatactgcatatcatacacaaggctgtcgatgtcgtcatgtcgcatgccattgcaaccaacccggaatgcttgtttgcacctgaggaagtttgtttatgtatgttgtccaggagggagtatccaaggggaaatagtgtatcatttctgatcattgccagcatactgaacattttgcctgttagtcatacaacctgatgaaaaataacagctgcatcgatcacattgtgcatgttgccgtttgcaattgggaggcacacgggtagctggttggttctccaggtggtttttgacaatcttcgttgatgctgcaaaggtagtctccaaaagaagagccaatttggtttattcccagaattttgtgcaaaaagctcctatatttgcagtttggaagaaatttggattattatccaggctcgggaggccagtcaactggaagctacaaagaaaacgttttcttgattgaagcaccagcgtatgcatatgctacttcagttttcgtctttctgctgttgtgctcattagcaacattcatgctgttagagaaatgcaagttatgaccgcatcatccatgtcattttcactgatgggatcaggagggaatatccggaatttcagatgtcttgtgggacacagggatgactggttcaaactactgtttaaaaattttgagttcagtcttacattttggaagtttttgaggattatattgtctgccagagtactctcctcatagtgcatgtttgtcctgactttgtatccatgcagatgagagtagttgtacctatttcttgaataagtttaccgacacatcatttcttaacattttgctggttgctcctacaaaatccggttccaataagagctcagatctgtgtttgttctctgaattttgcgcaaaaagttgccgaatttgcattgcctggctttttttaggctcagtaggctggccagtcaattggaatcttcaaatgacaaagaagaagaagaaatttctccttaatttgccacatggttggaaggccaaacaaaatgatgcatcatgtctgaacattttcaagaagggagcctatttgttttcttatcagaaattttcatgaaaagctccgaaatttgcagccatctccggatgcttgtttgcacctgaagaagtttgctgatgctacttgtccaagagggagagcatacaagggaaaatgctgcattacttctgatcattgccagagaatcattcgatagtcttaagtcttaaccctgtctcatgcaaactgaacatgttgcttggtgctcgtaaaaaactgacagaaactaacgttgcatctgatcgcattgtgcaggtttccatctgcaattgggaggcacactgacacctggtcggttctccaggcgattttcgacaatctttgtcgacgctgcgaaaatggtctccaagaaaagggccaatttggtttcttctcagaattttgcgcaaaaacctcccagatttgaagctacaaaaaacatttcttgaccgagagggattttgttccatccttcgctctactaatcagatcattctcagacgtccaaagcaggatatgctacttcagttttgtttttttgttgttgttctcattaggcacgagtatgaagatacataaatgtaagttctgatcgcaccatccatgtcattttcactgatgggatcaggagagaatatccggattttcggatgatgtcttgtgggaatgcaaggatgactcgttcaaattcctttttttttaaaaaaaaaatgaatcttatgtaacatctccattgttcactcttgcattttgcacggttgacttgcctgattgaactttttggagatgacagaatgctatgtttgaaccgacatatttgttgtgaatttgtatctgtgccatcatacatgggatgaatggcgctccctttgtctcaaaatatatctacctttccagttctatattttaagacagaggtagtataaaatttgcttgttttataatgacatatcggtacgattacctatttgaatactaaggctgtgttcggtattggaggatgggaacatatccttcctgcatggaaaacggagcggttcattagcacgtgattaattaagtaatagctatttttctcaaaaatggatcaatatgattttttaagcaactttcgtatagaaactttttgcaaaaaacacaccgtttagcagtttgaaaaacgtgcgcgtggaaaacgagatggtagagttgggaactcccggttccgaacacaacctaaggtagctatgcactgggaaattaaaaaaaaaaagaagagcaaaactacgactcataaaagaatttgtgctgatgtcaactgttctgattgaatcatctgcttgcgtaggaataatcaaattcagctcatctaaccaaatatcttttttagataatggattaaaacccgacttctacactaataaggatgcacacaggcaaatctaaccaaataaacacactaaggaaacataatttagatacacctttatatattattgtacatgtacaagggtagagtgtctaactttcttagaacagaaatggagtattccttgtaatccaag

SEQ ID NO: 8528 - DNA, 6834 bp, Oryza sativa
tttagggaaactaataatgtatatttgatatatctatatattataggcggtgcaataatataagtaaagaaataacttttgagctccacatgtactattatactaaataattttgatatatctatatattaggcggtgcaataatataagtaaagaaataacttttgagctccacatgtactattatactaaataattttgatatatctatatattaggcggtgcaataatataagtaaagaaataacttatgttttcttattcaacataatatcagtaaagatataggactaaattttacaaaataattttggctacatatgaatccaggacctttctctttttttttctttggaggtgacgttagctaaactaacacctatctcgaacaggctagatctaagcgtatgcatgcattgaattgaggtatatgaagtgcatgtgcgttgactgtatatctaggtgctttgtactagtgaggattattatttattaattactactagcaattaaattaaataatactcgctgcattgtttgacttttgcatcatatccaccgtacacactgctgtacttggtcgtccatgcaccgatgcacggcacgattaccctgcaggaagaatacaaatacgactaatcctctacttgtttagaaggcttaattaaaatggcactggtcaatcatgatcaaatgcgtgtcaatgcatggttatcaaagtcaatttgttatttatcaaagtcaatctggtagccaagagaagggttaattaaatttgtccaaagtactcgtcatttacttgtataaattgtccaaagtactcttcatttacttaagaaaaaaaactcaatttgttaatctggtagccaagagaagggttaattattttcctgagatactagcttaaacacccatgttttacaaggaataggttgaatatatgtttttttccctttcttaagcttggaaatgaacaatccgcatgaattaatcactcttaattaagtgaaatccatatattaggtggtataataggagtagatggcagcaaatttatcactcaccagcatcacttaaggtttttttttaaaaaaaagaagagtatagatatgtgttgtcttctgagagatcgcatctgatactatacttttttttatcaggagaatatatgttttgtacgtgtggtgtatgcaacatgatttgtacaagtaaatgacgagtactttggacaatttaattatattccattttggccaaactaaaatctcttgtccaggatctagctaaggttgatagagcatctatattattactgtgatccaaagatattgccttatcaatcagtgtactaggaccctttcaatcaattgaagtgacgaccaaaatttgcgtgttcacatatctcatgccccttcgtattttaacagataacattatcttttaaacatattttagcaattcatcttatttaaaaaatttatacaaatatataagatataaaatcatgcttaaagtactttaagtgataaaacaattcataacaaaataaattataattatgtaaattttttgaataagataaatggttaaacgtgtgacaaaaagtcaacgacattatctattagaaactagagttagtattctatatatatattttcttttcttgtggtttaatctaaagtagagaattgatctcccgttttaattatatgatactgttgatatttgacataattttgatcatttgttctattaaaaatattcaatacattagtaaatatatatataagcttgtgcttaaaatacctttaaataataatataaatcacaacagataaattaatgcaaatgtaaataagtcgaatggttggtcggatgtagtatgtcgtaaacagcatatgggtgcatgctttttgaaaattaagaaaatcttttgcaatgcaacatattcctgttgggaatattattgctgaactgcaattctgattatgtctccttctaggaattaaggcatagcatcttcctagttccgaccatcacgtcacaatgagccaggtacgtacatgtttcgtttggaacagcgctgctaaagaggaacagttaatatcaaacattatttaataaaactaacaaaatattttaagtaatctaaataataacgataggataaatcatatcctattttaataattgtactcctattttaataatctagggctatagatttacaactaatatgtatttttttagcgtataaattttagggcgcaacacgggtgtgtgagctcagtgtggttgtgtacatgtgggtgcaacgaccagggataacatgaccatattatcctgtccgagtgtccggtcggggtgaacatagcaaccctggcctgttggctacgttcttccccttctttttcaacttatctctcgttattctcgtatgtacattttccaaactattctacggtgtgtattttaaaaaaaagttctatagaaaagttgctttaaaaatcatatgaatcaatttttcaacttttaaactaatacttaattaattatatgctaagaagtgtagttatatgtggcggagaggagggttccctaaccaacccctccttccaaacacagcttaacaacgccctgcgttcgagagtctaggttgggaactctcttgtctcgattttcacgcgcacgcttttcaaactgctatttcggtgtgtttttgtaaaaagtttctatactaaagttgtttaaaaaaatcatattgttccatttttgaaaaaaatagctaatacttaattaatcacacgctaatggatcgctccgttttccatgctggaggcaagctttccgaacccggacactggcaagcagcctaagagcttaacgaggtaaagtgctcccatgggactctgctgatgaccggtttgaccgtgtcaactaagagagactagtaatatgcccgtactaacgctacggttatattttgtaatgaaaatcaagatatactaaggtaatatgaaaaagaattattatattgttgctaattagataccaatgagaaaactcaaattgcaacttttttttgaatgtttgaaaacaatctaattccttatgcgcttaggaatacaaactaaacttattgcgtagaagtaatacaaaccaaacttcatattacaagcaaaagcatttttattattttataaactatattaatcacaggagacaaatcatacctacataccgaaagagccaaatcagtccatggtgaattaaaggcttgttcactttgatgctcaaattaaccataccaaatttgataatgctaaatttttttgcgcattttggtattaccaaattttacgtagtgttttaagagagaaagcttctagaaataccaaaatttggtaagtagcaatgtttgaagccctcagtatgtctagtttgttgttagtatttgcaacaaatcatcttacatgaggaatgtactcattataacattttagaggttttgtagtttattttttttatttaaggagacctcattcagctgtgcgaaagcaaattttttaacatgggcttgttgggcttttgacatgggctgggaaagaaaaaaaaaagaagagacagcccattaattctcacatacttattgggccttttgcgtgcgtggttgcctcactgacatgtggggcctcgtcgacgccaagctaatccgcgtctccaccgcgatgcaccgcttcgcctccgcctcctccctcccgccgccggcgccggcgacggcggcggccgcggcggcgcaggctgcggctctcaggttcggctccgccgccaccactcgtgtcccccgagcgctagccctgaccgcctccacttgcccatggcaccgccgacacctctgctcctcctcctcctcctcctcgtcggcggcggctgcggctgctacggcggcggcggtggaggaggcgcggcaggggcggaagcagctgggcgcgacgacgcagctctacgagtacctcctcgccaacgtccgcgagcacccggtgcgtgtctccctccctccgctctctgcttggttcgtctcgagcaaattttgccgccattttggggtgcggaattcgcgtcatgctctcttgccaatgtgtgcttccgttttatcccgtgctggaaaaatgcatcaggttctcaaggagcttcgtgaggagacggcggccatgagagggagccaaatgcaggtgcgtgccatggataaacttggctactcttcttagagagctcatttaccattttcccctataaaattagtcctaatctttttcaaggtaacattggtccaatgaagccacttcatacatgattacttttatttctgaaagtgcaatgatactgtttagagatgtttcggaaatcagttacaatatatacactctcagctggtttctttgtcttgttaggtttcacctgcgcaggctcagcttctagcaatgcttgcgcaaattcttggggctcaacgatgcattgaagtcggagtctatacagtatgtgatctgacctagtgtttgttactttgttttgtattataaattattcatatttccactctaggtaagtaaaaacgcaacattagaaagttattgtttcttgtcagaaccaaagcatgatggttgatcaaaatgagaaataaactccagctggttaacaatatatttgtgagaactcgtgtatctgttgttttccctggaaactataccataataagcaagcactacaacgtttgaatcctatatgcaacaagccttctggtagtactgaggcttgattcttgcatatgttttcctttcatcatcaagcagtctttcctgtctggtacaataataaattaataatccacacggtacatgttatctcaagtgctacaaattgcaatcaaaaccttgtgaattagctacttttgtagaaagccactgatttctgcaaattcaataacttcattatagcattcgtttaatctttgcacagggatattcgtcgttagctgtagcactagctcttcctgaatcaggtcgtttggttgcttgtgagagggatgaaagatgcctagaagttgccaagaaatactatcagcgctctggtgttgcacacaaggtgatcgcctctttttgcttgatgggttctggatcatgatgaatttcttgggctgatctatcacctaattccttaggttgatgtcaaacatgctttagctgcggattccctaaagttactaattgatggtggtgaggttaacaggtacagtaattttattgtggtataatccatcattgaacatcttagttggtctaacaaatcttgtctcttctaccttttctagttatgactttgcattcgttgatgcagacaagagaatgtatgaggagtattatgaacttctacttaagctagtaagattacatagaaccctttcttgcttatagcaattgtggtctgtcaactgtcatcaatgatcataacttttttataacattatagaagatttgctgcaagttttatgatcctatttataagttccatgtatgtagcaaccataacttacatgttttgattataatctgtatgttgagcattatgttttgttgtgttgcaggtaagagttggtggtttgattgtaatagacaatgtcctttggtatggtagagttgctgatccactagtgagtcttttttcccttttttagttttgacatgacatagaagctatatggtagaaagtggatcactctttcctgattttttaggaaattatctggcacatttttccttaggtgaatgatcgaaagacaattagtataaggaacttcaacaagaaacttctggaggataatcgtgtcagcatcagcatggtctctttctctcaccacctctcatatttttttatctatcgcctagatttgtcattacttgcaagtgtttactgcaaagacttagaaaattatttatatgcctgcacaagtatattgaccgttaaagcttgtgaagagaactcagtcctggcactgatgtgtagcagtaccgcagtgaagcgcaatacatatcccaagtctggaagttttatttgcctaatgttgtggcatatttgagccaggatcacatataccatgaatgtgtttagtcctatttgctatctttttaattatcaatttgctccaaaatctatataactccttttatccgaactttcttttgagcaccatgttcagttttttgtacaacttcagtgagaagaaaacagtatgatgcaagtgacaaccataatatttgttacttgattttcatgtgatatacttataccatggttccatggagacagtaccccatgccttctaattttatcacttctctgactctatttttttagttgacaatggtactatgttttcttgggagacttgcaggtgccaatcggggacgggatgacaatttgtcggaagctagtagatacctgactgaacaacatactctttctagatatggattttgggcgtgtgcctttttggcttctcgcgacattatcttcaaagggtatctatagaaggatgcaggtaatgatgttcgtggccttttgtgattctgttaagtttgggatatggaggttctgtctcggaatgagggggcaacaatactagtggcttcattcaggcggtacttgttactaattctttaagtccggggttaaatccctaagtctgaccttaattggttgtacttggcaatggatttctttctttcttgaaggcattgtctggagttcacagaatttccctaggtgaaaacctatggt

SEQ ID NO: 8529 - DNA, 27037 bp, Oryza sativa
gattcccttttatgtgcatggttccatgatggctgcagtacagcttcccaaggatgagattatgaatagttgttgtcacctaaaatggcactagcactttagcatgagacatacacaactttgttatgaagaacataaaaatcatagattccgttcaggtatcatcctacagaccttactccattggaagatttcaccgtcatcgaattccactgtcagaacaccaatcggatcgacttgaattgactgcccccaaaacttggatttgagattgctgtcgccccagaatttccagcccttgccttcacagtggcaggcaatcagcatggggtgatgactaacctagtgatgaaaatgacgaaaagcaatgtgttgcaattaaatgcttcacactatcaagatattaaattttagttcacagatagaaaaggaggcaagtgtcatgccttgtggaacttacattaattttcagtagatatcagttttgcattatatccttcacataaaattgaaatggaagataaaatatttcctttgcacagaaaaatacaataaagagttagataaccaaccttttctgcaaagaaacggacccctctttcagggaaatcggcttcataagtctctcctagcagcgggttgaatggtttgcaaggtcttgcgacagatgaagcatagccagagactgcaaatgcagctactttgagaattctcatgagactgtttccctaaattttagatttaacagacacgtgaaaaaaaagaactcgttataatagagagacatgccagttgatacatagagttaaaataatttccgaactcaactatgactattttcatacctacaccaaaccagctgatcgaaactacaatatgaacaatcaacaaaagtcttttatgtgtaaaattattaaagcaccacacttcttaaagagttttgtcgcttcagcaagactaacattgtatagcagagatcatttttgtagcacagaatgattgatctcaacacaaatctgcaaactacagacgtaatgcgcttgtttttgttttcttcatgatcacgtctagggattgacattgagctgaagtctaatattattgtaaatgatctctatactctcatcataaaacaagcaaatatcctggaaacgtagaaatacagaaccacatatgtaaaatgatcttaccatctttccgtattgataagcttgatccaaaaggtgtgaatattctaaatcttcaaagcccttttggagggatgagagtggttcattaaagtaaactggaaggcatactcgtgtcaaatccttgccgacactatctttaataattgaccaaaggctgatgcctctctctttctctgtaggctctggtagtttactccgccgtttgatttgtggtaataagtgactagaatcttccatttggatatccaaaagtccctcaccacaactggttgagcttaacattgctgaagatctgtcgtttggttcaatgaagtagtctgcagcatcaaagaaagtagactcatcttcacaagtcaagtcaccaccatcttgcttctcaaattcatcagattctgtagtgctgtattctgcatgacaagcaaacaactacaacattaacaaatgctaatgtcaatttaatgaatgaaagttatagccactgactagtaaacaacatcaggtttttccttctaatacaaggcagaactagtatactcaggcaactaaatgaatcataaacattcaaaaatgcccgatggagtggcgtgaagaaggataaaatcgccagaagactatctgtgcagctaatcatgtgcagaaatagctcagtacgttctatgaaaacataccgctaaaatttccatgtcgagaactggaaaagtcatttcttgtcaacgccccctgtattatacttgcatctttgccttcctgcacaaatatgtgtgtaatacgtaaaattcctgcaggaaaagagagcagagtaacctttcaaggagagtaactttgcagagttagaaaacaagtcccaaagaagatctatgtattgatcagcagcattttaagaactaataagaatatcaagataaatttccacgggcataagaggtttttgttagctgccgattccattccaagttaggcatgtgaaggtttgcactggtcctaaaaatagggcatccaataattaacgcatgcagttccttacctcaaaatggtgcctacaggatccaaacaagcttagctggtcctcgtagcacagcttcagttgtttgcgaaagctggagaactccgtaagcacaatctgctcacactcttgtataagactttcattcagtccctcttgctgcatccgattccgaagcctggcagtcgagaccgaaacatcgctttgcacaaaagttatccttccgctgagtgatcttagcgaataaaaactcctcgccaagatcaaggcctcgatccaggcaacacggtcttcttttgaatctgtcttcaaatgaagtgtctttgtgggggaaaatatgtagaatctcctatcatccgacttgctctcccgaaatgctgacaactacaacataatgtccagttagctttgctatgggagaccttgcacatgaaaatgcagagtgaactttccaacatgtaacgctatccatcagaaataaaatagagcacacacacgcagactaccatccatcgtgttaatcaacagtcaagctaaatgcttattgcagaccaagacaaataaaaataaagatccaaagaccattagtttggcattccaggaagaaaggcatgtgaatcacttccactcccttcaactttaattaaagggtgagggggaaaaggcaagcaaaaggtacatcacatctaacatcaaaatatggagagaaaaaacaacgacaacaaagatttcaagaaaaccaagaaaatacaatcaagatggtgaccactaccttggaccaagcaagtgaagtgggcaagtagagcagttcttggagatccacaaggcccctcctgattcactctaacttacacacaggtcctctatttcaacccctaacccccttactatcttgctctagtatatgtgaccactggaagcaaagcaattgtacatcctttaattgttggggacccatgagcaatggccttgaaaagactcagtgctagtacgactactgcgagttcaacagctagtaaaagacttgtggaaaagcaaccctctccctctggagcagtacaaatcaataatgcaataaaattcaaaaattaaaaaaaaaacattcgctgagcatattctgtaaccacccggatttgttcaacttaatgcacagtattaaccatgcttcattaaggattaattgtgtcacagttggaattaattatatcatctacatttttttaatacgacagcgagggacggataaacttcactgtcttcatcgttctttagagttgccacagaaccctgccatttgtaagaaattctacaggagagcttgaaattttggctaaatccactaaaagttgagggatttttgtgcaaaagatgtgtctggttgtgtgatagagaaaggtgcggccctttttttttttttgggaaatctcgtatcaggaagagaaaaataggaatcatttttgttcatttgtaccttaacctgatactgctaaatttaggcattgttctgtggcattggaccacgaatgagatgattggtcaatcaaaacctcaggtgtttaactgctccaatatgcccccccccccccattcatgtcatgaacaaagcagaaattaattcggaaattttgttccattccaagaacacacaccaagatcatgttgaacaaaataatcgtccaaatgacaaacaaaaaagggaaaaaaaacttcaagaattcgtgaggacaaaagaacatcacgtcatttcgatccagcaaaatgtgacgcaatctcccaactaaccattgcatagtaacgagatttcgacagagaatcttccagtctctttcgccaacgcaaacgaaggaacaattcacacactaacacaatgcaaaatgtgattgatgcttgatcgattcagattcggaaagaggaagaaagagaaaattcctcgcagacacagattcgcaaaccgagaaatgttggggcaaaaaaaaaaaaaaacatgatctgcgagatcgcaggagaggattgggttaccttgaggcagacgacgccgacgggcttgtccggacggcgcgcgccgccgatcctggcggaggcgccgccgatcagcctgacctcgccgccgccgccgccgccgccatcctcgtcggcggcagcggaggcgtccctacgaatcttggagtaggagagcaccccgtcgtggagcgagaaccaccgctcccgccacccgcggccgtagttggtccacttgtggagcaccccggccaccgccaccgccgcgccgcccgcctcgggctccggcgtcggcggcgcgtccggcgccggcagcgccgccgcggagaggcagcagaggccgtggtggttcaggtggtggtggacgcctccgcctccgccgccgctctgcgtcatccgcctccttgattcgacggcggcgacgagaacgaaaaaataaaaagaaaaagagaaaaaaataatgggaaaaaaatggatttcttttttctttttttgggttcgcgaagaggagcgaagcgaagggaagaggagacgcgagttggctttatttagcagcggttggttgctatttatgtgtgggccccacctccctcgcctattttatgccccctccattttttttcttataagtcgcaaaaaagcttggaggagggttgtttttttctttcccaaactttaatttggccatttcttgagttaatttgtatgttttccacggatttttctcctttttgtcctaaatgcatccaagcaactggctttttttcttcacctttcttctagatgtaatcttgtctacgaaatacggattatgtttcagttattataaatatggtttatctctcaacagtttcggcgcataactataataacgacagcgctacgacgatttaactaccgatggctttgtcagataatcataacataagacaaagccaaaagcatatctttttatatgaactaaaattgtgcaagaaatttcattattaaggtttaagttaaaacattatgttactatccatctaaatgaaaaaaaaaagaataggcaagctaatagattgagtggtcgactgaggtttttataaggttgtgctagcacatataattccttattcatttaatggtataaaacatattcatcgacagtaacacatccgtgataattctgtgaatctcaagatatatagatcggtctagtctttggaggtgtttatagaagtaggatatatgcatgtttatatgagcggttgtgttttacattgttttatatatatatatatatatatatatatatatatatatatatataataacttagttttatactagaacacaagataagctaattaaaacaagaaagaaataattataattaaggaggggagagagacgttaagcaaggacatggatactgtttaccagatgtaggggagcacaggatgtcatagggatcaggagtggttcacgtgctatgactagatttagtgggccttaatgcatagttaatagtgtaccagctagtggaggtgagtgcaacatccacctctcaacaaactccatcacataatctagaccttaattaacctttggaaccccttaggtttactctatgtttgcaagacaagatagctaactggaaattaataatgttagaaattagtgggagtaccttcaagtttacacaaaagatataaatgatgttgcatatcttatgcatatctatactactttaaaattaacaatataccaccactatcctttatcactaacatttgagcccctcaatatcgataaaatttttgtgctccctaattcatcccttttccatgacaatacacgggcaaactagctagtatatgaagtatgttccggtggcactataggtttatcaaaatatgccagcttttggctatgaaggtatttgacatgatttacaactaaaaattattatattttgggacgagacgacatgtgtttaggtgtattggcaggcatgccgtgtgtgaatgtattgatgacatcgtgagagagaagaagaaaaagtaactcttgggagaagattgctaaaccataccagtgtaaaaccgtgtattcttagcttcaaatccaagagcacggacagataacaagtgatgtaaaagttgatcaaggttgtgcatacacttataaaaagcacatgagctgcacatgatgacatgaacatatatatgcatagaaaatttcacaactcatgctagctccataattcttgcttaggtactatctccttttgtcccttctgttggacatttccacttcaatttggaaggtctataaaaaaaatgatgcaaatgtttatagcaatgccatgaattttactcagattatatatatacacaacaaattgaccatggatgccattctttttagaaccgttccaaaattaaagggacatatacaggaaagtcggagtcatggatgcatggattgatacaaatgagaaataataaacccatattcttagaatcttaatagcattttcaggtatagttatttttcctagaaatccaaatattaacttttgaagggccctagtacagaaattgctatagagcaacaaattaatacaagtcactttctaagcaatgtttgcttacaagataaactttctcgtcatccattaatttttttttaaaaaaaactactagtataatttatatattgacaattataattggtcaaaatcacggtgtgggggcccactcaacgttggcacgtgtgcttgtcccggtgtggcccgcgtgaccaaccagcctctcttctaggcttacgtggcagcacatatcgttgtcttcccaaccgacccgtcactgacaggtggcccaacaccatgggtcccacatggcatatgttaaaatataatttgtgagggataaaatgcctaaggctacacagattttccatttacaatgttattataatttcatacaactgaagttcatcaacttttctaaaagaaaacaatttacgacactttgttgtatgatattcacccttattttagaccgaatcatattcacttttttttgtactccctctgctccatattattataattaaggtgtcctagtttttgtcttaaagttacttttttctaacaaagactaaatttatagaaacatgcaccaacttctacaacatcaatttagttttattaaatcatcgtgaaatatgtctcagtagtgtatttatttgatattgttgatgttaaatatttctctatcctaaccaaagttagagaacttttaagttaggacaaaactaaaacacctaaaatatacaaggaagagatattataatggtaaattgactatttgagaaatatcttttgtatgtcaataaaaacttacaccctcttaaagagaatacaaacatatttgtctacattgcgagtccaagactaaacataaaaaataacacaaacgcatgatacaatcaatttctaacacataaaattcatgatacaagattatatcatcacacattttcatataatagatagagaaaacgatttgccacttttctttatctcattgaagtatgttaaggagacgtactcattaatgtgtgcatactacctagggaatgcgctcgtagtgatgtgtggtgtgttctctatgtaatcaagaaaaagaaagacaagcgtgaggtatatatattaagaaggcacactcgaggatatgtgttaaggaaatgcattcactgatatatatgtgtggtgtgcgtgcgtaatgccatgtgttcatacatgtgtcttccaagcactcgactaaaaccaaaataaattatgaggtcaaaagcgaggtgagcatagcaatattacaaatcccatggctggcgatgtgccacgtagcttaatatcttgttgatctgtggcccccacgcttggacgagaaaacccaacatcgccaggcgcacccaacttgttgtcactttggttctttctttttgcaaggaatgcaatggaaaaccagcctatccccaatctagcactgtacttacatgcagtagtggcaggttgattgccaatgtataaacaatgcgaaatagtgtatttcaattttagcccaatagtgtgttgattgatatcatttccgtggctagtcaaagctcatttttagctatcattttcacgactgttggtcgcgctttattgattgattctctatggcatgttcgatttttgtgatagattaatagcgtacggtgctttatttagtatgaagatatacactttctttttctttagtgaggagataatatacatattttcttaggtgttagtattaactagctagacatatgtgtataaaatggttatcaatgattgttttgtggatcagggttctctttaccacttgggaaggggttacgacatctcgacggtaagcttgattaccgtaataaatcgagaacaactgaaaaaaaataaatgtttatttcaactttttttaaaaaaaaacttagttgggttaccaggcgttatcacaagtcggattactgcggtaacaccagtaacgggtggcaagagaaacttagtgtggacagcattattgttcttgccagcataatgctttgtttataggctttcaattggagaaaaaaaatgtgactattttacatgggccttctttggattctccgagctattaaatagctctctggaatcttgttatttaggagtattaaacgtagattaccgacaaaaccgattccataacccctaggctattttgcgagacgaatctaacgaggtatattaatcccgagggctattaaatagccctccggatccaaacagggccatggacttggtatagtaaaaatgaatcattaagagcagactataagccagctgcaaacatattttaagaagataaataagaagagagaagagcagcgggctacatatttgtagccagctgtagtatggactccaagacgcagtatgtgtatgacaggtgagaccatatattaatagtgtagtgtctaactattgtatgaatgagctataagattggctatagatgaattagagctagtagttggctacactattaaacttgctctgatacggtactactgttaggcagaggtgagtggtcaagtaacgcttattttatttgttcttggatctgatcacagttgacttaatcaattaggggatggtacggatagctgctaatgtagctttgttaaaaaggaattaagtagacttaggttcacatgtcatgaaagaaaatgactagagaagccatgtcagttttgaataattgtccttcttaagatagcctaaaattgaatccgccgctaccgtaattttcttgatcgagttcaacttcagcctcatttaattttgatttcaaaacagtagctctcttgattctatcatcatgaaaaatctatttccttgaacacggtaatttcacagaattttcatatgaattactttagcttctccataaatcctgtaaaattcctttgtaccaaaagagaccttactatttttatataatagaacgaataccagtctttgcttcaaagaaattataaccacttattagttattacaagcaaatgttcttttagcatagatcaactaaacaattccagcaaacaagaaggcaaagaataccttactggtgctaagtggtgatggttcctattagtgatgaaaacggagcggatagtttccgtctgctctggagaaaaacgaatatggatacctttcggatcggataattctcagattgttcggatacggttacgaatatgaatattttctcctagatacggatatggatatggtatcggggtttccgttgaatacggataataattcggatatccggtgaacagtgctattcgaatatccgcagaagccgtgagacatacccaatttctttataaccctatgatgttcaatatacctttttagattttaatagtagttcatctcttaacactagtacacactattaatattatttaaatttttaaaaatatttataaattatactacattttatataaaatgagctaattatatatgttgatatttgtttctattagaagttgagttggttttcgtgttccaagaaaaaaatgtttcagtagtcatgtccaatcatattcgattcttattcgtatttgtttccgtattcgagctatccatatttgttttcttattcggcaaaaaatatgaagacaaatatggtatgagcattatccgctacgtttttatccctagttcctataaatgcaaatacaaatgtattcgagaagtctcaaacaccaaactaaaacattgtttttcctcacaaccaactcaaagaagagaaaaaaaaaaaccatcaagacattgttttgcttgctttcttgctgcacaaaacataggcacaccatcattcagcagtatctttaccacttgatgcaacctgagaccctcatgattttgtttgtttcagctgttgttctctagggtttcccaaaccgctggggctggggttaccgcgccccggcggtaagcacggttaccgcacggtaaccgcaaaaaaccgtacaaaaccgtgcaaaatttatcaaaaattcaaattattttttaaatttatttgaatttaaggaggttaccgcggtatttatattaccatacccccacggtaagcccggtaaccgcggtaaccgcgcggttaccggcggtaaggtaaaccctgttattctcctattgaaaaatcaaaggaaacaaagcatatgtgagaagataggagaagagaggtaaggtaacatggggcctgagttggggggacaatgcataggtgtatgtgttgggatgatatcaatcaaatcatgtcaccttcgatcgatgcaccagatgttccctcagcatccatcacggctgcatgggccttttagacccaagtgaaacaaagaatcatacattagagcatcatcgacatgattgtgtactactccttcagtacaagcaccacatgattttccttttaggaaagtaacataccacttgatattttttttctcggttacctggatgacacatatgtagacaccactatataagggtttttacagtgtggttaataatatctcagtccgagtgagccagatcggagatttgatgccacgtcaggctctctcgttgtcctgtgaagaacacggagccaagttgagccacacgtttttatcagaatttgcaggtctggcctatagttatgccccacaccactagagaaggaagaggaagtataggtacctcgtcgccatccctgtcctccatgccaaggggaggagggcaatgaggcgctatcctcgtggagcacttgggccgagccggtgacggcaatggcatggccgcagacgaggaggaggggtgcaagctcaatgggggtggcgatggcctcgatacgtccgcaacaacagcccgacggtggccgcctcaaaccctcgtcccatttgcagtatgttgtcatcgtcttgtggatctcgcccttgtcgtcgagtggtaaagaaggggaggaggggagaggggtgccaacggggagttgaggtgctaaatggagatttttttttcagtgagcgatggagatcagggatgggtcaatggagcttgctgggctgccgccggcaacctctcgcccacctcgatctgcactgaagaagcacgtcggctcgatggggaaggcggcagggtcgaagaagctcgccgactcatcctaccgtccctgaccaatgttgttgtgcttgtcgtcaacctccactcgcgtgtcagctaagcttttcaccagtccctcacgctaaactgccgagctcgtctatgcatcggttgggagaagtggagaggggaggcatcggttggggaaggagagggatagtaatctggacaggaggcctgtctagattcgtggtactatgaaatgtctaatcagatattaggcttctatattttgggacgagagagtacatgataaatcttaactatttggtggtttagttgtttaggcatagtcattctctcttttttttttgttttagaaacagaagacaaacacatgcgctcactacacgcacactcacccctataaacgcacacacgcacaccctatctctatgagcacctctaaaagactagactgacatatgttgagattcacgaagtcaccactaaagtctcgctatcgatgaatatgtcgcctaccattgaaaaaataattagctctaaatgtgaatacccgtattaagtctaagacttaaatccaagtgggttgattcgaccacagggaacctaaccagttgagtgacgctcacttcgcattcattctcatttaattgaaacaacgctaattaatcttattttctcaccgttcttgtctatcattttctagaaaaaaaatgacatataagttacttgattattgtttcacatgaataagattcattcgcaagaactaacaaccaaccaatttcacttagctttttgttcccaaaaaaatggaacatagagatgactccaagatattatagttgcatcacactcgtttaattttaatgggttgtgtactgttattctcttggttaacacaaaaatatcgagaaccatgatatgagcagggtgtacacattactcgaattaactagttaactgaactttctgacgcgttagcatctctatgtgcttaggaccaataacataggattattacagtacacatcaacgttgttcgttaccagtaattaatcacattgcacgaataaagaggtatacgctgacgtcaccaaccgtacaaaggcatgcttgcacgcgaggcttgcaaatgatgatgaattttgtttcattgtcacgatgatcacttaactctatagtactactttaatttgagtgtttttcgtcgcaagctttaagatcaaaagccactactcatattgttgcaaaaacacactattccaatatagtattatacgaattcctgagctctcgaataagtaggttcacagtcgttttcagattttaagttgggaaaaagttgcgacgctttaacgtcaagtcgcattcatccaaattctgcctaataatttctagtcattgatcattgaccggtcaacaacaatctgctgaactggaacatgcaaatgtgcagcctgttctcaggaacatggcctgaaaaaacatctcaactaaccaatgggcaccgttgatctaacaaacattgattggagtacacaagaaagggaagcagcatatggcatcgccaaatgcaatctttggatagttttgtcactgcaagtatcaggaggaattgctacagacttttttaactccctgtcaatattgctgtctgtcacaccatactccatacatgtcccccatacatcagatttagggctcctccaagggcgaaaatacggtgtggatcatcagcctccgcgagcctccctcctggtggcatcatggaggatgtcaatgtcgacgccatcctggggaagcagcacgtaccgcaccaccgatcccctgatgaagcagtttcgcacggatagctgccagagcgaaagcttgagtcagcatgctcaaatgaattctttgtaaagtgttagtgcttgattaatgtagttcttccatatagaacagtgaacacaggtgcgttgttgtatttttaacaatagaaattaacaggtgcaagtggtaaagcaatgagagtatgaagattgtttcagcaagcaaagataacaaaaggatatgaatctttccatcactatcatgacctacaaaacacagtatataacattgatctatagctttgctttcctttgggattacttcaggcatcatgtacttgtaacaactaacaagcaatctttagtaacctatgcagtacaaaagtacacccttcatacaatatcattggatggaactgaaggccaaataaatatctaggtacggatactggttgtccctgtcaagtaatgtgcttgcctggttacaacagtatttgcactggaattaccagtgcatcttaagctcctaattctgcaccagtaaggcatgtcacgaactaggtataccactatatgatctactccccattaattcctaaattcatgtcaatgtagcccaaagtttgttctacaaacatttagacataccgccttttatcattagctggtgactacttcaggacatttactacagaaccattgattggagtcaacacaccactgtgttatggattggctaaggtaagggtctgaagaccaggggatagggcactcgccctctaatagcagcggcaggacttctccctgctgagctgaaagactcattgattagaactctaaggcttagcgctaacttcagatattaattgattatagggtatatggggtccctttatatataggaggatagacttgacatccaaggaactaatctctagtactacagaaaccaatccaatatctatctataactttctaataaacatcatctctttcctaactagatactctcctatctttatttgactattcctaaattatcatgcctaaactgctgcatgggcctggcccatgcccaaaacaacagagagtaacaagtgatctaatgaagagtaatatctactatggtttataaagatggttattattatcttccttatgcatactcttggttgtgggatactgggatcctataactgacattttgggcctcactgtatgcccaaagaagaatcagctgctgccataatttgaattttagaactttttttttggagttgattttagggtattttcaacttagtttctttttcaacattggcttttaagttgctaagaagacatataaaagtttacccacaaatcaatttttggatatagtcagctcttggccaactgacggagctcctagttactaacggagagtgttacctgatccatatccatatcgtacttcttttacttatgcaactacatgtcagacgtgcaaccattctgaattgtgatacagcattcagcactaactaaacatgtaaggatcatgctaaaggtactcctttaacagattaataaatcaacagatgacaagtacatgctatgcaaacagaagagaagaaatctgaaatcatgtagaatgaggtgattttgaatgtatccattaatctgacacagaccaatcacaagaagcatcatgatctgcaacactgaatggcatggaagatgtagcacaggcattggggctccttcagaggatagtattctgacaagcccggggttagcaccgtgcatgaaccaatatctatgtataaatccttttgaaagaaggcagtgcgaccccacctccatgaactacattttaatgaatagccccttgaagttcttcaatactactaagtcaaaatatagctacttttggttatgactctggacaagtacttgtccacattcacagccaaaagtagttacatttcaagacggaggtagtacataatagtaattacaaaaaatgttatagtcctatttgaccattttgaccttatcaaattgactgagttgccacatgtacatgtgtgttgttcaagctaatttggaatagaaaaatgtgtaaacacggtaaaaagaagtgaataattaatcaactgaaaaaccatagcaaatgcacaaacgcacatgcatattgaagtacaaaaccatgaaaacttcctaaatctatcttgaacagagaacaaagcatacagagtcaatatatctacagaagaccaccgtaaagaaccaagaaacactgtgtttgctgcagagtcaatatatctacagaagtacccatgcaaacaagcggctaattgctatccatatttcaccaggacagagacagacagatagatagataaccagagcagcatcgcatcgcatcgcataccatgtgcgggtacttgtcctggtcgacaacccgagtgttctcgagcttgatgttgaggtattggtcgacggagtggagcgtgccgcggatggccaggtcgttcttgagctccaccgtcacctccttccccacgagctccttgaagtaggagaagaacagctgcacagcaaccaaatcaacagaacaaaaaataaaaatcaacacaaactaacagaacaaaaaaaatgaagtgggaagagaagaaatcaacgagcagttgaacaaaaaaaactaaaaaaaatattctaccatactggccgcagaaccctccccgccttagctccgaagaatctgcagacgcaagaggcaggattagcacccagtggacgggatccccaaacatttttgaggggcaaataaaaacaaaacttctagtcctattattaaggtttaaggctatcaaattaagagaaaatcagcttctcccagatctagaagagaagatacagttaacgcaggcaagcaaattggacacaaaagcgggtgggttggagagagagagggagatgaatgagaaaagaggatgcggatgctcaccaagaagcagcaggacgacggcggcgagcgcctctccccctcccctggtagcgagatggagatcggcgcaggcgcaaggagcggagaggatagaccggaccgccggagatggaagcgcggcagccggatcgggaggaggcaaaaccctagaagagcgcgagaaggcggaggaggaggagttgggttgggttgggttgggtgttgggtatgagataggaccaaaccatattattatgggccgggttagggtgaaaggcccatatagctttatttattaggaaaaaagtatactctgactccctcaactatcacccgagtatgattcatgtcctccaacttccaactattaaaaccggtgcaaacaaataaacaatatccctcggtggttttggaagtggttttggctgacgtggcggtcttgaccgagtctttatccaacatggcgcttacgtggcattagaacaaaaacaaaattaaaaaatgtggcgcttacgtggcattagaataaaaacaaaaaaaatatgtgggacccatatgtcattcacacaaaaaagtgggactcactgacatgagagaccacatgtcatcctccctctccttcccttcttcctcctatctctctctctcgggactcaggagcggcggtggtggcagtggccgatggggacgaggcggaggggagcgttggtggcggtggtggcaggcagcgccagcgatgacggtgaggacgaggtggtggggagcggcgacggtggcggtggagaacgcggctatggcccgcggccactaggagggaggaaggggtatgagaggggagccgcccccgtggggggtcggagtcagcgtcaccggcggctggctagcgcggcggcagcggcacgagctcctccctgaagcacgaagcacgccctcctcctcctcctcatcctcctcctctgctctcctccgccacaatcgtccccgtaaaccacctcttccgccttctcctcctcctcccgaccgctaccgtcgccgctcccctccgcctcgtccccaccgccaccgccgtcgctccccaccgccgtcaccgccgccaccgctcccctccgcctcgtccccattggccactgccaccatgagagagagataagggagggagagaggagagagagggggggaggatgacatgtgggtcccacatgtcagtgggtctcactttttgtgtgaatggcatatgggtcccacatgttttttttgtttttattctaatgccacgtaagcgccacgttggacaaagactcgttcaagaccgccacgtaggcaccacgtcagccaaaaccaccaaggggcattttttacaccggttttgatagtttaaggagtcaatatacccggttttgtggttggaggatatgaattatactcgggcaatagttgagggagtcaaagtatattttccctatttattatctcatgtgatttttttctcacacaaataaaaagggagtgagacagggatgcaagtggagcgggtaaacgggatttttccccctccgcttatctcacttctaatttatttttttttccaaaattaacatgtgggatttatttctgacacttatcctacttttaatttattttgcccctaaagaaaaagggagtgagacagggatgcaagagaagctggtaaatgggattatttttcctccccttatcccacttctaatttattttctttctaaaattatcgtgcgggatttatttccttcgcttatcctacttttaatttattttttttccaaattatcatgtgggaaatgaagtaacgagcgggttttattcgtgtagttggattagttgcatctctagagcgagatgaactaaggttacatacccaacttttggattttttatatatactagcaaaaatgcatgtgcgttgcaacgggtgaataaattctaataataatatacgtttttttatgcataattatgtcaatgataatatttgtattttaatgagcggcttgtttttttataaacggcgtattactttctaacagtttcttcttagcatgtttttttttattttttttactgacaacaaaaaccatattttcctccctttttgcttttcttttctcacgcgttttttgcttttttcttaacgttctttttttgcttttttttccaatagatgagaatatatgacgaaataaaagccgtgtaatagatggtaaaaaatcgatggatcctatccgactcaagcgtccatcaatttagcgttttttttctgacagttttttcagagcgatttattttttaatagacagttttttttcttgcgcggttttttcaaataatttcttagaaatggcgcattttttcttacatttttttccttgcatgttttttttaaaaaaaattaccgacgatggaaataatatttctcgcacggttttttatggaagatggaaaacctttttagcattttttttgtgcttttttctcacgcacttttttgaaccgtttttatttttctcgtgcattttctctttttaaatagttagattagattagagatagagaagagatatatactgataagaaatcggaatttgtttcgccctttccatttttttctcgcgtgcatttttattttttacgaaccattttttcgccactttcttagggaatcggacgaattttttttagatgttttttcagattttttcgcctttattggaatcagactttatttttctgtttttaaaggaatcggatctggcctttatttttcaccacttttttttgccttttataggaatcggatctacggtttttttcgccacttaggggaaacaaaattttattgttattgtttttctttttttcccttttttttgcagtttttctttttctttttatatgcacctttatgccctagttctctcccttttattattttttcttaaaaaaaagacctcaagtatcttattgcaagattataggaactcaaatgtaaatataaaaattatagggactcacatagaaaagtacaaacccaaaaattaaaattatataaaaatggaatgctctcgaccggtaggttccgtttttgcaaatagatcttcaatccggcacatcaatttttttcaccaagatatatgggatatcacggtatagattgaaactgagaggtgtgtgcctgggatctcggactcaaacttttttttttgttttgacgggagtcggacctgagagggagttggacttttttttatttttttcttttttttgacggacgaagaaaacatctcttatttttttaagtagtagagaagagatagagatagagaagagataatatatatatagtagtatataaatttataatttaacatagaagaatttaataggatgtaacaagatgattattaatacaagcagaattagtgtagtctattcgttgctccgacttcaagagagacgtgcatcttaacaaagctggagcccaaccgatggtttccttggatggtttttattgctccaaataattctagccccgtcccccgtgcttctctgtcttcttgaaacaaaaggtcgtcacattgttttacaagtgctcaggtgtacgttggattgcgttgttgcacccgactacccgagagtagtcataccaaaatttgaatatcataacagtgctccattccatcgactaggatttgccagccttgagcactataaattgtcctcaaacgttatcatggattatgtactaacataacatgaaaggatcaggaaaaatatctttgatcaaaatttacacctcagcacttcttccattaccagttcgcaagtacatacgcaaacaatgttcccttccgcaaccaaacgaaacctcatggtatatttgagattaattcggtataaaatgaatgtccattcgttctcagcgagctaaaattcctcagcccaaatgcatacagaacttgaggaccgatggcaaaggcaccaacaagtagtaaaagaaaaaaaaagcctacaatgagaatgccgggtgcttccttctttccaggagcaggggacttcaaaaacaaacaccgagctcttcctttcctagctgcaaattagtgtccgggacaaggactggaagctggatcaactttactacaggccggatgaccagtagccaatgctcttgtaccctcttaaaatctgaaatccgggtcgacgtccattgcccacgaaaatttcgcaatgagtgatttgttgaaaatctgtcaaggcgaacagtactgtcagttaatgtaatcggttcaatcatttgatttgatcatatgccaaatgaaaattttactttgttcaggatgcaatgacgacagactattatcatttcaaatatccgggatttcaaatcaaatgtttttttgtatgcacagttatagtttagttgaacagaatcccacccccaatataaaatgaagtgtaatctcgataagaacaatgaggatgtgcctgtcaactttgcataggccaattcatatggaaagaaaaatagagttgtcctaaagcactgttaccttctcgatgggtacttcatggcgtttgcaccatgcaacagtaattctgggatcaaggtaattgatctttgaagttcctagtgccactgtctttaaatcctctttaatcttcttatccatctccatcttctctatcttggtttcaatctgagatatcttcttttcaaacctgcaagcaaatttggtgagatttctcaacattgtttttttgtatatatacaaaatagagatctatctgtgattgagattattacgcttcaggggccaaatttctttttggtttcccatctttgtcattgcctagattctttcctttccttactttgctcaagtctgccttcaattcatccctttgggcctggagaaaagaaaaaaaacaagagagtttaccagaaaaggacaaaagaatgaaatggtacaatgttgggctaatcatttgcagtagaaattcaaccttcaattcatcaatcttctcattcaatctagtcatctgggaatcatgtgattttgagacactacgctgatggttacagattatagcaacctgagtaaacaagaagtatggttgagatcaaaacaggtcaaatataagttttttctatttcttaaagagaaacacaatagacctctttgttggctcgttgataaaccgcaattttttcaagaagagttccatcttctgtttctttgtgcaactgtaaaatcagcaccaatagacatacgttcagaaaacaactattgtgaaataacacgttacacacttgagcttcaagtaaacagaacggaacaacatatatactactaaaatgtcttaaaccattacaaacttcaatcaatcacttcatacagcagtgaaagtttaagaaaaagatgtgaagatctatctgaacttacaatatcatccaaggtgattgaagcattatatgtacggaacacttttgcggtaagcccaggcatcaagtcctttagatgagcatttagcctggttgtatcgagtttgtcaaagagatcttgtcctggtttcttgcctagaataaagattaagaaaacagaagtgattccactagtgcaaggtgaggatcggagggaaagaaagagttgcagggcagagttaccagcacggaattcctcaattgccttgtatacaagcagttcaacctctacagtattgaagtatcttatagaatctttaccaaggaagtcgaactgtaaaggttatggaacatcagatatcatctaaatcaagttacacatgcagaatttattaataatgaagaccaatacctgcagtttatttggaggaacacaagtaacattatcaaccttcagtgtacagcaaccaacagtttcagcctcatcttcatcctgaaaagaatttgaagtagtggctaagtatacaaactatgtatgtcactgtaattcaaagctatttaataaactatatgtatgtcattgttgaagattgtattctaacaaaaatctatgcgcattatgttgaccattatgcaaaattatgatgagcagccacacagctaatcctagatacagtcttgaaccaaaacgctatgttgcatagtgtaaatatccattcagaagagatgtcagaacagaaggcacatattccttttttttttgttattggttggttggtgggggagattactgtgcaatctgcaccgatagcagaagaaatatatcccaattcataaatgtcagtcagagagctcaggttagaaagtaccttctcattgcctgccctaagggctaacttatctataaggtatgttgccactgcaatttgtttctttgtcttatctttgcttctgaaatcctttgtgtaagtgtcacgaattttgtgtacgtgatgctgcaatgaccaagcagaaaaaaattatttgtacatgcaaactcaacatctccatgacacaaacaatgaaccctctcaccttcaattttcgagacttctcatacttctctttgtcactttggccctttaatgcactgcttgctgccaagaaaacatacttgaaatctttttggcttattggatcattccaaaaggccaaccatgtaactgtgttgtcgtgtttgacttctttccaactgcagtacacatgaccaaataaagagtgagcacatactagcaaccccttcacaaatataaattacacatcaaaggtaatgggaaaatttccagcgtacctttctccaggtatgggacattcggggatcggagccccttttccgatatttattgtaatatcgcttggtttaatgcggcgcttcagttttcccatctaaaacgatgtaataaaaaagcatcaaaatgatgtcgcttacttaaaacagcacgacgagtatatgtatccatatatataccttcggatgctctccgcgccccctgaacaagccaggtggttctactctgaaattgccaacctgaaaggaacaaagtactttaacccagagtaattttatgcgaaatgaacctagtatgcacagcagatagaagatgacacagctgtcatgtatgttaaaaaaaaaataagaacatcgaggcaacattacatgtcatgaagcaaactaagtataacacatggtatgcattgttgacatctggtgcaaaattattcacaaaattgaacgctagggtaaaacaaaacaattgctagattataataaaaaaaacatttacctaacaataacagaagaatggggaacaagagaaatatctacaattactagccataactttctgtaactacatttttgcagcacaaagaaaaataccttctctttaacaccatctacaatagcccacatgtacttctcctcttgtttcaatttctcttccttcaatgctttcttctcctgcagaagaagaattttaaagattgttcacttccgtagacaactttttatagattaccagcacaaaaactaaattcattctgctgaataagtcaaaacaaaacatgcagtacctcagatgtcatctgcttcttcttctccttctctcttaggtgccattcatagatcggggtgaaatcacaaagctcaaatttcttgatgacatggtttttaccaagaatttttctccaatcagtgaagaagttgtcaatgaatgtttgcttggatgcataatcagtgtctttcatcacagcaaacatggtggcaacctgtaacagagataattagtagaggaacaattatctggtagcaagatatggattcaggagaacctgattaaaatgtcactcatggtacaaatcaaaagatgaaaagtaaagtaaaaatcagctaatgttatatatctcacctcttcttgttctggcgtcagatcaacaggttgcccgttgtaaagcatcttgacaccatgaggcttgtatggaggggggaaaataacaccactgtgcaccaaggtagtccatttctgtccaccaccagatccaggagggaccttcattgtctttgagaactgagaatttttcattgttttctttgttttcattttcattttcattttcttgttgtccttctttaaagatgaaggactcttctttacgatattctttgcaggtggcttgctttttgaagactcacccattttcagtctttgtgaaagaggtacattgtcattgtcatccgccttgggttctcttttgacacttgcagacgcagaaacatctgaaggcctcgccttcttgagagctgaacttgtttgattattattgtcaattggccttttaattgaatttcgtgatgtgctcgcgtcattgttagacatcttgctggaagaacttgcttttatacttgcagacaggaccttgtcctttgaacttgagatacttgcagatgcattgccagtaactttcgaaaatcgggcagccaatggcttctcatcctctgaatcatcagaaacattacctccccttttcagagcagcattagttggcaacctgctggccagtggtttatcgtcctctgaatcatcaccaggttgctcaattttaggtgtagttttcagtacaatagccttatttgcactactcgaaggcgtttttgttgagtttatcttgagactcaatggtttatcatcatctgaatcatttgctgtcccacttcctacagcaggtttcttcaaatttctatcctcgacctttctccttaatccgattggcttatggtcatcttctgagtcatccgacttatcttccacgaaaggtcttttcaatttactcttatccactgagttactattatggctactatgttctttggaactgttcggctgacctgatcccaaaggtcgagggtttggactgcttgactgcggcctctgttgcaaaggcctcgaaacaccagtcagcccattcttctgttgattggaagcaacagccttagggctcctaataggtccggcattccctgatgagccctcctgctttgtgggggtgggcctgttcttcacagaggtgctcgacctcttgaaggagatcggaccttcctcgtcgtcgttgtcaaacataacaggatcgacaacagccatcgatccctaggggcggcggctggcagacggaacaaatatgctgagtcaaccacacctgcaaacaaagtaaactcatgtaagcaacctgaagatagcattccaccgttccagcacaatgcacaagtgcactataatggatcaaccaaagcaatctatgcgcaaatctaatcaacagaattcctgcttcaaagtaaaccatctccagaacagagttcccatcgcatcccaacccacgcaatcacccctttgagtcatccacaccgatgcacccgccacaaacacagccaattccagctcaggacgaggtttcctccctttgtgacatcaataccgcaatcaacactacggacgagaccaaccaaccaaaccaccgctcccccctcagatcggccgcccggacaagacgaaaccgcccgttcatccccctccccaccccgatccaccgcaccatccccccatcgcccccaccgccgcaagccctagggaggagacccccgccccgatcacgagcccttcccaacccaacgcgaggcaaacaaggaagcaaggagcgggatagagagagagaggaggggagatacccacctaggcgccgcggcggcgacgtcccgctccccggggagcggtgcggcggcggcggcggcggcggcggcgaggcggggagctagggttagggctgagcttatctgtgtctctctctcctcgcctctcctcccgctctcgtatttctatcgctcgctctcacctcgcctcgcccgcgccgctgcctccgactcctctccctccctctctcgccttgcgttttttttctctttcctttccttttttttcccctttctgccttgtatttttttccctctccttacagagagagacgggttgcgtcgcggacaggagaggcgtgtgggccccactggcagagacccgcgtgggtcccgcgcgcagtgaggtaaacgggtcgtggcgggccccagctggcagcgctcggaacgctacgtgtgggccccacgcgcagtgagagaggagcataggtcgcgtggggcccacgtggcagagggggtgcgtcgtgggccgggcgtgaggggcacgggccgtgtggggcccacgtggaagtgcgtggcttgggcttgcggcgacggaacggaacggaaggggaagccgacgtcatacgcggcacggggggatgggcccgcatgt

SEQ ID NO: 8530 - DNA, 24715 bp, Oryza sativa
ggggggttggaaagcggtggggatgaaccggtaaaattacgtttgttggaacggaaagtttgtggatcatgtgtgtacttgaatcaatggagtgtgtggattagtgttcataattattgtgctttgtgctttattactactcctactttgaattagcctttttaggcaagggcatgtacaatagttatcaatagtggtctcttagcgttgctaattagaaatacttgttgacatggaagaaagagaaaggggagagacaaaacatcgttgttatgcatgacaacgactcttaatcactataatatggaagtatggttatataatatggaaatatggttgtatgagggtaaaaagatagaaagaatattaataaaaggaatattttttgagttaatgattagagcctttgtcgtctcaactattgtaaagatatggtctcttaataatcttgtattgtttaagagaccatactcatctctaccattgaacatgccctaatatgagctctctatattaattaatgtcactagagactaccatcctacaatagtagagacaatatgtaacgtcccgccttcccccaggccgggccgaccaacacatgtcttttctgcacactttgtcctcactcgtgtgcacccgggaagaatttcccggtcggtcacccatcccaaattgctctaggccaagcatgcttaaccctggagttctttggagattggattccggaaaagaagttgcaacttgttgatatgagtattctattaatcctattaagccctaggccgggatgttacacaataagatttgtaaatcattaatgcactaaatatttttttactatacttctttccttttatacaccatcatgcagcaaactttccgttaataaatgctaagagtcgactctaagcagttgtcatgcgtaggaacgatgtttctcctttcttccctctctttcttccacgtcaccaaatttacttacatgagcatgactaggggtgggcagaaaaagaccgaaccgaaaagatcgagaccgagaccgagaaattcagtaatcaattcggtcctaggtagtgaaagaccgaattttgttcggtcaattcggttagtctcctcgggtaaccgaatagaccgaaaaaaccgaattatcaaaaaatgtctaaatacaacctacaatccactatatttaataggattaaactctaattttcacatccctacttcttctaggcatgcaacctaataagagtctttactcataagtgcttacgaatttttttgtgatttttgtgttgaaaatttccattatttctttgcatatatgaaaatgttgttgaatttcggtcaggaccgagaccgaaaagaccaagaccgaatttgtcggtcctgatattttttcactgaaattcggtcttcacttttcaaagaccgaaaagaccgaaagaccaaagaccgagaccgaaattttcggttagaccgaatgcccacctctatgcatgacaacgaagagagcccgctattagacactatattgtacatgcccttagcactcaacctaacaatacatgtttacattcttcacattcctaaatttctaatgtttggtttacttgtcaggcaaactagctatttttagcagattgcttttatcatttagtattaagtgtattgcaattgaaagcgagacttggctctccttcgaaaacgaagttttacaaattgagacgaattggctcctgaaagttagattattttattccaaatatcagacatggcttaatcaaatgcatgtgcaactaaactaaatctagcatgccattacgtagacttagttagggcttcagtgccaaatacatgattggttacaaatttggcaagtatatgcgttcgagtaaaagaaacacaaccaaatttcaaaatatattttcatcggaaacttggatggtacttaaacatgaaattatgggatatttagattgctacaaaataacctttttcgaaatttggaataacaaaaattttagtaattggtaatattgtcaagttttggtagggtttcttttttggatgtgtttagcttggtacccacatataggctaccaaatttttgttacatttggaggctgccagattttattgtgatgttaccaaatttatgtgggtgttaccaatgttcgataataaaataaatacattcatatgtttttttattttttaaataatattgtctaaaatgacatcaatgtggacaagctctatgttaatttatatcgcccttaaccgttaattgaaaaatgcctagttttagagtatcacctaaaaaatccatccaaaaatatctttggaaccctaaataaaatttgaagtgtgaaaatattcatctttctaagagatgatttattattgaattcctacaactaaaatattgggaccatgtaaaactaatactaaagttctatagaaaagttgctttaacaaatcatatcaatctatttttaaacttttttaaaaaataattaattaatcatatgctaaacttacttcgttttaagtatctttttcccttctaggatgctatcaagctacctttcttcaaccccatatttgactatgttaaaaaacacaaaaaaaaatccaatgtatcaccgacgtgttgcccccatgccccacatgtcaccctctaattgtacaccattttacattgcattttttttatacgagtgagttcattatctcaaaaaaatatgagtgagttaaagttttcatatatatcatcatggtttgagtttgaccatatcccaaaaggaagaaaacaaaaagaagacgatccaattgccaactcctatgtacacgtcacaaaatcgtttaatatcgcttcccttggagctgagcctcgttggtatcgaaacatcgacgtaggagcctcgggatcaaattaacaaaaccttagtgctggacaagtgcaatgactaatatgcccttactagcacctagtatcattttctttttttttaaagaacaatatcatttttgataaaacatttgcatcaccggagtaagcgctcttggaccttacagtgaatttagaggtattatttcttcaatagtatttgctaacgaaatattaaattcttactcataaattttttttcaagggtttcattatatgtctcggcttaggcttagccaaccaaatgcataaactaggaaactcaatttcttttttttaaactcttggagagcttttgtttctcatcaaacatgttttcataacatggttgataatttcataagatcatttgatgggctagatggttgtgaaaatttggatttgacatatgaaggacttcctagaaaaaaaaccctcaaaattagttcaatttatgtaaaatttcaaactttttcccaaaaggaggcccaatgagaacttgtatagtcctatcagacatggatgctgcttaaaaatttagcagagttagtcttggttgggaacctttccctccaacacgaaaatggagcagctcattaacacataattaattaagtactccctccgtattttaatgtatgacgccgttgactttttgaccaacgtttgactattcgttttattcaaattttttgtgcaaatatgaaaatatttatgtcatgcttaaaaaacatttgatgatgaattaagtcacaacgaaataaatgataattacataaattttttgaataagacgaacggtcaaacgttagataaaaaattaacggtgtcatacattaaaatatggaggtagtattaactaaaaccaacttgaaaaatagattagtatgattttaaaatagttttcctatatatatatattttaaaatatataccatttagtagtttaaaaaacgtgcacgtgaaaaaagagtagaagagatgggaaaacaaagaacgaaaaaaaaaccttaacattttctaaaaacctgatgaaaaatctgcaattttctcaaaactcatccaagggcaaaatagtcaaatcatcactattataattctcattaatctttctcttccacagttccactcctccctcactctctcccacagttagcatctcgccattcctccgatccccacctccaccaatggcgctctccatctccacgccgccgacctcctcctccctcctgccggcctccctccaggtacgccctcccgctccgccgcctcctcctctctccgacgagctctcatttgcccggttcggccgctcctcgcgcccgtttcacccgttcttggtcaccgccgccgcttcttcctcttcaggtcggcaggtggagctcgtcggcggcgatgtcggccaggcctgtggcctttagcctccggaggccggttcttgcggcccgtgtagccgccggcggcaacgcaccgtcttcctccgtggacggtaaggatgctggccttgtgcttgtcagttgtctccttcatggcttcctgtgtgatttgagttactgattttggtcagcttggttgtagaggtggtcactgagctcgatgccgtggccagcttcagcgagatcgtgccggataccgtcgtgttcgatgacttcgagaagtaatactagtagttgcttctttgctgttatcccaccattgaatttagttggccgatccaacttaatggaatgatagttcataggctgctctgttgattgggttcaggtttgcgccgaccgccgccacggtgagctcgtcgctgctgctcggtatcgctggcctcccggatacaaagttcaaggtgaggtgctgttgaaatgtgaagccaatcaaagcactggaagtggaagagagacagttgactaattttcagacttttgtttcttatagagtgctatagatacagcgttggcagacggtgaatgtaacacaatggagaagcccgaggaccggatgtcctgtttcctaaccaaggtttgcatactgcatttcagtttcaatgtaagcagtctgtttgttggataagttgagcatggaggaatttggcaggccctggcaaatgttggagctgaaatggctcatctagtccctggtcgggtgtcgactgaaatagatgctcggttggcttatgatacccaaggaattatccagagggtatgagcttcttccttctgtttgttgtttcatgctgcttgcctgaaatatttatccttaggggaaaagaatcctccgtgaattgtgatctgcagttgcagtcccatgaaaataatttgatatgcgtatgttcaggtgcatgagcttttgaagctatacagtgatcatgatgtcttatctgaacgcctgctgttcaaaattccggctacatggcaagtaagtagaatgcaacacagtagttggcaagttgcctggttgtacctgctgccatttcccatctttgtaatcgatgtgttctccactagggtatagaggcctcgaggttgcttgaatctgaagggattcaaacacatttaacatttgtgtacaggtatgtacatatgctttgcctaatttgatcatggccctatttcttatagtgggcaatggtatagatgctgggtgtatggcaatacttatcttttttgtggggttagagaactgccttcaatttgtttagtcttaagatacttcagtaagtataagggaactaataaagattgtttcttattatcatgcatcacttattaatgatggctcaattgcattgtaagtatacattttgcttttatgtcagcagaagaagaggttttctattgaatttacctggtgaattgtaattactcaattaggcctgactagttactgttgataacaagcttatctataaaggacttgcactattgcaggtgcataaaagccataaacttactcttgcaatttacataagatggtattgttggagagagcagactgcaggatgtgtagctcacctagtagttagtaactgagaactcgtaatcatttttttttgtgtgcctgatcattcttcttcagttttgcccaagcagcagctgcagcacaagccggtgcatctgttgtacagatctttgtgggacgtgttcgggtaaattcatcagacccttaccttcatgggtttatgctaattcaaaaaaattatgctgaccacaaattatgcaggattgggcaaggactcactctggcgacccagagattgatgaagctttgaagaaaggagaagatgctgggcttgctttggttagcactaaattaccttttaatttatgattgttcctacagaattctatcaatatgaactaaagtagccacattttgataatcatgataactgactatttgagctcaactaaaatatatttagttgattagaggttgtgtacttaactatatcaggtaatatgaactatgcttgggttgattctaggacttggcatattttagactccatttggttctcatcatcaacaattttgagcaaaccatgtgttaatctggcatgttgcccatgttatagtgtaattgataaaactcatataactgaataatcagtgacaattatcaaggttttcattaataaagggactatgaatgaagaacattatacttatcaagcgttcacgtcttctcaattcgatactgaactaaatttccgtttactctctacatgttttacattccttactttttctgcagttgcataagtatttagttctccatataattctatattgtaatgcaggcgaagaaagtgtatgcctacattcacaaaaatgggtataaaacaaagttgatggctgctgccatacgcaacaagcaagatgtgtttagcctcctggggtatttttcttattacagatcaagattgatcgcaatggatgttagtttgtacagaactaatatttctgaaatgtaggattgactacatcattgcacctctgaagatattgcagtctttggaagaatctgtcactgatactgacgtgaagtatggttatgtcccaaggctgactcctgctcttggcaaaacgtacaacttcactgaagaggaggtttgctcacttatcctggattttgtgcagagtcttatatcatgcattctgtagctccaccaaactactcgctataagagactcctattaggggtgtgatgttttatctaaaatatataggatcttcacttgtcatgtgctttaacactactagagatgaaataaggaaggaaaataatatttggactgtttagatcacccttaaaaggtcatgtcaaagctcgtagtaggtgtaatcatgattcaccaaacagttactagaacaatacaaacaagtcattgacatcctataagaagaggaaaaataaaacaagagaagataagtgattatattttttatatggcaccttcatgctaactgttcatatttcaaatgataccacgaatgcagcttgtgaagtgggaccaattgagtctagcagctgcaatggggccagctgcggaagaactacttgcttctgggttggaaggatatgtgaaccaagcacgccgagtggaggaactcttcgggaagatctggcctcctccgaatgtttgaacacattctatgatgaggaccagaccatgccacagtcttctattccaaagaataataacaacagccacggacagtgctggccagcatttgctcgttcccttcaaagaatacttctcttagcctgtctgtgtttgtactttgtagttctctagctatctagcaaatctcacgatgacatgtcaagaacatctttgttttcttttcgcaaagattggatacggattttctcgagtatttcattagcccgtgagatgtgtaccatgaaatgtcacccaaatgctctgctggattgttctgaagtctgaactgaatcttcagagttgcagttacttatcactacgtttttttataaaaagatgggtgccatcagctagtactgtgaattcccattttcagtaaaatggaagaaatgctgatgaaaaaaatgctggtcaaacttgctctcacttttcagagtaatcctctgtttcttttctttcatggacctgacatccctatcattccaaatgccaattacctaatactactaggatgctggatatgggttctggttggatgctggttagctcaggaatcacactgctggcatgagcttactagtttttgttatacagttatcattaacatacgtatttattttatgccaaataggcagatattggaaacgtttcagtagttcgagcaagatcagttggacaggccggtggttcacgcccatccagtgatgatgaagttatcatttaatttaaaaaaatatcaaaataacataatactctctccatatataaaagaaaagagtctcggatgtatttcttttgtcaccgactatcccgtatgtgactaagaccaaagactttaagcatacatgcaactaatgagtattaagatagcaacttaattcccatcaacaatttaatataacactgtaaaacaacaatttaatatagcaccataaaacgaatagacagtctctttgatgcatggagattacaaatatgtttagaaaaataaaatatgcttaagattttgggataaagggagtaaagagtaaagtgcatttttgtcctattttccactgcaaactacaaaataagttattattttacccgcaggccgcaaccgaaacatagaccatgcttcctccaaatgtagttttaacataagtttttgtcccctaaaacccttacttttagagtgggtccgtattaatgaatgacatagtggtcttttaacctcttgctgaatactccatctgacctaaaataaatgcaataatgtaatttgaattacactgttgcacttattttgggacgaacagagtatgtctttgactatctaatactccctccatcgtataatataagggattattcccttatgtgcaagattaaggatatcaccaaaatactagaatacccttattaaatgaaatttgcttataggtgaatgggtagttgggagttaaaataggtagaaattaaaattagagttgatggatgtgacaccaaaatcccttatattaatggacaactagaagaggcttttaggcaccatcttttcgcttatacttatgcttatgcttatcagtcaaaatttgaattttcaaccttaaatttgaatctgattttgaagtttttcatcgaagtttatttttcaatctttgcttttaggtcgctaagaacacgtatataaaagttttattcacaaattacttctcgtttacaaatatgccgtttacaatggggcctaaagtctagagtactatagtcttacaagtacaaaggaagaatagttttgatcgatgtgacagtggtttccactagaatgaacttcaattaaaagttggcatctgcatggagtgaactgaagaaaaaccagttcaaacgaaactgtaaaaaacatgtcccaaggtgcttctggtccggttttgtatttttcacccaaaccgtctatagttcagggtgaaaaatagatcgagtaaagatcaataattaaaaatgaactttacacccataaaaactaatgaggtgtcccttgtttgctctatggcttgataaggtatggaaaagagaaaacaagagtagaacttagtgatttgaaagccgatgccaaaaaaaaaaaaacccctcaaaatcaactctaaaattaagtttgaaaattcaaattttggctatggttgataaactaaaaacaaccaaatggtgaagtactaatgtttttaaaaactattttattgtgtttataattttgtaatatttcatatattaacaaatctacaaaactccatgagtataattgattattattttaaaataaaatggcgtgttaggttttcactttacatggttttacatgttgcgtaagttacttgcgagaaagtgtttgaggttagataaatatctattattaaaaggaaaaaccttttaggttatcttttaaaagacgatgaagtgccgtatatgatgaaaacactcctgtcattagtatttctagcaataaaataaaaaccgtacaacaatataactctagcttcaccaataaccataaatcttcatcgaatgcccttgcattgagggtaacatatcatatgaccagttcacttgagagaaataaatacttaggtgcaatgtattgagaatttagctagttcgtaccaatatacaaacacatggcggcttctatatccgtgattgttaacactattatattgttatatagcactgccatacaacaatatatgagcaagttcatatcgcccttagatcattgtgattggctggattacatggacccgtacaaaagtgcattggttcgcccctagtgttatacagttacaactacaccatcgtagcacgtgtaaaacatcacacgatataaaagttcacgtggaaaaaaacaggagacgccagtttaaaaacaactaatatttcactgctgcaacagttactaaaaacccatcaataatgaaaccaaaccttaggtggactagagtgattaacttaatttggaagtaaataaaggctcctccaaaacttccttttttttcttttacattcctccatgtaaaaatggtttctctttcctctacacccttttgctcttccattcttttgcccttcactcctctctcatcttttcaccctttttccacattttttttcacttcaaaaccccacacaactgacacaagagagagagaaccaaaccaaaaacccctcctttttcttccttctcctgcagcgagagagaggatggcggcggcggcggcggttgcggcggtggtggtcgcggccgtggtggcggcggcggcgtccgcggcggcccccgcgtcggccggcgagcccacgcgcgacgtgcggtgggaggtcggctacatgacggtggcgccgctcggcgtctcgcagaaggtttggtggcgcgccatggcgtgcgctctgttcttgatttcttccgagaaatttgggccgccttgtctgatattttcttcttctttttttttgttttctctccgacatgttcttcttcttctctgtctccgttgattctgcgcgagtttctcgggtggtttcaaatcgaaaaacgtctctctctctctctctctctctctctctctcttgcgtggttttgaggtttgtttgatgatgaatctggggctaaaaaatgcttcctaatttttttttcgccggtttgcgtgggcggtttcgatcgcaccgatctcgtctcgtcgtggcggtttctgttccatgttcttgcaggggttgtaaatacgcgttgatcgatctgtcctaataaaagacgacgtaacctcatttcctccgaaaaaaataaatcggatcccgcaaactttgcaattttatcgttgataaaaggaaaaaagatcaacattgcgtacaaaagagaggggaataatgatatcatcttttctgggttggatttctgactctgtttctcgttgattttgatccttttgagtttttgttcatctgcgaaacaggtttgttgttgaaaattgatccatttcgagataaaacagaacacatttacacacaccagatttgagatttacagatagaaaatctggaaaaggatttgcggacacaattcttgtgcaagaatttaggggtgtcatgctcttgtttagttacagtcttatatttttttcttaccatatcaatatgaaacattgcgctatcttatgcgtattgttttaaaaaaatctagtgtaagaattgttttctgatggcatgaatgcaaatacttgtttttttttttttgcaggtgatcgcgataaacaaccagttcccgggcccactcctgaacgtgacaaccaactggaacgtgagggtgaacgtccaaaacaacctggatgagcccctcctcctcacctggtatttactaatcctgcatttcaattgcatagatccaaaattgactaagctggactagaaattttcgttaagatatttttatataaaaaaatcatgtattaatgaaaatttgcaccataattttcagtttctgtttctggtgaatttaaacagcacattcatagtgggattttagctgtacatttccattctgtgggggcctcttgggcttcacattaggcatgcatgctgcatttcggggaatttatgggcttaattagttgtgtcatgtagccaaatattcttatgctatattgagaatttgagataggataggcacaccactgtacttatccactggtttgcccattttctcaagttcatccgtgcaaaatgatcagtttcatcaacagttcattatgttgacaacttaatacattattatgtcaataatgcatttctaataagaataaatttcacttcaatacatgtgttcttcttgaattactgtactactagatcgattactagctaataaaatttgctgtacacaatctgtgttgcactttgcaactgaaaacaaggttagaaatgtgaagccatacataatagtaacatgcaaaatgccaaacactagagggtccttctgcaaaatttccttttaaaagtgagcctaaggctttgcctgcaatgggtgggtgggagtcattggcgccaaattttctctgcattggagtcttggagagctcagagctcacctccctcttggccatggcagggatggcatccagatgaggatgaactcatggcaggacggcgtcgccggcaccaactgcccgatccctcccgggtggaactggacctaccagttccagctcaaggaccagatcggcagcttcttctacttcccttcgcttggtctccagcgagccgccggcgggttcggcccggtcaccgtcaacaaccgcgccgtcgtgccggtccccttcgcccagcccgacggcgacatcaccttgttcatcggtgattggtacaccaagagccacgtcgtaagctccgagctctccctctgtctgtctgtctgtctgtctgtctgtctgcgattacattttagtttacagtgtcagtgttcataaatcgtcgaggagaatgatattaagttgctttcttgatatctcaactgtatactattttttcttggtttatgttgcaagcatggttatatgtagtaatgtagaatgatacttagatctgtactctctgaaaagtaagagaattcttgtgttcatcatttaagaattgtgaagtacagtgattttttgatctatggataagctatatggtgcattatatttgaagaaagtttttatctgttcttctttgaatgtgagaaggtatctctgcccaatgtaggaattgaggaaaatgctagatgatggtaaggatctcgggataccggatggaattctgatcaatgggaaaggcccttacagctatgacaacacattgattccagaaggccttcaacatgaaactgttggagttgagccaggtaagcacacttagttttcttttccccatcatatttgccttatcattagttttctgcatgacctattaagcctgattcagtttttacagtgatgcaattgcgaaacattatagatatgtagtcaaaatttggaaaaagtaaataatcatacttcctcagatgaaaaaagacatcatatcaattaccacctccatttcatattataagttgccttgaatttttttcctagtcaaacttctttaggtttgaccaagtttatttaatagaaaaatttggcaacatctacaatatcaaattagtttcattaaatgtaacattgaatatattttgatactatgtttgttttgtgttgaaaatattgctatatttttctacaaactttgtcaaacttaaaaaaaaattactaggaaaaaaaatcaaaacaacttataatatgaaatggagggagtagtaatcataaatagttgaagatcagctttcatcaattctgttattttgtagcagcaaaggacagaattttctgtctgaaatgtcttgctgcatttacatacagatatcaggatgtgaataaatgtctatcactgatcagttatcaggattactgcaaaaatctttcagtcatgccaattttaatgatctgaagatttctgactagaacaatatttcatatacttgttacaggcaaaacttatcgcttccgtgttcacaatgtcggcacctcaactagcctcaacttcagaatccagaatcacaatatgcgcctagtagaggccgaaggaacctacacttatcagcagaattacaccaatcttgacatccatgttggacagtcatactctttcttggtgaccatggaccaaaatgcaagcactgactactacattgtggcgagcccaaggttcgtcacgaacgagtctcgctggcacgatgtcaacggtgtggctgtcctgcagtactcaaactccaaaggaagagcttctggtccccttcctgatggtccaaatgatttctattacaagtcctattccatggaccaagccaggtctatcaagtgagtattaaccactagtactgttgtgctctgtactaacaaatatccttgcattattagtaactatgatgctgttgattaatgatagttttcttgattgtaagaatcatctagtttcaaggttgtcatttccagtgactacatctcaagatgacatgttctccattgataaccattgcaattgtatttttcagaatgaatacaactgctggtgctgcacgtccaaatccacagggatcattccgctacgactctatcaacatcactcagaccttcgttctcaagaacgagttacctttgctcatcaatggaaagcgtcgaaggacgataaacggggtctcatactctccaccagagactccactgaggcttgctgatctccacaacttgactggagtgtacaagactgacttccccacaatgccaggcaatgctccaccaaaaatggcttcatccacgctgaacgcatcgtacaagggcttcctcgagatcgtctttcagaacaatgacactggtgttcagacctaccatctggatggttactcattctttgttgttgggtatgtgatggaaaaccaaaacagtttcttttaccatgtgatcatgtgttatgaatttctggttagtcatgtaaaatgacacagtcctgcatcaccattttgtgaatttcaggatggataatggtgattggactccagattgcaggagtaggtacaacaaatgggatgccatctctcgcagcactactcaggtacacaacttcatgaaggacaatctgatcatatgtcaaatttgtatacttacaaaacatgtgcatccttgagtattctgaacaatgcaaatttgcaacatttttcataggttttccctggagggtggactgcggttctagtctcgctcgacaatgttggcatctggaatctccggtctgagaagctggataactggtacaatgggcaggaggtctatgtgaaagtggctgatccactgggatacaacatcactgaaatgatcatgccagataatgcattgtactgtggtctactgaaagacttgcaaaagtaagtttcaccggatcatttctgttttctctttgtttcactgatagtagtacattctgtttttggccacttaccttgtgttctggaaaaccttgcaggccacagattcaccaggtaaacagcaagtcatcggctcaagctgcagatcgatggggcgcgcgagttcttgcaatggtgttgctgatcattgcagctgtggtttccatttaaatttgttggaatcagatgaggatatcttttagttaggctctgtgggtgatagaaaatcatattgttctttgagtacagaacaacttgaggaagctgtctgtgcaaagtgcaaaacttggattctagaaatgaaaaacctgtcaattttcctacggtttttgttctggctttcacctgagattgcattgctcatgtgcagtaagcaggttttacctccatgtgatctaaagcctaaattgtccgcagtactgttgtaagtcaggaagtacttcattatctaattagttttttaaaaatataatacatcaggaaaattccattaggaatgcattcgcgcacacatacacacaaagatcccactggtttactggactcctcgtagattcaacagaaatagctcaattctagtgctccctcggtcttaaaatatagttatttttaatattttaaacttgtcttatatcagaatactacttcctccacccaactacaactgattttaatttatctaattttaccctcgactccttaaccagcccctcatataatgagggatactatgatattttccttttatccttagtcccaaaaaatgaagattagaagctcttatattttgggaagtcaaaaaagatggagggagtaaaaatcaatagaaattcttggctaaacaagctttcagtctcttcgaagacgtctttcaattttctcgttattctgaggtgtagggtccccatcttattattcaatttcctaagaatgcatcatataagcttaatataagaggacttttatggtataatatactgctagtatatttactgcaagtatatatgatctaacggtatagattgatttgattttttagttaattagattgcagtataaagtttgaaaaggtaattttgtcttttcttcattattctatcatcaaatcgtgctatcatcacgtgcttcgtcatcaaatggcgctcaggatactcctcccttagtgcacgataagatccagtaccgggtactcccaattagattcaatctgaacaaaaaattactaaagtgttattttattttctatcaaattcctagcatgcccttctatatactgctagtatatactagtaggatattgtaccgtaaaagttctctaatataaggccaccgctattaatagccattaaccggtagggcccatttaaacataaaataattctattcaaacatggcctaagtaaattcacttggtactaggccctattagacccgtgagagagtaaatgcaaccaatactataattcattatgttgttccattcatgttattatgaacaaaatgccaagaaattatggagaagtgaatgggagagatgagcttgactccttttaagttgaggttgaagttaacccaacttaatgtcttgcccaaatacgatggcacttatattaccaatatggctctttgcctcccacgagaaattgatcatatcctaggcctagccatctatatgccacggggacaataatatggatggtaaataatcaatttgtgatcctaaagggtatcagtagtagcgtttcaaatcataggatgaaagtgactccaccttatatcgatgagtttgcttaggtttgctgtggtgcgcatggtgagaccatcaaatacttaaaatgtaaaaacaatatatacataggtatgccaataggtgatggcaaaagtgttcacgagaatttccaaaggtacaactaatgtggttgatttttttttaactattgtgatgcgaaagttcaaggtatctatatttttttcacatgatcgagcgatgttatttcgtacttgagatacttttgcatgggaagagatgtagtttagttgaaacaaacgatcggatttacttcaagatctagtctaccagatgttttagtaccgttgctgctactaagaaagcagtacatcgtattttctataactaagtacattttgttacttatttactgaggttgatgagctctactaataggcgagcacctggtgaaaaatgctggttgttgacgagatcttactcatataagttagtgttcaaatacataaatgcaaagttgaatcatacacatgtgtgagagtttttatgtgtgaatacaaaggtagcttgttgaaataattttgatattttgtttcaaccaaactctatctcctcctcttttatacatttccttatcacacaataacataggagtactatctattgagttacatgcactgatcagttcaacccaaaagcttaagttgatggagaaatacagacaattcactttatattccaacgctatgatttgtttcaattttgaaaatggcatgaaaggctaatctagcaataaacaaagccaagaaaaaagaagaaaaaaaacccatggtaattgcgctcacccaaaccccaacacatccgccgcgtctagggcttcctcgcgctcgccgccggccgccgccgtgaacatgggctccggcgacaaggccatgttacgaccccgatcgccggcggcgctgctcgccggagatccgatagaataggagtagagacgggaggaagaagagaacacgagaagcagaggaggggaatcttttcttttttcttcgatagttttggacgcggtatccccctcacacacgcgacacatactcctcaggtcccaccacttagtggcttacaggttacataaataaattacgcaatcttattgagaaaacgcctttcctctgtacgttttccacctctgctctgattcagcacagcgattgttgctcatcagacaaccgctgtgacaggccaccacctccaagcaccaccgccgcgacaaggacaaggaccccgaccgcgagcgcccctcctcctctcgccaccaccaccaccaccaccaccgcgacgacaaggacggcgagcgtgaccgcgaccgcgatcgccaccacagggagaaggagcgcgatcgcgaggagcgcaaggcgcgggagcgcgacaaggagaaggagcgggcgcggcggcgcgaggagtcgtcgcggtcgaggaggcatggggcgtaggaggaggaggagggagagggggaagatgaggaccgccaccgcaagcgccgccgccggtcctcgcaccaccaccaccaccgcggcgacgcggagccggaggcggcggctgccatggaggaggaggaggtggtggtggtggtggatgaggaggagtccgagaggcggcgtcagaagatgattgaggaggagaagaagcggctcgacgaggagatggagctccgccgccgccgtgtcaaggagtggcaggagcagaagcggttggaggaggaggaggcgaagcgccgcgagcaggaggcggcggccggtgctggcactcctgccgcggccgctggggccgacggcgattccaatgccgggaagaagtggactctggatggtgaggagtctgatgaggagggatacaaggaggatagccaaaatgcagaagatgacggtggcatcactgccgatttgccgagtgaggtgaatgatgcaaatgttgctgctcctatggaggaggatgagattgatccgctcgatgcattcatgagctccatggtgttgccggaggtcgcaaagctggagacggctgtggcatcaatggagagcatgcctgcttccaacatgggtgataagaatggtaaaagtgcaaaggatgctgtgagtaatggtgataagaaagggcaaaagaaggcaatggggagaattatgcaaggggatgattcggactctgattatgatgacgacgacgacgatgagggtggatcgaaagatgaggatgatgaggagttcatgaaacgtgtcaagaagacgaaggtagaaaagctggctattgttgaccattccaaaattgagtaccagccattccggaagaatttgtacattgaggtgaaggatatcacaatgatgacaggagaggaagtggctacctacaggaaaaatctggagctcaaggtacatgggaaagatgtgcccaagccaataaaaacatgggtgcagagtgggctgaccagcaagctccttgacaccatcaagaagcttggttttgagaagccgatgcctatacaggcacaggcattaccaatcataatgagtgggcgtgattgtataggaattgcaaagactggatcgggcaagactctagcgtttgtcctgccaatgctcaggcatgtcaaagaccagccgcctgttgtgcctggagatggccctattgggctcattatggctcctaccagagagctcgtggtgcagatacattcagacattaagaagttcgcgaagtcgcttggcatcaactgtgtagctatctatggaggttcaggtgttgcccagcagatcagtgaactaaagaggggcgctgaaattgttgtttgtacaccgggcaggatgatcgatatcctttgcaccagcagtggaaagattactaaccttcggagagttacattcttggtgatggatgaagctgataggatgtttgatatgggctttgagcctcagattactcggatagttcagaatacccgcccagataggcagactgttcttttctcagccatttttccacggcaggtggagatactggcacgtaaggtgctgacaaagcctgttgagatccaggtgggtgggaggagtgtcgtcaacaaagatatcacacaactggttgaggtgcggccagaaaatgagaggttcttgaggctgttggagttgcttggagagtggtttgatagaggcaaaattcttgtttttgtccactcacaagataaatgtgattctctacttaaagacttgtttcagcgtggatatccatgcttatctttacatggtgggaaagatcagactgaccgtgaatcaactcttgctgatttcaagagcaacgtatgcaacttgctgattgctggttgtgaattagatgtgaagtagcttgagctggttgtgaattatgatgtccctaaccattatgaggactatgttcatcgtgttggacgaactggtcatgctggtaggaagggctttgctgtgacttttatttctgacgaagaggagcggtatgcaccagatcttgccaaggctctggagctttctgaacaggctgttccacaggaccttaaaggcctagctgatcgtttcatggcaaaagtgaagcaaggaacagaacaggcccatggaacagggtatggtggaagtggtttcaagttcaatgaagaagaggatgaagctcggagatctgcaaagaaggctcaggcaagggaatatggatatgaggaggataagtcagattcggattctgatgaggaaggaggggttcgtaaggcggggggtgaccttgcagcacaagctattgctgctgcccaagctgccgctactttggctgcagccaaggctgctagtaatgccaatcagcaagtacaaagcaccaatgcagggtccttactttctatacctgtcgtagccaatgctccaaataatgaggccacggcacgtgcacttcaggctgcattgaacattcagcaaaatttagcacggatacaggcacatgtagtcccagaacattatgaggttgaacttgacattaatgatttcccacaaaatgcacgctggaagatcactcacaaagagactttgggtcctattcaggattggactgaagctgcaatcactacaagggggacatttattcctcaaggaaaaattgttggtgcaaatgagcgcaagctgtacctgttcatagagggacccactgaattatctgtcaagaaggcgaaatcagaattgaaacgtgtccttgaggattgtgccaatcatgctctgaaccttcctggttctgcccaaactggaaagtactctgttatttgagctgcggattgctaacagaacagctaattcagagatgcagggttttcttgtgaaggtatgcgagaagagaaaaaactcatagtccatatatcaaatatttatctgcccttgtatgagcacagtaaacaaaatgttgcttatcagctcattacttcattttaccatggcaatagtagttctataacattgaaggtcgcaactttaaaaatatatcataagtatatcggtgctctttagtgctaattatagatcacccggtttccttatttaccactgtatccgtctttcatactgacagcttgacctcttgcatagctatatgttatgcttgtactgttgatctataacaaattccttatagaatgtgttttataccataggttcgaaccacacaaaattgatatgatacttgaacattctgaaccatgcaaaattctgatattctcaatgtgaccaggtctttcttggaaggtggactgcgattcttgtcttccttgatgacggcgttatctgcaacatccgtgctgagaagctggataagtggcaggttagggtgttctatgtgaaagttgctgatccactaggttacagcatcactgaatgatcatgccagattgcacactacatattgtagcctaccaaaagacaggcaaagtatgtttaagctgaacatctcttctgtttggttggttcagtcatactccctattgttgataactttaccttctgttctaaaaacctttcaggccacatattcaccagccaaaaaaagaagtcatcgtcctaggagcttgatggagaaccaggctcctcacaactgcgttgctgataattgcagttaaatttgttgaaatccaaggatttgttaggctttttaggagtgccaatcactcataacagggattaaagtgagatcgttgttcgttgagttatacagaacaatgaaaagctgtttgagcaaaggccattaacttgatgcaaaaaatgaaattcggctagctttacctgcttttgatttcattggcttatatcatttgaggtagcaagttaatgtctagactctagaaagcaggttttccataactgaatgattcattatgtgataaaaacataattagctggcactgttgtttttcattcaagagattactcctacaggattcacattgtcgcacacaaacaaaaatcaacactgacaacttacaaaaatgtataattaagctattctgaccgtgcttacacatgccagcatttttttttcgggaatacgcaaggagcgcattttttccattaagagaaataaaagttatttacaaagataaaaggaaaacaagcaggggaccgatacaggacgctatggaaaactataggaatatctcgcgctaaatttggctaccacgacctcgtaaaggccaaacagcggggatcccgtgattagctgacttctaaagcatggcctcctccgccattgctttcaccacttcggtccaagacctttgttgttgattgaagattcggttgttccgttccttccaaattgtctaagccaccagtgtcacgacagtgtcgaagcctcgacgatgccgctccccaatcttcatttggctctcacagagccaattgtggaaggatggctcattgacaggtaagcagttcggcctccttatcgcctgaagcgtccaccaccataattgtctcgattcagggcatgctaccaagatgtgatcaatgctttcctcctactgatcgcaacgaacacaacgatccgggtgtggcaaccctcgactgcgcagacggtcagcagtccagcatctgttcattgcgaccaaccacaagaagaagcggcatcgaggcggagcgagtgacttccaaattggggtggaaaggaaggtgacacgaccaaaaaacaaggccttataggcagattttgagctgtattggcccgaactctcccatttccagatgattgaatcaggagtagtaggatcaagatccaccatttggacaagcgaccaaagctttagatattctagaataggttggatcccaagtgctcctcggatgtctttgatccattggcgacctgttagtgcctcagccaccgtccgacaccggcgcacgcgtggtggaattttatcatagatgttcggagcaaaggaccgaatgcaaccctcttgcaaccagctatcttcccagaagaggatagtttgtccgtctcttaattgacagatggtagaggctgcaacgaagttcctttccttttgcgaccccggaatggctagcccctgccaaggtttgcttgaggaggtccgttgcaaccatgtccacctggaacgaagagctatacccataagctccagattcggtacacccaaaccgccgtagttacacatgccagcatcgatcacctttgttggatttagagtttacacggacaaagataagatgatacataaaatatgatcagttctcctatagcttacagtttcatcatcattcaaacatctatccattagcctgctcattgtgcccaatggatcttcttggcctattcaaaatgaaagaaaggtaacgacattcacatattaagttttcaagttccaaccaagaaaggagataagagtgcaattaatcagttaaccttttggttatagaagtgttcctctttgtcacctttaaatatcttaagtttgcagatgaataaaaacctgtatgattctcaaggaaatctaatatatatgcaagaactaacacatgcagaagatataatctggcacaagcagaattcattttcttttttcttttttcttttttcaaatttcactaacttgcaacttcatattggggataaagataagcataatgctgatcgaatcaaactcacctgtatatatatttatgactcttgaaacaggcgtttctccatgcctctgctcctgtccaagaacctgacagtggagatgtgctggactctctccttgtcctcaccctgtatac

SEQ ID NO: 8531 - DNA, 3053 bp, Oryza sativa
aataacaaaaaaaaaaactacgcgtattgcgatgagctaccaaactagttggggctagaaagtgccacactagtagcaatacccaaccgtatgcgatggagacggcacgacaacgaggcttaattttttagcgtgtaggcgagggaatgagcgagcgagaatgcgtccatgaccatggatgatcgatcgatctgaatcggatgaatgaatgaatgaatgcaagagctgaaagggagtgaagaataaataagagcaaagcaaagggaaaagggggagcggccacacaaccaggcttcccgtgacagctctaaacccaaacccatttttttttgacctcctcccttgccaaagaggtgattaattccagcgcccgtactgtgtgcttgctgtcatctacgcagccgcagccaccaatcaccgccggccgacgcgccgcccgacgccgggtgccctactctccatgcaaccggcctgtccctgacaaatattacaacagaaacagagcacaggttttcagccatatatagtagtaacataattatcaactactactacctccgttttatattataagactttctagcattgctcacattcgtatagatgttaatgaatctagacactcattaacatttatataaatgtggacaatgctagaaggtcttataacctgaaacggaggaaatattattaaggaggagaccatgagataccaaaatttttagcgtaaaatttgatacctgagatactttctcatagtaccttttgaaggaccgtacaatcactctaagattgcagcaatcctttttgaatatttgttatgaaatcggaggaaaaatattattatggttttcttgcatgtggtgtccgtgcaggacaaatttgatttagggttttgtctgctgttgcgacctggaaactggaatgcatgtgacgagcgaaaaggatggagactggagaggaccagagttttggttacctgccttgatcgatgtggtagacaaccaagggcagaagccagacaagtcgcattcccgtctgaagctaccctctgaccctgcaacaaacggagcagaaagtcagaaaaccatgtatgaatatgagcacaaaaaatatcgcgtaatagagagccacttacgtacggtagaataaaaaggttaatgagtaaagcaacctgtaactccagataaccaagtaggaacaagacagcaaatccgcaatgaagacttgtaagttgtaacatcttagagtgaagcaaaaaaacagttacttcctccgtttcatattataagactttctagcattacccacattcatatatatgtttaatgaatctagacatatatgtgtgcctagattcactaatatctatatgaatatggacaatgctagaaagtattataacctgaaatggagggagtacaagtttcaatcccaattgcaccaaacataagagtggcagactaccagaaagaatcatcacttatgatttgctcatttgtcgcaggaagcatagcttcctctctgtatattttactgaataacaggcagtacacatgtggtgtaatcacaaattcacaaattggatgaagtgagatcaccatcatattgccaggacaaaacaattacacatttcacaaaaatatttcgacaaaagataaatggctcgcacatgcactacacaatatctctggacaagcccataatatcgctcaacacccgaagactgcccattgctcaacacccgaagattgcagcaccattcagggatccaatgatggcaatggcccaagaccagccgcgaaaaagcatttccattctccaaaattggaataatcatgtaccataaacaaccttgagatgtgcctagtgattctcaattgccgatgaatcttcatcgatatctgcacgtgatccttcccacagttgctgctctatgcccagtttcctgagctctgttagacctcgctccactgcagataacaaaactaacagtgctcagtaaagcaaaaaactgaaaatgatggcattcttggataggagaaaaaatggatgaggtgtgtaaatctaggtaaaaacaattggaaaaacaaaacagattataggcacaccgcaacatgtaatatatatgagggcatactcaaaatgccttctgtatacccccaatatcccataactgtttagacaaaaaaaaacacatcaatcacattaatagtggttcatgtaagtatctcacatataggtggtgtttgaatctcctgaagatgaagatgaagataaagattaagtgtttcacgcaaaacgatgtggtaataacgtgtgattaaatgagttttaattattacaaacttgaaaaatggattaatctgatattttaaaacaacttccatatagaaagttttcgcacgaaacgcaccgtttagcggtttcaaaagtgtgccacgaaaatctaaatcttcatccaactcttgttggagaaacgaacgggaccataatgttcgtaccactataccgtactttggattacagatgggaaagaggacagtaaagggcaaagagataaaatacaacagtgaagaaataataaaaggaggaaatagaaagttggtttgatccctacaaaagcatcacatgatcaactgttggggcatgctgtcaaaaaagagctgcacaaataaaagacatcccagggacgttggatggttaaatagtacgataaatcattaactaacaggtggataactcccaatgctaggttattttttcaacaaggaaagttgcttattaccatctatagcatcatgagaagttggggctactgcattgcgaccaatccagaactgaagccgttcttcagcaatgtcttcctcaatgccatgagttttagctcttctccagaagtatataagccatgcctgcattcaatatatattccataaatcacacgtaataaatggatgaatttgatagttcacatcgctgaaaggtttacctgcttaaagctaacatcttctgcctcttcatggctaagatctgcaataggtcaaaaagtt

SEQ ID NO: 8532 - DNA, 7383 bp, Oryza sativa
ttttaaggaccacctcttcctagcataaggttgcaaatagatcaaaatctatatcaagcaattaaaaaatgggagtactgaaatcagactaaccatttcctcttgggttaagatcattctctgagtcatggaccggagggcctttgtttcagtctctgcttcctttagctgctccatagctgttacaacctcttctttggcacactattcaaagcatgagaagaaaacatggtcaaataaaacaccatatacaaaccaacactacttccatattttgattggtaggaagtatatttacatccagttcatgctttagtgttgtcacttccccatctttaccatcttttgattcccttgcagccttcagtgcagcctgtagacaaaaagcattatataaagtgttcgttgatgggtaagaaatatcctctttatttttctggtaaaattggaaggtatgtactccagcatatccttcaggttcagattttttttttacaataagaacctagcatgactatagtaccgcatgtgcatttcaagacaaataaagcagaaaaaagatcaaatgaaattccaaaatgtttcatccttttgttttcacaacaagaaaaacactaaaattctaacacttccaaattttacatataaattctaagataaaaaaaacagtactacaagattggcatgccagctatccataggtaaaacacaagaagaaaaactaacctccctctgtttaagggcagcttctttcctgccaataatcatgacaatgttaggttatgagtctatgatcagttctgaatttgtgaaacatgcatatccaaacatgatgcaaacctgctcaagaggcgagcttctaatgataccccttccccaagggcagctacctgcatatcaacaaatataaccttagctaaccaaagatacaaaatgctcagtgtaatgaacacctcctcaagtaaaggagaatattcgttccaataattcaaattcaagtttaaattgtagtgaaaaattcccgccaaaagaaaaactgtagtgagaactagagatagactcaatgtctagtgcacatgtccaatttatcataatacaaaaaaaaagataaaacaatgtttaatataagattatctcacctgtttctcaagctccttggctctagcttctgcttcttcacatctttcttcagcaagtcgtagctgtcaatcaagattcagaaaataatttgttaaagatcagtataaaatcaagtactagattgcctataaaacagctctatggttgctatttcaccttttctagaacactctcattctcctcttgtagtatatcaagctgtaggacagcattgcattagtcttaaaaacatctgataaacactcctcaaaaagttctaggtcaaagttcgtgacagaaccatgagctaaaatatattatacgtataactagtttatagagaataaggaaaacctcatcttgaagtgcagacgcctccctttttggtgttgattctctggagttgagatgccctgtatcaaacctgaggcaaaaaaaaaaagtaaataacttacctgatgcctatttttaggaacatttgaaaaaatgggaaaaagaaattcaagctataagaagtggccagatggtcataatgtgattattccaaaactttaatgcaacaagcaatgtggtgcccctagtaacatacttaaaagagaaaagggtgcgtttagcatggtggacgactaaagggcactttattttactaatcctagatatattaactagtcagcaagtaaacgtgcttgtagcatgatggtaaataccttccagtgggaagctaacgaccagggttcaaatcttggtcttgcaccaaaaaaggtcactcgctggttctaccaaaacaaggttaggaattgatctatcgtccttgtgtagggggcaagagcctcaaagcatggattaaggcccgatccatagggggcggctccccatgtaggaggaccagcttttgtggcctttctggggcctcggtttcaggtgcttcttcttaattgaaatacctcaggggagatctttccccttggggccgaattttttgttattattaataactagtcagcaatgcccttttcagcacaataaaagaaatcatttgctagaataggtaaaaattatgtataatttgatagattctgcggcgcagttcagcaaagcgcggtaataggaaactggccaagaggcacacccacaaccccaagatgctgaccaattgattcaatcaaatatcagatttcacaatttaggtaagcgattaagatttcggacgcataataatttactacccatccttaataagcatgtattattgaactcaaaacttttcaatccattacgcccaagataagagggctctccactataccgaccaaaactgaacacatagtttggcatagggctgttggttcaaccttatgatatcaatgcatctttttttactaacaacgccaccaaccaaatacatccctttatcaagagcagtttagttaatgttgtgaactaccaacatcacttcttctgaaaaacagcgcaagcagtaaaaataactcatttctgctcgatttggtggggttgctagtacaattaaccatgcattcattttaatatatcctaagagaagtagaacttaaggaatgctattttaagtatagaaaacacagagaatgctgcagaccatgcaacagatctggggaatgtcattgacgtaccttttctgccgactgcggtccactggaggctccacagccacaggtggaataggcgatggtgtccgcaatgtcgtgctggttttgatcggtggaaccaccgtggtggtcggccgtgaagcaacggcaggcctcccagctgatgttgagcggacagtaggaggtggctctacaatgttcctacctaactaatgaaaacatgaggagatcaaattagcagaagggcacaggataagcggtgatcaaatcacgaagcagccagaagtcccaatgcattcatcacttctcccaatttttacaattcagaaggcatcgctatagaattggactgacattggcgagatgtaaactagcttcactagcaaattcatctgctcaagcatgcttcagaaccaatttgacttccgattgaccaactatgactcattcgtgcaccgcgacagttcaaaccatcgaaatcctaagttgagacgcagcgggtagcgagatcagcgagagatccgggggaagcagaatttaccgcaggggagggagatctcgcggtgcggccgagcaacgagacgccgttgctgccgtgcgccgcggcggggcgcgcggagccgaacctcgcggggggaggggcgggcgggtggtcattggcgtagtcgtcgtcgtcgtcgtcgtcgtcgcggcccgcggcggccgcggcgctctgtgacgccatgacctgggccagcctcgcggcggccgcccgcgccgcgacgttctgcgtgcggcgcacgttggagacgccgccgcccagccccgcggcggcggaggcggcggaggaggtggaggaggagcggtggtgggacggggagacgccgcccggggaggaggagcccgtgctgctgccgctccgctgccgcccgtagacggggctccccgcgcggaggcggtccatggcggaggcggtggcggcggcggcgctcgccggagggatctgggccgcggcgcggagatggcgaggcgaggttgagaagtgggaaggaggttggaggagagtacgctgctcgcgactccagtagagtttcgctgttttttttttccttctgttttgccttctcgcagtaaaccccctcgtcttctcaatttttaaacaactacgcgtacttgtacatttatgtttgtacgttaggagtacacctagtagtatttgattgatttgtgagtgtttcttggatataataccacatctgttttatattataaattattttaattttttataagtcattttatatttttaacataaataaggaaactatcagagaatatattcaatgttaaatttaataaaaccaatctgatgctataaacaatatttttcctataaattaggtcaaactttaataagttaaaattttagaaattcaaaacgtcttatatatggtatgaaacggaaggattatttgcttttttggataatggggttgatttcattaagtaatgaaattacaacatgcttatgcactttatgtcaatattttcttatataagagaatatattacatgtttactgtaggagaatattccatattctattaagtgatactactattccatacttattacaagataatatttcttttttaattatagcagcaatattctctcttatgccaaatttgtgcgaccatgttctgtttgataaaatatggagaaagacacggtatgatactatagtacttacatacttagctggcacctgtcatgttagaaaaagatccgcaagccggttatctactaagtcatatatttatgtcgtatcttattatactccctccgtttcaaaatgtttgacactgttgactttttagtatgtgtttgaccattcgtcttattcaaaaaatttaagtaattatttattcttttcatatcatttgattcattgttaaatatactttcatgtacacatatagttttacatatttcacaaaattttttgaataagacgaatggtcaaacacgtgctaaaaagtcaacggtgtcaaacattttgaaacggagggagtaatttaactggatgagcatgtgcctctggggcctttatgtatgagtatgacgaatcaattattatatatgcacattaaagagataattatatgccaagtaattagcattgatatgtaactatatatggtatagatcaagatttaagtggcatgtattaattaatttccaattgttggtgccctatagctaacttttattgtggttatccactttgttttgcttttaataataagaatcttccatgttcctttcgagtagaagagagtatctgtataccttatggattccattatggaacataacccttattccgcacatttctttccatacattatgtgtcccattttagggtcaattccaatgacaacgctatgcgctagtacatggatgggcttatcttatacggagtatatgattatatgtagaaatcgcacgtcgaaatttcatcatagatgatactacaaaaacagaagaaattaacaaaaagaggcaataataatagtaataaacataaatacctaacaaaacaaatggttgatgtagaaagaaaaaatagagaggacctaggtgtaaaacaaaaacacatctactccgattaaaaagcgaaattccactctgggtgctcgcggacgagagcgatgttctcgctccgtgctggcgcgcatccgatccgatccgctgcggcgggtgagccacgcggggacgcctccatccgccgtccatccacgcggccccacacgatccaacggccagaaacgccacacgcacgggctgctcggtgttcggggcccccgcagcggatcagcggggagcagtggttagttggagaaaatggtgggggcatcaagcccagagagcggagaggacgcaggttaattaccccaccttaattcgcagccacaggtttggttagatctgagatccaacggctacgattcgagagggtagtgtccctcgaaaacttcttgggctctgtaattaattaatctccaaaatcacagttgatctcagggggaaaagaatctgcccatctgggttaactgcagctttcttgatgcagcctgcaggtgcaggcaaaaagcaaccttgttagttcactgttctaattgataaaaacacattaaagatctcatgtcaccttgtacccgagctcagtttttttactttttcatgtgttgaatcgtgattcaaatttatttgcacttagtaaagaataacttctgctgtagcaaagcgtaggtccgttgccggaggcttgggggccaggggtgcaggggcggagcccccgcggtacaaatcgtcatcccttttaggttccaccatatatatatctcttgtaagctgccgtgcggcgttgtaacctcaccctgatacagtgaagatattctgctggctggcgcccgtggttttttttctctcctgctttagaagggttttccacgttaaatcttgtgtcttctgtgattgatctattgtttattgttttttattgtttgtttgcctatcgcgcttcctaacatcatcgaattattaaagattatttgctttatgttttgaaaaatatattttcacaaaaaaaatattgtattgcttagaaaacaagttatctgttaagattatttattaaaatgtttaaaaactttttttaaaaaggagggctaagtccttgcgttgcttggcttggcattcacttccaaataataacccagctggcgaagctggtgatcgatgagatggagctagcaaaataattatgattggcaacgtacgtgcacgcagtacaagctacagccaaggatcacttgattatggggcttttaactatttgacacttttagatttgacaaataactatttaccatccctatctcaatgacatatgggtccacatatgtctatgacatgtgggcccagtgataaaaaagttaattgccacatctaaatatagtaaatggttaaatatctccttgattatacacctgataaatcacagctagggtaggcttcactgccttgcattagcttaggccgagtttagtttcaaattttttcttcaagcttttaacttttttatcccattaaaattttctacacacacaaactttcaacttttctatctatcgtatcgttctaattttgacgtgaactaaaacacgcacttggttaaatttagagtactacgatatacatacgaccatatcgtacgagcattcaaccacgtctcatctatcgatccttgcattcggcatctttcatgtgtgcctagaaaaatactgtaataattgtgtctgtgcaagtgaatcgtacacacacatatagctactctaaattactccctgacaccattgatttttcgaccaacgtttaaccatttgttttattcaaaatttttgtgcaaatatgaaaatatttatatcatgcttaaagaatatttgataacgaatcaagttataataaaataaataataaatacataaatttttgaataatacgaatggtcaaacgttggaaaaaatcaatggtgtcatacattaaaatatggagttagtatcatctttcggcacgttgacataatcagttgaaa
